(19) United States
(12) Patent Application Publication
(10) Pub. No.: US 2007/0105114 A1
(43) Pub. Date: May 10, 2007

(54) Biomarkers of cyclin-dependent kinase modulation

(76) Inventors: Martha Li, Short Hills, NJ (US); Brent A. Rupnow, Ewing, NJ (US); Kevin R. Webster, Hopkinton, MA (US); Donald G. Jackson, Lawrenceville, NJ (US); Tai W. Wong, Belle Mead, NJ (US)

Correspondence Address: LOUIS J. WILLE;BRISTOL-MYERS SQUIBB COMPANY, PATENT DEPARTMENT, P O BOX 4000, PRINCETON, NJ, 08543-4000, US

(21) Appl. No.: 10/567,867

(22) PCT Filed: Jul. 29, 2004
(86) PCT No.: PCT/US04/24424

§ 371 Date: Aug. 18, 2006

Related U.S. Application Data
(60) Provisional application No. 60/490,890, filed on Jul. 29, 2003.

(51) Int. Cl. C12Q 1/68; G01N 33/574

(52) U.S. Cl. 435/6; 435/7.23

(57) ABSTRACT

Biomarkers having expression patterns that correlate with a response of cells to treatment with one or more cdk modulating agents, and uses thereof. Also provided are methods for testing or predicting whether a mammal will respond therapeutically to a method of treating cancer that comprises administering an agent that modulates cdk activity.

### SEQUENCE LISTING

[0001] The present application includes a Sequence Listing. A compact disc labeled “COPY 1—SEQUENCE LISTING PART” contains the Sequence Listing as D0310 PCT.sequence listing.ST25.txt. The Sequence Listing is 13394 KB in size and was recorded on Jul. 28, 2004. The compact disc is 1 of 3 compact discs. Duplicate copies of the compact disc are labeled “COPY 2—SEQUENCE LISTING PART” and “COPY 3—SEQUENCE LISTING PART.” Also included is a computer readable form of the Sequence Listing.

[0002] The compact disc and duplicate copies are identical and are hereby incorporated by reference into the present application.

### BACKGROUND OF THE INVENTION

[0003] The present invention relates generally to the field of pharmacogenomics and, more specifically, to pharmacodynamic biomarkers whose expression patterns correlate with a response of cells to treatment with one or more cdk modulating agents.

[0004] Uncontrolled proliferation is a hallmark of cancer cells. Over the past two decades, it has become increasingly clear that the molecules, which directly control cell cycle progression, accumulate defects during tumorigenesis. These defects can result in the loss of checkpoint control and/or the inappropriate activation of the drivers of cell cycle progression, the cyclin-dependent kinases (referred to as “cdks” or “CDKs”). Misregulation of cdk function occurs with high frequency in major solid tumor types (including breast, colon, ovarian, prostate, and NSCL carcinomas). Therefore, inhibitors of cdks and cell cycle progression have the potential to fill a large therapeutic need.

[0005] The cdks are serine/threonine protein kinases that are the driving force behind the cell cycle and cell proliferation. Cdks are multisubunit enzymes composed of at least a catalytic subunit and a regulatory (cyclin) subunit Morgan, D. O., Nature 1995; 374:131-134. To date, nine cdks (cdk1 through cdk9) and eleven cyclin subunits have been identified which can form in excess of thirteen active kinase complexes. Gould, K. L. (1994) in Protein Kinases (Woodgett, J. R., ed), pp. 149-166, Oxford University Press, Oxford. In normal cells, many of these enzymes can be categorized as G1, S, or G2/M phase enzymes which perform distinct roles in cell cycle progression. van den Heuvel, S., and Harlow, E., Science 1993; 262: 2050-2054. Cdks phosphorylate and modulate the activity of a variety of cellular proteins that include tumor suppressors (e.g., RB, p53), transcription factors (e.g., E2F-DP1, RNA pol II), replication factors (e.g., DNA pol α, replication protein A), and organizational factors which influence cellular and chromatin structures (e.g., Histone HI, lamin A, MAP4). Nigg, E. A., Trends in Cell Biology 1993; 3:296-301; Rickert, P. et al., Oncogene 1996; 12:2631-2640; Dynlacht, B. D. et al., Mol Cell Biol 1997; 17:3867-3875; Ookata, K. et al., Biochemistry 1997; 36:15873-15883.

[0006] Cdk activity is regulated through a variety of co-ordinated mechanisms, which include cell cycle dependent transcription and translation, cell cycle dependent proteolysis, subcellular localization, post-translational modifications, and interaction with cdk inhibitor proteins (referred to as “CKIs”). Pines, J., and Hunter, T., Cell 1989; 58:833-846; King, R. W. et al., Science 1996; 274:1652-1659; Li, J. et al., Proc Natl Acad Sci USA 1997; 94:502-507; Draetta, G., and Beach, D., Cell 1988; 54:17-26; Harper, J. W., Cancer Surv 1997; 29:91-107. It is through these mechanisms that cell cycle checkpoints are constructed. This realization that checkpoint control is implemented through the regulation of cdk function has made the cdks and their regulatory pathways compelling targets for the development of chemotherapeutic agents. The p27/cdk2/cyclinE/RB checkpoint pathway has been clearly implicated in tumorigenesis.

[0007] Numerous reports have demonstrated that both the co-activator, cyclin E, and inhibitor, p27, of cdk2 are either over-expressed or under-expressed respectively in solid tumors. Porter, P. L. et al., Nat Med 1997; 3:222-225; Kitahara, K et al., Int J Cancer 1995; 62:25-28; Wang, A. et al., J Cancer Res Clin Oncol 1996; 122:122-126; Keyomarsi, K et al., Cancer Res 1994; 54:380-385; Coinjal, F. et al. Int J Cancer 1996; 69:247-253; Akama, Y. et al., Jpn J Cancer Res 1995; 86:617-621; Tan, P. et al., Cancer Res 1997; 57:1259-1263; Catzavelos, C. et al., Nat Med 1997; 3:227-230; Fredersdorf, S. et al., Proc Natl Acad Sci USA 1997; 94:6380-6385. Their altered expression has been shown to correlate with increased cdk2 activity levels and poor prognosis.

[0008] In the early clinical development of anti-cancer agents, clinical trials are typically designed to evaluate the safety, tolerability, and pharmacokinetics, as well as to identify a suitable dose and schedule for further clinical evaluation. Increasingly, there is a need to also evaluate the pharmacologic effects of novel agents in early clinical trials, particularly in cases where dosing to maximum tolerated doses may not be appropriate. As a result, there is considerable interest in identifying pharmacodynamic (PD) biomarkers that correlate with the pharmacologic modulation of a tumor target. These PD biomarkers may be tumor-specific, but ideally should also be expressed in accessible surrogate tissues such as skin or peripheral blood cells. The identification of these PD biomarkers may be carried out by analyzing changes in specific polypeptides or mRNA, as predicted by the known biology associated with the molecule targeted by the agent of interest. Alternatively, PD biomarkers can be identified by analyzing global changes in polypeptides or mRNA in cells or tissues exposed to efficacious doses of the agent. Once identified, these PD biomarkers can be used to demonstrate the desired pharmacologic modulation (e.g., inhibition) of a tumor target upon the achievement of an appropriate level of agent in the patient.

[0009] There remains a need to identify biomarkers whose expression patterns correlate with a response of cells to treatment with one or more cdk modulating agents.

[0010] The development of microarray technologies for large scale characterization of mRNA expression pattern has made it possible to systematically search for molecular biomarkers whose expression is modulated by drug treatment Such technologies and molecular tools have made it possible to monitor the expression level of a large number of transcripts within a cell population at any given time (see, e.g., Schena et al., 1995, Science, 270:467-470; Lockhart et al., 1996, Nature Biotechnology, 14:1675-1680; Blanchard et al., 1996, Nature Biotechnology, 14:1649; U.S. Pat. No. 5,569,588).

### SUMMARY OF THE INVENTION

[0011] The invention provides methods and procedures for determining patient sensitivity to one or more agents that modulate cyclin-dependent kinase (cdk) activity. The invention also provides methods for determining or predicting whether an individual requiring therapy for a disease state or disorder such as cancer will or will not respond to treatment, prior to administration of the treatment, wherein the treatment comprises of one or more agents that modulate cdk activity. The one or more agents that modulate cdk activity can be small molecules or biological molecules. In one aspect, the agent is a small molecule that inhibits cyclin-dependent kinase 2 (cdk2)/cyclin E.

[0012] The invention also provides a method for testing or predicting whether a mammal will respond therapeutically to a method of treating cancer comprising administering an agent that modulates cdk activity, wherein the method comprises: (a) measuring in the mammal the level of at least one biomarker selected from the biomarkers of Table 1; (b) exposing the mammal to the agent that modulates cdk activity; (c) following the exposing of step (b), measuring in the mammal the level of the at least one biomarker, wherein a difference in the level of the at least one biomarker measured in step (c) compared to the level of the at least one biomarker measured in step (a) indicates that the mammal will respond therapeutically to said method of treating cancer.

[0013] The invention also provides a method for determining whether a mammal is responding to an agent that modulates cdk activity, comprising: (a) exposing the mammal to the agent; and (b) following the exposing of step (a), measuring in the mammal the level of at least one biomarker selected from the biomarkers of Table 1, wherein a difference in the level of the at least one biomarker measured in step (b), compared to the level of the at least one biomarker in a mammal that has not been exposed to said agent, indicates that the mammal is responding to the agent that modulates cdk activity.

[0014] As used herein, responding includes, for example, a biological response (e.g., a cellular response) or a clinical response (e.g., improved symptoms, a therapeutic effect, or an adverse event) in the mammal.

[0015] The invention also provides a method for determining whether a mammal is responding to an agent that modulates cdk activity, comprising: (a) obtaining a biological sample from the mammal; (b) measuring in said biological sample the level of at least one biomarker selected from the biomarkers of Table 1; (c) correlating said level of at least one biomarker with a baseline level; and (d) determining whether the mammal is responding to an agent that modulates cdk activity based on said correlation.

[0016] As used herein, the baseline level used for the correlation can be determined by one of skill in the art. In one aspect, the baseline level is the level of the at least one biomarker selected from the biomarkers of Table 1 in a mammal that has not been exposed to the agent. In another aspect, the baseline level is the level of the at least one biomarker selected from the biomarkers of Table 1 in the mammal that will be treated with a cdk modulating agent but has not yet been exposed to the agent. In yet another aspect, the baseline level is the level of the at least one biomarker selected from the biomarkers of Table 1 in the mammal that has been treated with a cdk modulating agent, and wherein the baseline level is selected at a point during the treatment with the cdk modulating agent. The point can be, for example, an established time period or measurement of a criteria (e.g., a biological or clinical response) set prior to initiation of the treatment.

[0017] A difference between the level of at least one biomarker from the mammal and the baseline level that is statistically significant can be used in the methods of the invention. A statistically significant difference between the level of at least one biomarker from the mammal and the baseline level is readily determined by one of skill in the art and can be, for example, at least a two-fold difference, at least a three-fold difference, or at least a four-fold difference in the level of the at least one biomarker.

[0018] The invention also provides a method for identifying a mammal that will respond therapeutically to a method of treating cancer comprising administering an agent that modulates cdk activity, wherein the method comprises: (a) measuring in the mammal the level of at least one biomarker selected from the biomarkers of Table 1; (b) exposing a biological sample from the mammal to the agent; (c) following the exposing in step (b), measuring in said biological sample the level of the at least one biomarker, wherein a difference in the level of the at least one biomarker measured in step (c) compared to the level of the at least one biomarker measured in step (a) indicates that the mammal will respond therapeutically to the said method of treating cancer.

[0019] As used herein, respond therapeutically refers to the alleviation or abrogation of the cancer. This means that the life expectancy of an individual affected with the cancer will be increased or that one or more of the symptoms of the cancer will be reduced or ameliorated. The term encompasses a reduction in cancerous cell growth or tumor volume. Whether a mammal responds therapeutically can be measured by many methods well known in the art, such as PET imaging.

[0020] The invention also provides a method for identifying a mammal that will respond therapeutically to a method of treating cancer comprising administering an agent that modulates cdk activity, wherein the method comprises: (a) exposing a biological sample from the mammal to the agent that modulates cdk activity; (b) following the exposing of step (a), measuring in said biological sample the level of at least one biomarker selected from the biomarkers of Table 1, wherein a difference in the level of the at least one biomarker measured in step (b), compared to the level of the at least one biomarker in a mammal that has not been exposed to said agent that modulates cdk activity, indicates that the mammal will respond therapeutically to said method of treating cancer.

[0021] The invention also provides a method for determining whether an agent modulates cdk activity in a mammal, comprising: (a) exposing the mammal to the agent; and (b) following the exposing of step (a), measuring in the mammal the level of at least one biomarker selected from the biomarkers of Table 1, wherein a difference in the level of said biomarker measured in step (b), compared to the level of the biomarker in a mammal that has not been exposed to said agent, indicates that the agent modulates cdk activity in the mammal.

[0022] The invention also provides a method for determining whether a mammal has been exposed to an agent that modulates cdk activity, comprising (a) exposing a biological sample from the mammal to the agent; and (b) following the exposing of step (a), measuring in the biological sample the level of at least one biomarker selected from the biomarkers of Table 1, wherein a difference in the level of said biomarker measured in step (b), compared to the level of the biomarker in a mammal that has not been exposed to said agent, indicates that the mammal has been exposed to an agent that modulates cdk activity.

[0023] The mammal can be, for example, a human, rat, mouse, dog, rabbit, pig sheep, cow, horse, cat, primate, or monkey.

[0024] The method of the invention can be an in vivo or an in vitro method. In one aspect, the step of measuring in the mammal the level of at least one biomarker is in vitro and comprises taking a biological sample from the mammal and then measuring the level of the at least one biomarker in the biological sample. The biological sample can comprise, for example, at least one of whole fresh blood, peripheral blood mononuclear cells, frozen whole blood, fresh plasma, frozen plasma, urine, saliva, skin, hair follicle, bone marrow, or tumor tissue.

[0025] In one aspect of the invention, the method of the invention comprises use of the biomarker W28729 (SEQ ID NO:1246).

[0026] The level of the at least one biomarker can be, for example, the level of protein and/or mRNA transcript of the at least one biomarker.

[0027] The invention also provides an isolated biomarker selected from the biomarkers of Table 1. The biomarkers of the invention comprise sequences selected from the nucleotide and amino acid sequences provided in Table 1 and the Sequence Listing, including fragments and variants thereof.

[0028] The invention also provides one or more biomarkers that can serve as targets for the development of therapies for disease treatment. Such targets may be particularly applicable for treatment of cancers or tumors.

[0029] The invention also provides a biomarker set comprising two or more biomarkers selected from the biomarkers of Table 1.

[0030] The invention also provides kits for determining or predicting whether a patient would be susceptible or resistant to a treatment that comprises one or more agents that modulate cdk activity. In one aspect, the patient has a cancer.

[0031] In one aspect, the kit comprises a suitable container that comprises one or more specialized microarrays of the invention, one or more agents that modulate cdk activity for use in testing cells from patient tissue specimens or patient samples, and instructions for use. The kit may further comprise reagents or materials for monitoring the expression of a biomarker set at the level of mRNA or protein.

[0032] The invention also provides a kit that comprises two or more biomarkers selected from the biomarkers of Table 1.

[0033] The invention also provides a kit that comprises at least one of an antibody and a nucleic acid for detecting the presence of at least one of the biomarkers selected from the biomarkers of Table 1. In one aspect, the kit further comprises instructions for determining whether or not a mammal will respond therapeutically to a method of treating cancer comprising administering an agent that modulates cdk activity. In another aspect, the instructions comprise the steps of (a) measuring in the mammal the level of at least one biomarker selected from the biomarkers of Table 1, (b) exposing the mammal to the agent, (c) following the exposing of step (b), measuring in the mammal the level of the at least one biomarker, wherein a difference in the level of the at least one biomarker measured in step (c) compared to the level of the at least one biomarker measured in step (a) indicates that the mammal will respond therapeutically to said method of treating cancer.

[0034] The invention also provides screening assays for determining if a patient will be susceptible or resistant to treatment with one or more agents that modulate cdk activity.

[0035] The invention also provides a method of monitoring the treatment of a patient having a disease, wherein said disease is treated by a method comprising administering one or more agents that modulate cdk activity.

[0036] The invention also provides individualized genetic profiles which are necessary to treat diseases and disorders based on patient response at a molecular level.

[0037] The invention also provides specialized microarrays, e.g., oligonucleotide microarrays or cDNA microarrays, comprising one or more biomarkers having expression profiles that correlate with either sensitivity or resistance to one or more agents that modulate cdk activity.

[0038] The invention also provides antibodies, including polyclonal and monoclonal, directed against one or more of the biomarker polypeptides. Such antibodies can be used in a variety of ways, for example, to purify, detect, and target the biomarker polypeptides of the invention, including both in vitro and in vivo diagnostic, detection, screening, and/or therapeutic methods.

[0039] The invention also provides a cell culture model to identity biomarkers whose expression levels correlate with cdk modulation.

[0040] The invention will be better understood upon a reading of the detailed description of the invention when considered in connection with the accompanying figures.

### BRIEF DESCRIPTION OF THE FIGURES

[0041] FIG. 1 illustrates a cdk biomarker identification strategy.

[0042] FIGS. 2A and 2B illustrate the reduction of cdk2 protein levels by cdk2 antisense oligonucleotides.

[0043] FIGS. 3A, 3B, and 3C illustrate the expression changes of the biomarker W28729 (SEQ ID NO:1246) in A2780s, PBMC, and xenograft A2780s tumors following treatment with a cdk inhibitor.

[0044] FIGS. 4A and 4B illustrate the regulation of W28729 expression in A2780 xenograft (FIG. 4A) and the mouse ortholog of W28729 in mouse PBMC (FIG. 4B).

[0045] FIGS. 5A and 5B illustrate W28729 gene expression in patients treated with N-5-[[5-(1,1-Dimethylethyl)-2-oxazolyl]methyl]thio]-2-thiazolyl-4-piperidinecarboxamide, 0.5-L-tartaric acid salt.

[0046] FIGS. 6A and 6B illustrate W28729 induction and its relation to baseline expression.

[0047] FIGS. 7A and 7B illustrate W28729 induction as a function of dose (FIG. 7A) and AUC (FIG. 7B).

[0048] FIG. 8 illustrates the prediction of W28729 changes by baseline expression of W28729 and the cdk2 inhibitor exposure.

[0049] FIG. 9 illustrates disease outcome, time to tumor progression (TTP) and W28729 changes.

### DETAILED DESCRIPTION OF THE INVENTION

[0050] As used herein, the term “agent that modulates cdk activity,” also referred to herein as “cdk modulating agent,” is intended to mean a substance that is a biological molecule or a small molecule, and formulations thereof, that is directly or indirectly involved in cdk activity and/or one or more pathways in which cdk is involved. The cdk modulating agent can be a cdk antagonist or inhibitor. The cdk modulating agent can also be a cdk agonist or activator.

[0051] In one aspect, the cdk modulating agent is directly or indirectly involved in cdk2 activity and/or one or more pathways in which cdk2 is involved. In another aspect, the cdk modulating agent is directly or indirectly involved in cdk1 activity and/or one or more pathways in which cdk1 is involved. In yet another aspect, the cdk modulating agent is directly or indirectly involved in cdk4 activity and/or one or more pathways in which cdk4 is involved.

[0052] Biological molecules include all lipids and polymers of monosaccharides, amino acids, and nucleotides having a molecular weight greater than 450. Thus, biological molecules include, for example, oligosaccharides and polysaccharides; oligopeptides, polypeptides, peptides, and proteins; and oligonucleotides and polynucleotides. Oligonucleotides and polynucleotides include, for example, DNA and RNA. Biological molecules further include derivatives of any of the molecules described above. For example, derivatives of biological molecules include lipid and glycosylation derivatives of oligopeptides, polypeptides, peptides, and proteins.

[0053] In addition to the biological molecules discussed above, the cdk modulating agents may also be small molecules. Any molecule that is not a biological molecule is considered herein to be a small molecule. Some examples of small molecules include organic compounds, organometallic compounds, salts of organic and organometallic compounds, saccharides, amino acids, and nucleotides. Small molecules further include molecules that would otherwise be considered biological molecules, except their molecular weight is not greater than 450. Thus, small molecules may be lipids, oligosaccharides, oligopeptides, and oligonucleotides and their derivatives, having a molecular weight of 450 or less.

[0054] It is emphasized that small molecules can have any molecular weight. They are merely called small molecules because they typically have molecular weights less than 450. Small molecules include compounds that are found in nature as well as synthetic compounds. In one embodiment, the cdk modulating agent is a small molecule that inhibits cdk or a pathway in which cdk is involved.

[0055] Numerous small molecules have been described as being useful to inhibit cdk including, for example, flavopiridol (Aventis Pharmaceuticals Inc., Bridgewater, N.J., U.S.A.) and CYC202 (Cyclacel Limited, Dundee, United Kingdom). Cdk inhibitors also include, for example, the small molecules disclosed in U.S. Pat. Nos. 6,040,321, 6,214,852, 6,262,096, 6,515,004, and 6,521,759.

[0056] In one aspect, the cdk modulating agent is a small molecule cdk inhibitor. In another aspect, the cdk modulating agent is a small molecule cdk2 inhibitor. In another aspect, the cdk modulating agent is a small molecule cdk1 inhibitor. In yet another aspect, the cdk modulating agent is a small molecule cdk4 inhibitor. In a further aspect, the cdk modulating agent is N-5-[[5-(1,1-Dimethylethyl)-2-oxazolyl]methyl]thio]-2-thiazolyl-4-piperidinecarboxamide, 0.5-L-tartaric acid salt.

[0057] The invention provides methods to monitor the response of patients to treatment with a cdk modulating agent. These methods are useful: (i) to follow the response of a patient over a course of treatment with a cdk modulating agent; (ii) to determine whether the specific cdk modulating agent selected for treatment is appropriate to the patient; (iii) to determine whether the dose of the cdk modulating agent being administered is appropriate to the patient; (iv) to determine whether the type and/or amount of cdk modulating agent being administered needs to be changed over the course of the treatment period; (v) to determine when treatment is complete; and (vi) to determine whether treatment that has been terminated needs to be restarted. These methods are also useful to identify whether a patient will benefit from treatment with a cdk modulating agent.

[0058] In one aspect, the invention provides a method of determining whether a patient receiving a treatment that comprises a cdk modulating agent has received sufficient treatment to inhibit cdk in the patient's tumors. In accordance with the invention, tumor or surrogate biopsies are obtained from a patient before and after treatment with a cdk modulating agent. The surrogate biopsies can be, for example, skin or peripheral blood. The cells are then assayed to determine the changes in the expression pattern of one or more biomarkers of the invention upon treatment with the cdk modulating agent, to determine whether cdk inhibition has been achieved by the treatment. Success or failure of the treatment can be determined based on the expression pattern of the test cells from the test tissue, e.g., tumor or cancer biopsy, as being relatively the same as or different from the expression pattern of one or more biomarkers. If the test cells show an expression profile which corresponds to that of the biomarker or biomarker set, it is predicted that the individual's cancer or tumor has been exposed to a concentration of the modulating agent that is sufficient to, in one aspect, inhibit cdk. By contrast, if the test cells show a gene expression pattern that does not correspond to the biomarker or biomarker set, it is predicted that the modulating agent exposure has not been sufficient to, in one aspect, inhibit cdk.

[0059] In another aspect, the invention provides a method of monitoring the treatment of a patient having a disease treatable by a cdk modulating agent by comparing the expression profile of cells from a patient tissue sample, e.g., a tumor or cancer biopsy, following treatment to a biomarker or biomarker set. The isolated cells from the patient are assayed to determine their expression pattern to determine if a change of the expression profile has occurred so as to warrant a different treatment, such as treatment with a different cdk modulating agent, or to discontinue current treatment. The resulting expression profile of the cells following treatment with a cdk modulating agent is compared with the expression pattern of the biomarker or biomarker set.

[0060] Such a monitoring process can indicate success or failure of a patient's treatment with a cdk modulating agent based on the expression pattern of the cells isolated from the patient's sample as being relatively the same as or different from the expression pattern of the biomarker or biomarker set Thus, if, after treatment with a cdk modulating agent, the test cells show a change in their expression profile from the biomarker or biomarker set, it can serve as an indicator that the current treatment should be modified, changed, or even discontinued. Such monitoring processes can be repeated as necessary or desired. The monitoring of a patient's response to a given treatment can also involve testing the patient's cells in the assay as described only after treatment with a cdk modulating agent, rather than before and after treatment with a cdk modulating agent.

[0061] The invention is based on the identification of specific pharmacodynamic biomarkers of cdk modulation. In accordance with the invention, oligonucleotide microarrays were used to measure the expression levels of a large number of genes in a panel of treated cell lines for which sensitivity to a cdk modulating agent was determined. The determination of the gene expression profiles in the treated cells allowed the identification of biomarkers whose expression levels highly correlate with the modulation of cdk or a pathway in which cdk is involved. The biomarkers are thus useful for inferring the level of cdk modulation in a patient.

[0062] The biomarkers of the invention include polynucleotides, including full-length genes, open reading frames (ORFs), and partial sequences such as expressed sequence tags (ESTs) and structural RNA. In one aspect, the invention is directed to an isolated polynucleotide comprising a nucleotide sequence selected from the nucleotide sequences of Table 1 such as, for example, an isolated polynucleotide comprising the nucleotide sequence of SEQ ID NO:1264. The biomarkers further include polypeptides comprising the amino acid sequences encoded by these polynucleotides. The biomarkers of the invention include those provided below in Table 1. In one aspect, these polynucleotides and polypeptides are in isolated form.

TABLE 1

| SEQ ID | Sequence | Genbank Accession | | |
|---|---|---|---|---|
| NO: | type | No. | Symbol | Description |
| 1 | DNA | NM_005340 | HINT1 | histidine triad nucleotide |
| | | | | binding protein 1 |
| 2 | Protein | NP_005331 | HINT1 | histidine triad nucleotide |
| | | | | binding protein 1 |
| 3 | DNA | NM_003137 | SRPK1 | SFRS protein kinase 1 |
| 4 | Protein | NP_003128 | SRPK1 | SFRS protein kinase 1 |
| 5 | DNA | NM_001951 | E2F5 | E2F transcription factor 5, |
| | | | | p130-binding |
| 6 | Protein | NP_001942 | E2F5 | E2F transcription factor 5, |
| | | | | p130-binding |
| 7 | DNA | U33838 | | NF-kappa-B p65delta3, mRNA |
| | | | | sequence |
| 8 | Protein | U33838 (Translation) | | NF-kappa-B p65delta3, mRNA |
| | | | | sequence |
| 9 | DNA | NM_005195 | CEBPD | CCAAT/enhancer binding |
| | | | | protein (C/EBP), delta |
| 10 | Protein | NP_005186 | CEBPD | CCAAT/enhancer binding |
| | | | | protein (C/EBP), delta |
| 11 | DNA | NM_002916 | RFC4 | replication factor C (activator |
| | | | | 1) 4, 37 kDa |
| 12 | Protein | NP_002907 | RFC4 | replication factor C (activator |
| | | | | 1) 4, 37 kDa |
| 13 | DNA | NM_002050 | MGC2306 | hypothetical protein MGC2306 |
| 14 | Protein | NP_002041 | MGC2306 | hypothetical protein MGC2306 |
| 15 | DNA | NM_032638 | MGC2306 | hypothetical protein MGC2306 |
| 16 | Protein | NP_116027 | MGC2306 | hypothetical protein MGC2306 |
| 17 | DNA | NM_001709 | BDNF | brain-derived neurotrophic |
| | | | | factor |
| 18 | Protein | NP_001700 | BDNF | brain-derived neurotrophic |
| | | | | factor |
| 19 | DNA | NM_170731 | BDNF | brain-derived neurotrophic |
| | | | | factor |
| 20 | Protein | NP_733927 | BDNF | brain-derived neurotrophic |
| | | | | factor |
| 21 | DNA | NM_170732 | BDNF | brain-derived neurotrophic |
| | | | | factor |
| 22 | DNA | NM_170733 | BDNF | brain-derived neurotrophic |
| | | | | factor |
| 23 | DNA | NM_006749 | SLC20A2 | solute carrier family 20 |
| | | | | (phosphate transporter), |
| | | | | member 2 |
| 24 | Protein | NP_006740 | SLC20A2 | solute carrier family 20 |
| | | | | (phosphate transporter), |
| | | | | member 2 |
| 25 | DNA | NM_005415 | SLC20A1 | solute carrier family 20 |
| | | | | (phosphate transporter), |
| | | | | member 1 |
| 26 | Protein | NP_005406 | SLC20A1 | solute carrier family 20 |
| | | | | (phosphate transporter), |
| | | | | member 1 |
| 27 | DNA | HG3510-HT3704 | | V-Erba Related Ear-3 Protein |
| 28 | DNA | HG1471-HT3923 | | Transcription Factor Oct-1a/1b, |
| | | | | Alt. Splice 2, Oct-1b |
| 29 | DNA | NM_002816 | PSMD12 | proteasome (prosome, |
| | | | | macropain) 26S subunit, non- |
| | | | | ATPase, 12 |
| 30 | Protein | NP_002807 | PSMD12 | proteasome (prosome, |
| | | | | macropain) 26S subunit, non- |
| | | | | ATPase, 12 |
| 31 | DNA | NM_003138 | SRPK2 | SFRS protein kinase 2 |
| 32 | Protein | NP_003129 | SRPK2 | SFRS protein kinase 2 |
| 33 | DNA | NM_005930 | MGEA6 | meningioma expressed antigen |
| | | | | 6 (coiled-coil proline-rich) |
| 34 | Protein | NP_005921 | MGEA6 | meningioma expressed antigen |
| | | | | 6 (coiled-coil proline-rich) |
| 35 | DNA | NM_003337 | UBE2B | ubiquitin-conjugating enzyme |
| | | | | E2B (RAD6 homolog) |
| 36 | Protein | NP_003328 | UBE2B | ubiquitin-conjugating enzyme |
| | | | | E2B (RAD6 homolog) |
| 37 | DNA | NM_003406 | YWHAZ | tyrosine 3- |
| | | | | monooxygenase/tryptophan 5- |
| | | | | monooxygenase activation |
| | | | | protein, zeta polypeptide |
| 38 | Protein | NP_003397 | YWHAZ | tyrosine 3- |
| | | | | monooxygenase/tryptophan 5- |
| | | | | monooxygenase activation |
| | | | | protein, zeta polypeptide |
| 39 | DNA | NM_145690 | YWHAZ | tyrosine 3- |
| | | | | monooxygenase/tryptophan 5- |
| | | | | monooxygenase activation |
| | | | | protein, zeta polypeptide |
| 40 | DNA | NM_006494 | ERF | Ets2 repressor factor |
| 41 | Protein | NP_006485 | ERF | Ets2 repressor factor |
| 42 | DNA | NM_006904 | PRKDC | protein kinase, DNA-activated, |
| | | | | catalytic polypeptide |
| 43 | Protein | NP_008835 | PRKDC | protein kinase, DNA-activated, |
| | | | | catalytic polypeptide |
| 44 | DNA | NM_021975 | RELA | v-rel reticuloendotheliosis viral |
| | | | | oncogene homolog A, nuclear |
| | | | | factor of kappa light |
| | | | | polypeptide gene enhancer in |
| | | | | B-cells 3, p65 (avian) |
| 45 | Protein | NP_068810 | RELA | v-rel reticuloendotheliosis viral |
| | | | | oncogene homolog A, nuclear |
| | | | | factor of kappa light |
| | | | | polypeptide gene enhancer in |
| | | | | B-cells 3, p65 (avian) |
| 46 | DNA | NM_004359 | CDC34 | cell division cycle 34 |
| 47 | Protein | NP_004350 | CDC34 | cell division cycle 34 |
| 48 | DNA | NM_000380 | XPA | xeroderma pigmentosum, |
| | | | | complementation group A |
| 49 | Protein | NP_000371 | XPA | xeroderma pigmentosum, |
| | | | | complementation group A |
| 50 | DNA | NM_004152 | OAZ1 | ornithine decarboxylase |
| | | | | antizyme 1 |
| 51 | Protein | NP_004143 | OAZ1 | ornithine decarboxylase |
| | | | | antizyme 1 |
| 52 | DNA | NM_003250 | THRA | thyroid hormone receptor, |
| | | | | alpha (erythroblastic leukemia |
| | | | | viral (v-erb-a) oncogene |
| | | | | homolog, avian) |
| 53 | Protein | NP_003241 | THRA | thyroid hormone receptor, |
| | | | | alpha (erythroblastic leukemia |
| | | | | viral (v-erb-a) oncogene |
| | | | | homolog, avian) |
| 54 | DNA | NM_005900 | MADH1 | MAD, mothers against |
| | | | | decapentaplegic homolog 1 |
| | | | | (Drosophila) |
| 55 | Protein | NP_005891 | MADH1 | MAD, mothers against |
| | | | | decapentaplegic homolog 1 |
| | | | | (Drosophila) |
| 56 | DNA | NM_004444 | EPHB4 | EphB4 |
| 57 | Protein | NP_004435 | EPHB4 | EphB4 |
| 58 | DNA | NM_021009 | UBC | ubiquitin C |
| 59 | Protein | NP_066289 | UBC | ubiquitin C |
| 60 | DNA | NM_003200 | TCF3 | transcription factor 3 (E2A |
| | | | | immunoglobulin enhancer |
| | | | | binding factors E12/E47) |
| 61 | Protein | NP_003191 | TCF3 | transcription factor 3 (E2A |
| | | | | immunoglobulin enhancer |
| | | | | binding factors E12/E47) |
| 62 | DNA | NM_002717 | PPP2R2A | protein phosphatase 2 (formerly |
| | | | | 2A), regulatory subunit B (PR |
| | | | | 52), alpha isoform |
| 63 | Protein | NP_002708 | PPP2R2A | protein phosphatase 2 (formerly |
| | | | | 2A), regulatory subunit B (PR |
| | | | | 52), alpha isoform |
| 64 | DNA | NM_000358 | TGFBI | transforming growth factor, |
| | | | | beta-induced, 68 kDa |
| 65 | Protein | NP_000349 | TGFBI | transforming growth factor, |
| | | | | beta-induced, 68 kDa |
| 66 | DNA | NM_001664 | ARHA | ras homolog gene family, |
| | | | | member A |
| 67 | Protein | NP_001655 | ARHA | ras homolog gene family, |
| | | | | member A |
| 68 | DNA | NM_002419 | MAP3K11 | mitogen-activated protein |
| | | | | kinase kinase kinase 11 |
| 69 | Protein | NP_002410 | MAP3K11 | mitogen-activated protein |
| | | | | kinase kinase kinase 11 |
| 70 | DNA | NM_004593 | SFRS10 | splicing factor, arginine/serine- |
| | | | | rich 10 (transformer 2 homolog, |
| | | | | Drosophila) |
| 71 | Protein | NP_004584 | SFRS10 | splicing factor, arginine/serine- |
| | | | | rich 10 (transformer 2 homolog, |
| | | | | Drosophila) |
| 72 | DNA | NM_003131 | SRF | serum response factor (c-fos |
| | | | | serum response element- |
| | | | | binding transcription factor) |
| 73 | Protein | NP_003122 | SRF | serum response factor (c-fos |
| | | | | serum response element- |
| | | | | binding transcription factor) |
| 74 | DNA | NM_000376 | VDR | vitamin D (1,25- |
| | | | | dihydroxyvitamin D3) receptor |
| 75 | Protein | NP_000367 | VDR | vitamin D (1,25- |
| | | | | dihydroxyvitamin D3) receptor |
| 76 | DNA | D26561 | | D26561 /FEATURE = cds#2 |
| | | | | /DEFINITION = D26561 Homo |
| | | | | sapiens cellular DNA |
| | | | | containing a segment of Human |
| | | | | papilloma virus type 5b, partial |
| | | | | and complete cds |
| 77 | Protein | D26561 (Translation) | | D26561 /FEATURE = cds#2 |
| | | | | /DEFINITION = D26561 Homo |
| | | | | sapiens cellular DNA |
| | | | | containing a segment of Human |
| | | | | papilloma virus type 5b, partial |
| | | | | and complete cds |
| 78 | DNA | NM_002651 | PIK4CB | phosphatidylinositol 4-kinase, |
| | | | | catalytic, beta polypeptide |
| 79 | Protein | NP_002642 | PIK4CB | phosphatidylinositol 4-kinase, |
| | | | | catalytic, beta polypeptide |
| 80 | DNA | NM_002830 | PTPN4 | protein tyrosine phosphatase, |
| | | | | non-receptor type 4 |
| | | | | (megakaryocyte) |
| 81 | Protein | NP_002821 | PTPN4 | protein tyrosine phosphatase, |
| | | | | non-receptor type 4 |
| | | | | (megakaryocyte) |
| 82 | DNA | NM_020529 | NFKBIA | nuclear factor of kappa light |
| | | | | polypeptide gene enhancer in |
| | | | | B-cells inhibitor, alpha |
| 83 | Protein | NP_065390 | NFKBIA | nuclear factor of kappa light |
| | | | | polypeptide gene enhancer in |
| | | | | B-cells inhibitor, alpha |
| 84 | DNA | NM_006292 | TSG101 | tumor susceptibility gene 101 |
| 85 | Protein | NP_006283 | TSG101 | tumor susceptibility gene 101 |
| 86 | DNA | NM_005375 | MYB | v-myb myeloblastosis viral |
| | | | | oncogene homolog (avian) |
| 87 | Protein | NP_005366 | MYB | v-myb myeloblastosis viral |
| | | | | oncogene homolog (avian) |
| 88 | DNA | NM_002836 | PTPRA | protein tyrosine phosphatase, |
| | | | | receptor type, A |
| 89 | Protein | NP_002827 | PTPRA | protein tyrosine phosphatase, |
| | | | | receptor type, A |
| 90 | DNA | NM_080840 | PTPRA | protein tyrosine phosphatase, |
| | | | | receptor type, A |
| 91 | Protein | NP_543030 | PTPRA | protein tyrosine phosphatase, |
| | | | | receptor type, A |
| 92 | DNA | NM_080841 | PTPRA | protein tyrosine phosphatase, |
| | | | | receptor type, A |
| 93 | DNA | NM_002027 | FNTA | farnesyltransferase, CAAX |
| | | | | box, alpha |
| 94 | Protein | NP_002018 | FNTA | farnesyltransferase, CAAX |
| | | | | box, alpha |
| 95 | DNA | X95152 | | X95152 /FEATURE = mRNA |
| | | | | /DEFINITION = HSBRCA22 |
| | | | | H. sapiens brca2 gene exon 2 |
| | | | | (and joined coding region) |
| 96 | Protein | X95152 (Translation) | | X95152 /FEATURE = mRNA |
| | | | | /DEFINITION = HSBRCA22 |
| | | | | H. sapiens brca2 gene exon 2 |
| | | | | (and joined coding region) |
| 97 | DNA | NM_016848 | SHC3 | neuronal Shc |
| 98 | Protein | NP_058544 | SHC3 | neuronal Shc |
| 99 | DNA | HG4074-HT4344 | | Rad2 |
| 100 | DNA | NM_006119 | FGF8 | fibroblast growth factor 8 |
| | | | | (androgen-induced) |
| 101 | Protein | NP_006110 | FGF8 | fibroblast growth factor 8 |
| | | | | (androgen-induced) |
| 102 | DNA | NM_033163 | FGF8 | fibroblast growth factor 8 |
| | | | | (androgen-induced) |
| 103 | Protein | NP_149353 | FGF8 | fibroblast growth factor 8 |
| | | | | (androgen-induced) |
| 104 | DNA | NM_033164 | FGF8 | fibroblast growth factor 8 |
| | | | | (androgen-induced) |
| 105 | Protein | NP_149354 | FGF8 | fibroblast growth factor 8 |
| | | | | (androgen-induced) |
| 106 | DNA | NM_033165 | FGF8 | fibroblast growth factor 8 |
| | | | | (androgen-induced) |
| 107 | Protein | NP_149355 | FGF8 | fibroblast growth factor 8 |
| | | | | (androgen-induced) |
| 108 | DNA | NM_000057 | BLM | Bloom syndrome |
| 109 | Protein | NP_000048 | BLM | Bloom syndrome |
| 110 | DNA | NM_005778 | RBM5 | RNA binding motif protein 5 |
| 111 | Protein | NP_005769 | RBM5 | RNA binding motif protein 5 |
| 112 | DNA | NM_001067 | TOP2A | topoisomerase (DNA) II alpha |
| | | | | 170 kDa |
| 113 | Protein | NP_001058 | TOP2A | topoisomerase (DNA) II alpha |
| | | | | 170 kDa |
| 114 | DNA | NM_003473 | STAM | signal transducing adaptor |
| | | | | molecule (SH3 domain and |
| | | | | ITAM motif) 1 |
| 115 | Protein | NP_003464 | STAM | signal transducing adaptor |
| | | | | molecule (SH3 domain and |
| | | | | ITAM motif) 1 |
| 116 | DNA | NM_005354 | JUND | jun D proto-oncogene |
| 117 | Protein | NP_005345 | JUND | jun D proto-oncogene |
| 118 | DNA | HG3187-HT3366 | | Tyrosine Phosphatase 1, Non- |
| | | | | Receptor, Alt. Splice 3 |
| 119 | DNA | NM_006875 | PIM2 | pim-2 oncogene |
| 120 | Protein | NP_006866 | PIM2 | pim-2 oncogene |
| 121 | DNA | NM_004327 | BCR | breakpoint cluster region |
| 122 | Protein | NP_004318 | BCR | breakpoint cluster region |
| 123 | DNA | NM_021574 | BCR | breakpoint cluster region |
| 124 | Protein | NP_067585 | BCR | breakpoint cluster region |
| 125 | DNA | NM_001969 | EIF5 | eukaryotic translation initiation |
| | | | | factor 5 |
| 126 | Protein | NP_001960 | EIF5 | eukaryotic translation initiation |
| | | | | factor 5 |
| 127 | DNA | NM_002890 | RASA1 | RAS p21 protein activator |
| | | | | (GTPase activating protein) 1 |
| 128 | Protein | NP_002881 | RASA1 | RAS p21 protein activator |
| | | | | (GTPase activating protein) 1 |
| 129 | DNA | NM_022650 | RASA1 | RAS p21 protein activator |
| | | | | (GTPase activating protein) 1 |
| 130 | Protein | NP_072179 | RASA1 | RAS p21 protein activator |
| | | | | (GTPase activating protein) 1 |
| 131 | DNA | NM_001404 | EEF1G | eukaryotic translation |
| | | | | elongation factor 1 gamma |
| 132 | Protein | NP_001395 | EEF1G | eukaryotic translation |
| | | | | elongation factor 1 gamma |
| 133 | DNA | NM_006156 | NEDD8 | neural precursor cell expressed, |
| | | | | developmentally down- |
| | | | | regulated 8 |
| 134 | Protein | NP_006147 | NEDD8 | neural precursor cell expressed, |
| | | | | developmentally down- |
| | | | | regulated 8 |
| 135 | DNA | NM_003010 | MAP2K4 | mitogen-activated protein |
| | | | | kinase kinase 4 |
| 136 | Protein | NP_003001 | MAP2K4 | mitogen-activated protein |
| | | | | kinase kinase 4 |
| 137 | DNA | HG884-HT884 | | Oncogene E6-Ap, |
| | | | | Papillomavirus |
| 138 | DNA | NM_001789 | CDC25A | cell division cycle 25A |
| 139 | Protein | NP_001780 | CDC25A | cell division cycle 25A |
| 140 | DNA | NM_001350 | DAXX | death-associated protein 6 |
| 141 | Protein | NP_001341 | DAXX | death-associated protein 6 |
| 142 | DNA | NM_002719 | PPP2R5C | protein phosphatase 2, |
| | | | | regulatory subunit B (B56), |
| | | | | gamma isoform |
| 143 | Protein | NP_002710 | PPP2R5C | protein phosphatase 2, |
| | | | | regulatory subunit B (B56), |
| | | | | gamma isoform |
| 144 | DNA | NM_002689 | POLA2 | polymerase (DNA-directed), |
| | | | | alpha (70 kD) |
| 145 | Protein | NP_002680 | POLA2 | polymerase (DNA-directed), |
| | | | | alpha (70 kD) |
| 146 | DNA | NM_005056 | RBBP2 | retinoblastoma binding protein 2 |
| 147 | Protein | NP_005047 | RBBP2 | retinoblastoma binding protein 2 |
| 148 | DNA | NM_001800 | CDKN2D | cyclin-dependent kinase |
| | | | | inhibitor 2D (p19, inhibits |
| | | | | CDK4) |
| 149 | Protein | NP_001791 | CDKN2D | cyclin-dependent kinase |
| | | | | inhibitor 2D (p19, inhibits |
| | | | | CDK4) |
| 150 | DNA | NM_079421 | CDKN2D | cyclin-dependent kinase |
| | | | | inhibitor 2D (p19, inhibits |
| | | | | CDK4) |
| 151 | DNA | NM_000465 | BARD1 | BRCA1 associated RING |
| | | | | domain 1 |
| 152 | Protein | NP_000456 | BARD1 | BRCA1 associated RING |
| | | | | domain 1 |
| 153 | DNA | NM_001786 | CDC2 | cell division cycle 2, G1 to S |
| | | | | and G2 to M |
| 154 | Protein | NP_001777 | CDC2 | cell division cycle 2, G1 to S |
| | | | | and G2 to M |
| 155 | DNA | NM_033379 | CDC2 | cell division cycle 2, G1 to S |
| | | | | and G2 to M |
| 156 | Protein | NP_203698 | CDC2 | cell division cycle 2, G1 to S |
| | | | | and G2 to M |
| 157 | DNA | NM_003503 | CDC7L1 | CDC7 cell division cycle 7-like |
| | | | | 1 (S. cerevisiae) |
| 158 | Protein | NP_003494 | CDC7L1 | CDC7 cell division cycle 7-like |
| | | | | 1 (S. cerevisiae) |
| 159 | DNA | NM_006254 | PRKCD | protein kinase C, delta |
| 160 | Protein | NP_006245 | PRKCD | protein kinase C, delta |
| 161 | DNA | NM_003242 | TGFBR2 | transforming growth factor, |
| | | | | beta receptor II (70/80 kDa) |
| 162 | Protein | NP_003233 | TGFBR2 | transforming growth factor, |
| | | | | beta receptor II (70/80 kDa) |
| 163 | DNA | HG1996-HT2044 | | Guanine Nucleotide-Binding |
| | | | | Protein Rap2, Ras-Oncogene |
| | | | | Related |
| 164 | DNA | NM_005904 | MADH7 | MAD, mothers against |
| | | | | decapentaplegic homolog 7 |
| | | | | (Drosophila) |
| 165 | Protein | NP_005895 | MADH7 | MAD, mothers against |
| | | | | decapentaplegic homolog 7 |
| | | | | (Drosophila) |
| 166 | DNA | NM_005426 | TP53BP2 | tumor protein p53 binding |
| | | | | protein, 2 |
| 167 | Protein | NP_005417 | TP53BP2 | tumor protein p53 binding |
| | | | | protein, 2 |
| 168 | DNA | NM_004322 | BAD | BCL2-antagonist of cell death |
| 169 | Protein | NP_004313 | BAD | BCL2-antagonist of cell death |
| 170 | DNA | NM_032989 | BAD | BCL2-antagonist of cell death |
| 171 | DNA | NM_004579 | MAP4K2 | mitogen-activated protein |
| | | | | kinase kinase kinase kinase 2 |
| 172 | Protein | NP_004570 | MAP4K2 | mitogen-activated protein |
| | | | | kinase kinase kinase kinase 2 |
| 173 | DNA | HG1103-HT1103 | | Guanine Nucleotide-Binding |
| | | | | Protein Ral, Ras-Oncogene |
| | | | | Related |
| 174 | DNA | NM_006270 | RRAS | related RAS viral (r-ras) |
| | | | | oncogene homolog |
| 175 | Protein | NP_006261 | RRAS | related RAS viral (r-ras) |
| | | | | oncogene homolog |
| 176 | DNA | NM_002592 | PCNA | proliferating cell nuclear |
| | | | | antigen |
| 177 | Protein | NP_002583 | PCNA | proliferating cell nuclear |
| | | | | antigen |
| 178 | DNA | NM_000038 | APC | adenomatosis polyposis coli |
| 179 | Protein | NP_000029 | APC | adenomatosis polyposis coli |
| 180 | DNA | NM_002880 | RAF1 | v-raf-1 murine leukemia viral |
| | | | | oncogene homolog 1 |
| 181 | Protein | NP_002871 | RAF1 | v-raf-1 murine leukemia viral |
| | | | | oncogene homolog 1 |
| 182 | DNA | NM_005642 | TAF7 | TAF7 RNA polymerase II, |
| | | | | TATA box binding protein |
| | | | | (TBP)-associated factor, 55 kDa |
| 183 | Protein | NP_005633 | TAF7 | TAF7 RNA polymerase II, |
| | | | | TATA box binding protein |
| | | | | (TBP)-associated factor, 55 kDa |
| 184 | DNA | NM_001761 | CCNF | cyclin F |
| 185 | Protein | NP_001752 | CCNF | cyclin F |
| 186 | DNA | NM_004985 | KRAS2 | v-Ki-ras2 Kirsten rat sarcoma 2 |
| | | | | viral oncogene homolog |
| 187 | Protein | NP_004976 | KRAS2 | v-Ki-ras2 Kirsten rat sarcoma 2 |
| | | | | viral oncogene homolog |
| 188 | DNA | NM_033360 | KRAS2 | v-Ki-ras2 Kirsten rat sarcoma 2 |
| | | | | viral oncogene homolog |
| 189 | Protein | NP_203524 | KRAS2 | v-Ki-ras2 Kirsten rat sarcoma 2 |
| | | | | viral oncogene homolog |
| 190 | DNA | NM_000075 | CDK4 | cyclin-dependent kinase 4 |
| 191 | Protein | NP_000066 | CDK4 | cyclin-dependent kinase 4 |
| 192 | DNA | NM_032913 | CDK4 | cyclin-dependent kinase 4 |
| 193 | Protein | NP_116302 | CDK4 | cyclin-dependent kinase 4 |
| 194 | DNA | NM_052984 | CDK4 | cyclin-dependent kinase 4 |
| 195 | Protein | NP_443710 | CDK4 | cyclin-dependent kinase 4 |
| 196 | DNA | NM_001237 | CCNA2 | cyclin A2 |
| 197 | Protein | NP_001228 | CCNA2 | cyclin A2 |
| 198 | DNA | NM_031966 | CCNB1 | cyclin B1 |
| 199 | Protein | NP_114172 | CCNB1 | cyclin B1 |
| 200 | DNA | NM_005903 | MADH5 | MAD, mothers against |
| | | | | decapentaplegic homolog 5 |
| | | | | (Drosophila) |
| 201 | Protein | NP_005894 | MADH5 | MAD, mothers against |
| | | | | decapentaplegic homolog 5 |
| | | | | (Drosophila) |
| 202 | DNA | NM_001799 | CDK7 | cyclin-dependent kinase 7 |
| | | | | (MO15 homolog, Xenopus |
| | | | | laevis, cdk-activating kinase) |
| 203 | Protein | NP_001790 | CDK7 | cyclin-dependent kinase 7 |
| | | | | (MO15 homolog, Xenopus |
| | | | | laevis, cdk-activating kinase) |
| 204 | DNA | NM_002512 | NME2 | non-metastatic cells 2, protein |
| | | | | (NM23B) expressed in |
| 205 | Protein | NP_002503 | NME2 | non-metastatic cells 2, protein |
| | | | | (NM23B) expressed in |
| 206 | DNA | NM_000269 | NME1 | non-metastatic cells 1, protein |
| | | | | (NM23A) expressed in |
| 207 | Protein | NP_000260 | NME1 | non-metastatic cells 1, protein |
| | | | | (NM23A) expressed in |
| 208 | DNA | NM_006256 | PRKCL2 | protein kinase C-like 2 |
| 209 | Protein | NP_006247 | PRKCL2 | protein kinase C-like 2 |
| 210 | DNA | NM_000179 | MSH6 | mutS homolog 6 (E. coli) |
| 211 | Protein | NP_000170 | MSH6 | mutS homolog 6 (E. coli) |
| 212 | DNA | NM_004048 | B2M | beta-2-microglobulin |
| 213 | Protein | NP_004039 | B2M | beta-2-microglobulin |
| 214 | DNA | NM_006013 | RPL10 | ribosomal protein L10 |
| 215 | Protein | NP_006004 | RPL10 | ribosomal protein L10 |
| 216 | DNA | NM_004506 | HSF2 | heat shock transcription factor 2 |
| 217 | Protein | NP_004497 | HSF2 | heat shock transcription factor 2 |
| 218 | DNA | NM_001238 | CCNE1 | cyclin E1 |
| 219 | Protein | NP_001229 | CCNE1 | cyclin E1 |
| 220 | DNA | NM_057182 | CCNE1 | cyclin E1 |
| 221 | Protein | NP_476530 | CCNE1 | cyclin E1 |
| 222 | DNA | NM_001641 | APEX1 | APEX nuclease |
| | | | | (multifunctional DNA repair |
| | | | | enzyme) 1 |
| 223 | Protein | NP_001632 | APEX1 | APEX nuclease |
| | | | | (multifunctional DNA repair |
| | | | | enzyme) 1 |
| 224 | DNA | NM_080648 | APEX1 | APEX nuclease |
| | | | | (multifunctional DNA repair |
| | | | | enzyme) 1 |
| 225 | DNA | NM_080649 | APEX1 | APEX nuclease |
| | | | | (multifunctional DNA repair |
| | | | | enzyme) 1 |
| 226 | DNA | NM_001982 | ERBB3 | v-erb-b2 erythroblastic |
| | | | | leukemia viral oncogene |
| | | | | homolog 3 (avian) |
| 227 | Protein | NP_001973 | ERBB3 | v-erb-b2 erythroblastic |
| | | | | leukemia viral oncogene |
| | | | | homolog 3 (avian) |
| 228 | DNA | NM_001938 | DR1 | down-regulator of transcription |
| | | | | 1, TBP-binding (negative |
| | | | | cofactor 2) |
| 229 | Protein | NP_001929 | DR1 | down-regulator of transcription |
| | | | | 1, TBP-binding (negative |
| | | | | cofactor 2) |
| 230 | DNA | NM_002448 | MSX1 | msh homeo box homolog 1 |
| | | | | (Drosophila) |
| 231 | Protein | NP_002439 | MSX1 | msh homeo box homolog 1 |
| | | | | (Drosophila) |
| 232 | DNA | NM_000127 | EXT1 | exostoses (multiple) 1 |
| 233 | Protein | NP_000118 | EXT1 | exostoses (multiple) 1 |
| 234 | DNA | NM_005760 | CBF2 | CCAAT-box-binding |
| | | | | transcription factor |
| 235 | Protein | NP_005751 | CBF2 | CCAAT-box-binding |
| | | | | transcription factor |
| 236 | DNA | NM_002825 | PTN | pleiotrophin (heparin binding |
| | | | | growth factor 8, neurite growth- |
| | | | | promoting factor 1) |
| 237 | Protein | NP_002816 | PTN | pleiotrophin (heparin binding |
| | | | | growth factor 8, neurite growth- |
| | | | | promoting factor 1) |
| 238 | DNA | NM_002715 | PPP2CA | protein phosphatase 2 (formerly |
| | | | | 2A), catalytic subunit, alpha |
| | | | | isoform |
| 239 | Protein | NP_002706 | PPP2CA | protein phosphatase 2 (formerly |
| | | | | 2A), catalytic subunit, alpha |
| | | | | isoform |
| 240 | DNA | NM_004555 | NFATC3 | nuclear factor of activated T- |
| | | | | cells, cytoplasmic, calcineurin- |
| | | | | dependent 3 |
| 241 | Protein | NP_004546 | NFATC3 | nuclear factor of activated T- |
| | | | | cells, cytoplasmic, calcineurin- |
| | | | | dependent 3 |
| 242 | DNA | NM_173163 | NFATC3 | nuclear factor of activated T- |
| | | | | cells, cytoplasmic, calcineurin- |
| | | | | dependent 3 |
| 243 | Protein | NP_775186 | NFATC3 | nuclear factor of activated T- |
| | | | | cells, cytoplasmic, calcineurin- |
| | | | | dependent 3 |
| 244 | DNA | NM_173164 | NFATC3 | nuclear factor of activated T- |
| | | | | cells, cytoplasmic, calcineurin- |
| | | | | dependent 3 |
| 245 | Protein | NP_775187 | NFATC3 | nuclear factor of activated T- |
| | | | | cells, cytoplasmic, calcineurin- |
| | | | | dependent 3 |
| 246 | DNA | NM_173165 | NFATC3 | nuclear factor of activated T- |
| | | | | cells, cytoplasmic, calcineurin- |
| | | | | dependent 3 |
| 247 | Protein | NP_775188 | NFATC3 | nuclear factor of activated T- |
| | | | | cells, cytoplasmic, calcineurin- |
| | | | | dependent 3 |
| 248 | DNA | NM_002295 | LAMR1 | laminin receptor 1 (ribosomal |
| | | | | protein SA, 67 kDa) |
| 249 | Protein | NP_002286 | LAMR1 | laminin receptor 1 (ribosomal |
| | | | | protein SA, 67 kDa) |
| 250 | DNA | NM_001634 | AMD1 | S-adenosylmethionine |
| | | | | decarboxylase 1 |
| 251 | Protein | NP_001625 | AMD1 | S-adenosylmethionine |
| | | | | decarboxylase 1 |
| 252 | DNA | NM_021960 | MCL1 | myeloid cell leukemia sequence |
| | | | | 1 (BCL2-related) |
| 253 | Protein | NP_068779 | MCL1 | myeloid cell leukemia sequence |
| | | | | 1 (BCL2-related) |
| 254 | DNA | HG4322-HT4592 | | Tubulin, Beta |
| 255 | DNA | NM_001022 | RPS19 | ribosomal protein S19 |
| 256 | Protein | NP_001013 | RPS19 | ribosomal protein S19 |
| 257 | DNA | NM_012185 | FOXE2 | forkhead box E2 |
| 258 | Protein | NP_036317 | FOXE2 | forkhead box E2 |
| 259 | DNA | M20812 | | Cluster Incl. M20812: Human |
| | | | | kappa-immunoglobulin |
| | | | | germline pseudogene (cos118) |
| | | | | variable region (subgroup V |
| | | | | kappa I) /cds = (6.326) |
| | | | | /gb = M20812 /gi = 185958 |
| | | | | /ug = Hs.150224 /len = 351 |
| 260 | Protein | AAA36095 | | Cluster Incl. M20812: Human |
| | | | | kappa-immunoglobulin |
| | | | | germline pseudogene (cos118) |
| | | | | variable region (subgroup V |
| | | | | kappa I) /cds = (6.326) |
| | | | | /gb = M20812 /gi = 185958 |
| | | | | /ug = Hs.150224 /len = 351 |
| 261 | DNA | AF068744 | | Cluster Incl. AF068744: Homo |
| | | | | sapiens double homeodomain |
| | | | | protein (DUX2) mRNA, |
| | | | | complete cds /cds = (211.453) |
| | | | | /gb = AF068744 /gi = 3414864 |
| | | | | /ug = Hs.157425 /len = 556 |
| 262 | Protein | AF068744 | | Cluster Incl. AF068744: Homo |
| | | (Translation) | | sapiens double homeodomain |
| | | | | protein (DUX2) mRNA, |
| | | | | complete cds /cds = (211.453) |
| | | | | /gb = AF068744 /gi = 3414864 |
| | | | | /ug = Hs.157425 /len = 556 |
| 263 | DNA | NM_012369 | | Cluster Incl. AC004853: Homo |
| | | | | sapiens PAC clone DJ0669B10 |
| | | | | from 7q33-q35 /cds = (0.953) |
| | | | | /gb = AC004853 /gi = 3766130 |
| | | | | /ug = Hs.159899 /len = 954 |
| 264 | Protein | NP_036501 | | Cluster Incl. AC004853: Homo |
| | | | | sapiens PAC clone DJ0669B10 |
| | | | | from 7q33-q35 /cds = (0.953) |
| | | | | /gb = AC004853 /gi = 3766130 |
| | | | | /ug = Hs.159899 /len = 954 |
| 265 | DNA | W28732 | | Cluster Incl. W28732: 50h7 |
| | | | | Homo sapiens cDNA |
| | | | | /gb = W28732 /gi = 1308680 |
| | | | | /ug = Hs.177496 /len = 818 |
| 266 | DNA | NM_005336 | HDLBP | high density lipoprotein binding |
| | | | | protein (vigilin) |
| 267 | Protein | NP_005327 | HDLBP | high density lipoprotein binding |
| | | | | protein (vigilin) |
| 268 | DNA | NM_000973 | RPL8 | ribosomal protein L8 |
| 269 | Protein | NP_000964 | RPL8 | ribosomal protein L8 |
| 270 | DNA | NM_033301 | RPL8 | ribosomal protein L8 |
| 271 | DNA | NM_001013 | RPS9 | ribosomal protein S9 |
| 272 | Protein | NP_001004 | RPS9 | ribosomal protein S9 |
| 273 | DNA | M90356 | | Cluster Incl. M90356: Human |
| | | | | BTF3 protein homologue gene, |
| | | | | complete cds /cds = (0.644) |
| | | | | /gb = M90356 /gi = 179575 |
| | | | | /ug = Hs.181967 /len = 645 |
| 274 | Protein | M90356 | | Cluster Incl. M90356: Human |
| | | (Translation) | | BTF3 protein homologue gene, |
| | | | | complete cds /cds = (0.644) |
| | | | | /gb = M90356 /gi = 179575 |
| | | | | /ug = Hs.181967 /len = 645 |
| 275 | DNA | NM_002952 | RPS2 | ribosomal protein S2 |
| 276 | Protein | NP_002943 | RPS2 | ribosomal protein S2 |
| 277 | DNA | NM_001002 | RPLP0 | ribosomal protein, large, P0 |
| 278 | Protein | NP_000993 | RPLP0 | ribosomal protein, large, P0 |
| 279 | DNA | NM_053275 | RPLP0 | ribosomal protein, large, P0 |
| 280 | DNA | NM_022551 | | Homo sapiens ribosomal |
| | | | | protein S18 (RPS18), mRNA |
| 281 | Protein | NP_072045 | | Homo sapiens ribosomal |
| | | | | protein S18 (RPS18) |
| 282 | DNA | NM_021109 | TMSB4X | thymosin, beta 4, X |
| | | | | chromosome |
| 283 | Protein | NP_066932 | TMSB4X | thymosin, beta 4, X |
| | | | | chromosome |
| 284 | DNA | NM_001014 | RPS10 | ribosomal protein S10 |
| 285 | Protein | NP_001005 | RPS10 | ribosomal protein S10 |
| 286 | DNA | NM_004095 | EIF4EBP1 | eukaryotic translation initiation |
| | | | | factor 4E binding protein 1 |
| 287 | Protein | NP_004086 | EIF4EBP1 | eukaryotic translation initiation |
| | | | | factor 4E binding protein 1 |
| 288 | DNA | NM_012231 | PRDM2 | PR domain containing 2, with |
| | | | | ZNF domain |
| 289 | Protein | NP_036363 | PRDM2 | PR domain containing 2, with |
| | | | | ZNF domain |
| 290 | DNA | NM_015866 | PRDM2 | PR domain containing 2, with |
| | | | | ZNF domain |
| 291 | Protein | NP_056950 | PRDM2 | PR domain containing 2, with |
| | | | | ZNF domain |
| 292 | DNA | AF047485 | LOC90586 | amine oxidase pseudogene |
| 293 | Protein | AF047485 | LOC90586 | amine oxidase pseudogene |
| | | (Translation) | | |
| 294 | DNA | NM_024407 | NDUFS7 | NADH dehydrogenase |
| | | | | (ubiquinone) Fe—S protein 7, |
| | | | | 20 kDa (NADH-coenzyme Q |
| | | | | reductase) |
| 295 | Protein | NP_077718 | NDUFS7 | NADH dehydrogenase |
| | | | | (ubiquinone) Fe—S protein 7, |
| | | | | 20 kDa (NADH-coenzyme Q |
| | | | | reductase) |
| 296 | DNA | NM_005271 | | Unknown (protein for |
| | | | | MGC: 13241) [Homo sapiens], |
| | | | | mRNA sequence |
| 297 | Protein | NP_005262 | | Unknown (protein for |
| | | | | MGC: 13241) [Homo sapiens], |
| | | | | mRNA sequence |
| 298 | DNA | NM_012084 | | Unknown (protein for |
| | | | | MGC: 13241) [Homo sapiens], |
| | | | | mRNA sequence |
| 299 | Protein | NP_036216 | | Unknown (protein for |
| | | | | MGC: 13241) [Homo sapiens], |
| | | | | mRNA sequence |
| 300 | DNA | U08997 | | Unknown (protein for |
| | | | | MGC: 13241) [Homo sapiens], |
| | | | | mRNA sequence |
| 301 | DNA | J04755 | | Cluster Incl. J04755: Human |
| | | | | ferritin H processed |
| | | | | pseudogene, complete cds |
| | | | | /cds = UNKNOWN /gb = J04755 |
| | | | | /gi = 182512 /ug = Hs.239542 |
| | | | | /len = 2083 |
| 302 | DNA | NM_003655 | CBX4 | chromobox homolog 4 (Pc |
| | | | | class homolog, Drosophila) |
| 303 | Protein | NP_003646 | CBX4 | chromobox homolog 4 (Pc |
| | | | | class homolog, Drosophila) |
| 304 | DNA | NM_014212 | HOXC11 | homeo box C11 |
| 305 | Protein | NP_055027 | HOXC11 | homeo box C11 |
| 306 | DNA | W28912 | | ESTs |
| 307 | DNA | NM_005160 | ADRBK2 | adrenergic, beta, receptor |
| | | | | kinase 2 |
| 308 | Protein | NP_005151 | ADRBK2 | adrenergic, beta, receptor |
| | | | | kinase 2 |
| 309 | DNA | NM_006026 | H1FX | H1 histone family, member X |
| 310 | Protein | NP_006017 | H1FX | H1 histone family, member X |
| 311 | DNA | NM_015062 | KIAA0595 | KIAA0595 protein |
| 312 | Protein | NP_055877 | KIAA0595 | KIAA0595 protein |
| 313 | DNA | NM_001498 | GCLC | glutamate-cysteine ligase, |
| | | | | catalytic subunit |
| 314 | Protein | NP_001489 | GCLC | glutamate-cysteine ligase, |
| | | | | catalytic subunit |
| 315 | DNA | AL050390 | DKFZP564O043 | hypothetical protein |
| | | | | DKFZp564O043 |
| 316 | DNA | NM_003797 | EED | embryonic ectoderm |
| | | | | development |
| 317 | Protein | NP_003788 | EED | embryonic ectoderm |
| | | | | development |
| 318 | DNA | NM_152991 | EED | embryonic ectoderm |
| | | | | development |
| 319 | Protein | NP_694536 | EED | embryonic ectoderm |
| | | | | development |
| 320 | DNA | NM_005796 | NUTF2 | nuclear transport factor 2 |
| 321 | Protein | NP_005787 | NUTF2 | nuclear transport factor 2 |
| 322 | DNA | NM_003876 | PMI | putative receptor protein |
| 323 | Protein | NP_003867 | PMI | putative receptor protein |
| 324 | DNA | D80001 | KIAA0179 | KIAA0179 protein |
| 325 | Protein | D80001 (Translation) | KIAA0179 | KIAA0179 protein |
| 326 | DNA | NM_005792 | MPHOSPH6 | M-phase phosphoprotein 6 |
| 327 | Protein | NP_005783 | MPHOSPH6 | M-phase phosphoprotein 6 |
| 328 | DNA | NM_006716 | ASK | activator of S phase kinase |
| 329 | Protein | NP_006707 | ASK | activator of S phase kinase |
| 330 | DNA | NM_001812 | CENPC1 | centromere protein C 1 |
| 331 | Protein | NP_001803 | CENPC1 | centromere protein C 1 |
| 332 | DNA | NM_001186 | BACH1 | BTB and CNC homology 1, |
| | | | | basic leucine zipper |
| | | | | transcription factor 1 |
| 333 | Protein | NP_001177 | BACH1 | BTB and CNC homology 1, |
| | | | | basic leucine zipper |
| | | | | transcription factor 1 |
| 334 | DNA | NM_014673 | KIAA0103 | KIAA0103 gene product |
| 335 | Protein | NP_055488 | KIAA0103 | KIAA0103 gene product |
| 336 | DNA | NM_001537 | HSBP1 | heat shock factor binding |
| | | | | protein 1 |
| 337 | Protein | NP_001528 | HSBP1 | heat shock factor binding |
| | | | | protein 1 |
| 338 | DNA | NM_001024 | RPS21 | ribosomal protein S21 |
| 339 | Protein | NP_001015 | RPS21 | ribosomal protein S21 |
| 340 | DNA | NM_001003 | RPLP1 | ribosomal protein, large, P1 |
| 341 | Protein | NP_000994 | RPLP1 | ribosomal protein, large, P1 |
| 342 | DNA | NM_000998 | RPL37A | ribosomal protein L37a |
| 343 | Protein | NP_000989 | RPL37A | ribosomal protein L37a |
| 344 | DNA | AL049430 | | Homo sapiens mRNA; cDNA |
| | | | | DKFZp586H201 (from clone |
| | | | | DKFZp586H201), mRNA |
| | | | | sequence |
| 345 | DNA | NM_030756 | TCF7L2 | transcription factor 7-like 2 (T- |
| | | | | cell specific, HMG-box) |
| 346 | Protein | NP_110383 | TCF7L2 | transcription factor 7-like 2 (T- |
| | | | | cell specific, HMG-box) |
| 347 | DNA | NM_014247 | PDZ-GEF1 | PDZ domain containing |
| | | | | guanine nucleotide exchange |
| | | | | factor(GEF)1 |
| 348 | Protein | NP_055062 | PDZ-GEF1 | PDZ domain containing |
| | | | | guanine nucleotide exchange |
| | | | | factor(GEF)1 |
| 349 | DNA | NM_000303 | PMM2 | phosphomannomutase 2 |
| 350 | Protein | NP_000294 | PMM2 | phosphomannomutase 2 |
| 351 | DNA | NM_022719 | DGCR14 | DiGeorge syndrome critical |
| | | | | region gene 14 |
| 352 | Protein | NP_073210 | DGCR14 | DiGeorge syndrome critical |
| | | | | region gene 14 |
| 353 | DNA | NM_007042 | RPP14 | ribonuclease P (14 kD) |
| 354 | Protein | NP_008973 | RPP14 | ribonuclease P (14 kD) |
| 355 | DNA | NM_014671 | KIAA0010 | ubiquitin-protein isopeptide |
| | | | | ligase (E3) |
| 356 | Protein | NP_055486 | KIAA0010 | ubiquitin-protein isopeptide |
| | | | | ligase (E3) |
| 357 | DNA | NM_004854 | HNK-1ST | HNK-1 sulfotransferase |
| 358 | Protein | NP_004845 | HNK-1ST | HNK-1 sulfotransferase |
| 359 | DNA | NM_004330 | BNIP2 | BCL2/adenovirus E1B 19 kDa |
| | | | | interacting protein 2 |
| 360 | Protein | NP_004321 | BNIP2 | BCL2/adenovirus E1B 19 kDa |
| | | | | interacting protein 2 |
| 361 | DNA | AB002293 | KIAA0295 | KIAA0295 protein |
| 362 | Protein | AB002293 | KIAA0295 | KIAA0295 protein |
| | | (Translation) | | |
| 363 | DNA | AB023198 | KIAA0981 | KIAA0981 protein |
| 364 | Protein | AB023198 | KIAA0981 | KIAA0981 protein |
| | | (Translation) | | |
| 365 | DNA | AB007915 | KIAA0446 | KIAA0446 gene product |
| 366 | Protein | AB007915 | KIAA0446 | KIAA0446 gene product |
| | | (Translation) | | |
| 367 | DNA | NM_004273 | CHST3 | carbohydrate (chondroitin 6) |
| | | | | sulfotransferase 3 |
| 368 | Protein | NP_004264 | CHST3 | carbohydrate (chondroitin 6) |
| | | | | sulfotransferase 3 |
| 369 | DNA | NM_014363 | SACS | spastic ataxia of Charlevoix- |
| | | | | Saguenay (sacsin) |
| 370 | Protein | NP_055178 | SACS | spastic ataxia of Charlevoix- |
| | | | | Saguenay (sacsin) |
| 371 | DNA | NM_000094 | COL7A1 | collagen, type VII, alpha 1 |
| | | | | (epidermolysis bullosa, |
| | | | | dystrophic, dominant and |
| | | | | recessive) |
| 372 | Protein | NP_000085 | COL7A1 | collagen, type VII, alpha 1 |
| | | | | (epidermolysis bullosa, |
| | | | | dystrophic, dominant and |
| | | | | recessive) |
| 373 | DNA | AA928996 | THOC2 | THO complex 2 |
| 374 | DNA | AL079314 | ZNF364 | zinc finger protein 364 |
| 375 | Protein | AL079314 | ZNF364 | zinc finger protein 364 |
| | | (Translation) | | |
| 376 | DNA | NM_015641 | TES | testis derived transcript (3 LIM |
| | | | | domains) |
| 377 | Protein | NP_056456 | TES | testis derived transcript (3 LIM |
| | | | | domains) |
| 378 | DNA | NM_152829 | TES | testis derived transcript (3 LIM |
| | | | | domains) |
| 379 | Protein | NP_690042 | TES | testis derived transcript (3 LIM |
| | | | | domains) |
| 380 | DNA | NM_002856 | PVRL2 | poliovirus receptor-related 2 |
| | | | | (herpesvirus entry mediator B) |
| 381 | Protein | NP_002847 | PVRL2 | poliovirus receptor-related 2 |
| | | | | (herpesvirus entry mediator B) |
| 382 | DNA | AI817548 | | Cluster Incl. |
| | | | | AI817548: wk24e08.x1 Homo |
| | | | | sapiens cDNA, 3′ end |
| | | | | /clone = IMAGE-2413286 |
| | | | | /clone_end = 3′ /gb = AI817548 |
| | | | | /gi = 5436627 /ug = Hs.184093 |
| | | | | /len = 570 |
| 383 | DNA | NM_015002 | FBXO21 | F-box only protein 21 |
| 384 | Protein | NP_055817 | FBXO21 | F-box only protein 21 |
| 385 | DNA | NM_033624 | FBXO21 | F-box only protein 21 |
| 386 | Protein | NP_296373 | FBXO21 | F-box only protein 21 |
| 387 | DNA | NM_001788 | CDC10 | CDC10 cell division cycle 10 |
| | | | | homolog (S. cerevisiae) |
| 388 | Protein | NP_001779 | CDC10 | CDC10 cell division cycle 10 |
| | | | | homolog (S. cerevisiae) |
| 389 | DNA | NM_006989 | CAPRI | Ca2+-promoted Ras inactivator |
| 390 | Protein | NP_008920 | CAPRI | Ca2+-promoted Ras inactivator |
| 391 | DNA | NM_003704 | RES4-22 | gene with multiple splice |
| | | | | variants near HD locus on |
| | | | | 4p16.3 |
| 392 | Protein | NP_003695 | RES4-22 | gene with multiple splice |
| | | | | variants near HD locus on |
| | | | | 4p16.3 |
| 393 | DNA | NM_007144 | ZNF144 | zinc finger protein 144 (Mel- |
| | | | | 18 |
| 394 | Protein | NP_009075 | ZNF144 | zinc finger protein 144 (Mel- |
| | | | | 18) |
| 395 | DNA | AL049450 | | Homo sapiens mRNA; cDNA |
| | | | | DKFZp586B1922 (from clone |
| | | | | DKFZp586B1922), mRNA |
| | | | | sequence |
| 396 | DNA | NM_014686 | KIAA0355 | KIAA0355 gene product |
| 397 | Protein | NP_055501 | KIAA0355 | KIAA0355 gene product |
| 398 | DNA | NM_005837 | RPP20 | POP7 (processing of precursor, |
| | | | | S. cerevisiae) homolog |
| 399 | Protein | NP_005828 | RPP20 | POP7 (processing of precursor, |
| | | | | S. cerevisiae) homolog |
| 400 | DNA | NM_004786 | TXNL | thioredoxin-like, 32 kDa |
| 401 | Protein | NP_004777 | TXNL | thioredoxin-like, 32 kDa |
| 402 | DNA | NM_030809 | C12orf22 | chromosome 12 open reading |
| | | | | frame 22 |
| 403 | Protein | NP_110436 | C12orf22 | chromosome 12 open reading |
| | | | | frame 22 |
| 404 | DNA | NM_012290 | TLK1 | tousled-like kinase 1 |
| 405 | Protein | NP_036422 | TLK1 | tousled-like kinase 1 |
| 406 | DNA | NM_005047 | PSMD5 | proteasome (prosome, |
| | | | | macropain) 26S subunit, non- |
| | | | | ATPase, 5 |
| 407 | Protein | NP_005038 | PSMD5 | proteasome (prosome, |
| | | | | macropain) 26S subunit, non- |
| | | | | ATPase, 5 |
| 408 | DNA | NM_003218 | TERF1 | telomeric repeat binding factor |
| | | | | (NIMA-interacting) 1 |
| 409 | Protein | NP_003209 | TERF1 | telomeric repeat binding factor |
| | | | | (NIMA-interacting) 1 |
| 410 | DNA | NM_017489 | TERF1 | telomeric repeat binding factor |
| | | | | (NIMA-interacting) 1 |
| 411 | Protein | NP_059523 | TERF1 | telomeric repeat binding factor |
| | | | | (NIMA-interacting) 1 |
| 412 | DNA | NM_001991 | EZH1 | enhancer of zeste homolog 1 |
| | | | | (Drosophila) |
| 413 | Protein | NP_001982 | EZH1 | enhancer of zeste homolog 1 |
| | | | | (Drosophila) |
| 414 | DNA | NM_003768 | PEA15 | phosphoprotein enriched in |
| | | | | astrocytes 15 |
| 415 | Protein | NP_003759 | PEA15 | phosphoprotein enriched in |
| | | | | astrocytes 15 |
| 416 | DNA | NM_013287 | PEA15 | phosphoprotein enriched in |
| | | | | astrocytes 15 |
| 417 | DNA | NM_023005 | BAZ1B | bromodomain adjacent to zinc |
| | | | | finger domain, 1B |
| 418 | Protein | NP_075381 | BAZ1B | bromodomain adjacent to zinc |
| | | | | finger domain, 1B |
| 419 | DNA | NM_032408 | BAZ1B | bromodomain adjacent to zinc |
| | | | | finger domain, 1B |
| 420 | Protein | NP_115784 | BAZ1B | bromodomain adjacent to zinc |
| | | | | finger domain, 1B |
| 421 | DNA | NM_015935 | CGI-01 | CGI-01 protein |
| 422 | Protein | NP_057019 | CGI-01 | CGI-01 protein |
| 423 | DNA | AF052148 | | Homo sapiens clone 24507 |
| | | | | mRNA sequence |
| 424 | DNA | NM_000994 | RPL32 | ribosomal protein L32 |
| 425 | Protein | NP_000985 | RPL32 | ribosomal protein L32 |
| 426 | DNA | NM_005395 | PMS2L9 | postmeiotic segregation |
| | | | | increased 2-like 9 |
| 427 | Protein | NP_005386 | PMS2L9 | postmeiotic segregation |
| | | | | increased 2-like 9 |
| 428 | DNA | NM_003289 | TPM2 | tropomyosin 2 (beta) |
| 429 | Protein | NP_003280 | TPM2 | tropomyosin 2 (beta) |
| 430 | DNA | NM_001026 | RPS24 | ribosomal protein S24 |
| 431 | Protein | NP_001017 | RPS24 | ribosomal protein S24 |
| 432 | DNA | NM_033022 | RPS24 | ribosomal protein S24 |
| 433 | Protein | NP_148982 | RPS24 | ribosomal protein S24 |
| 434 | DNA | NM_001101 | ACTB | actin, beta |
| 435 | Protein | NP_001092 | ACTB | actin, beta |
| 436 | DNA | NM_001015 | RPS11 | ribosomal protein S11 |
| 437 | Protein | NP_001006 | RPS11 | ribosomal protein S11 |
| 438 | DNA | NM_013410 | AK3 | adenylate kinase 3 |
| 439 | Protein | NP_037542 | AK3 | adenylate kinase 3 |
| 440 | DNA | NM_000034 | ALDOA | aldolase A, fructose- |
| | | | | bisphosphate |
| 441 | Protein | NP_000025 | ALDOA | aldolase A, fructose- |
| | | | | bisphosphate |
| 442 | DNA | NM_000982 | RPL21 | ribosomal protein L21 |
| 443 | Protein | NP_000973 | RPL21 | ribosomal protein L21 |
| 444 | DNA | NM_004559 | NSEP1 | nuclease sensitive element |
| | | | | binding protein 1 |
| 445 | Protein | NP_004550 | NSEP1 | nuclease sensitive element |
| | | | | binding protein 1 |
| 446 | DNA | NM_000984 | RPL23A | ribosomal protein L23a |
| 447 | Protein | NP_000975 | RPL23A | ribosomal protein L23a |
| 448 | DNA | NM_000498 | CYP11B2 | cytochrome P450, subfamily |
| | | | | XIB (steroid 11-beta- |
| | | | | hydroxylase), polypeptide 2 |
| 449 | Protein | NP_000489 | CYP11B2 | cytochrome P450, subfamily |
| | | | | XIB (steroid 11-beta- |
| | | | | hydroxylase), polypeptide 2 |
| 450 | DNA | NM_002654 | PKM2 | pyruvate kinase, muscle |
| 451 | Protein | NP_002645 | PKM2 | pyruvate kinase, muscle |
| 452 | DNA | W25892 | EST | EST |
| 453 | DNA | NM_000990 | RPL27A | ribosomal protein L27a |
| 454 | Protein | NP_000981 | RPL27A | ribosomal protein L27a |
| 455 | DNA | NM_001009 | RPS5 | ribosomal protein S5 |
| 456 | Protein | NP_001000 | RPS5 | ribosomal protein S5 |
| 457 | DNA | NM_001023 | RPS20 | ribosomal protein S20 |
| 458 | Protein | NP_001014 | RPS20 | ribosomal protein S20 |
| 459 | DNA | NM_001905 | CTPS | CTP synthase |
| 460 | Protein | NP_001896 | CTPS | CTP synthase |
| 461 | DNA | NM_021104 | RPL41 | ribosomal protein L41 |
| 462 | Protein | NP_066927 | RPL41 | ribosomal protein L41 |
| 463 | DNA | NM_002235 | KCNA6 | potassium voltage-gated |
| | | | | channel, shaker-related |
| | | | | subfamily, member 6 |
| 464 | Protein | NP_002226 | KCNA6 | potassium voltage-gated |
| | | | | channel, shaker-related |
| | | | | subfamily, member 6 |
| 465 | DNA | NM_001004 | RPLP2 | ribosomal protein, large P2 |
| 466 | Protein | NP_000995 | RPLP2 | ribosomal protein, large P2 |
| 467 | DNA | NM_002268 | RPLP2 | ribosomal protein, large P2 |
| 468 | Protein | NP_002259 | RPLP2 | ribosomal protein, large P2 |
| 469 | DNA | NM_032771 | RPLP2 | ribosomal protein, large P2 |
| 470 | Protein | NP_116160 | RPLP2 | ribosomal protein, large P2 |
| 471 | DNA | AL096857 | KIAA1096 | KIAA1096 protein |
| 472 | Protein | AL096857 | KIAA1096 | KIAA1096 protein |
| | | (Translation) | | |
| 473 | DNA | AI498132 | | Homo sapiens cDNA FLJ37094 |
| | | | | fis, clone BRACE2018337, |
| | | | | mRNA sequence |
| 474 | DNA | NM_005382 | NEF3 | neurofilament 3 (150 kDa |
| | | | | medium) |
| 475 | Protein | NP_005373 | NEF3 | neurofilament 3 (150 kDa |
| | | | | medium) |
| 476 | DNA | NM_014296 | CAPN7 | calpain 7 |
| 477 | Protein | NP_055111 | CAPN7 | calpain 7 |
| 478 | DNA | NM_006012 | CLPP | ClpP caseinolytic protease, |
| | | | | ATP-dependent, proteolytic |
| | | | | subunit homolog (E. coli) |
| 479 | Protein | NP_006003 | CLPP | ClpP caseinolytic protease, |
| | | | | ATP-dependent, proteolytic |
| | | | | subunit homolog (E. coli) |
| 480 | DNA | NM_000138 | FBN1 | fibrillin 1 (Marfan syndrome) |
| 481 | Protein | NP_000129 | FBN1 | fibrillin 1 (Marfan syndrome) |
| 482 | DNA | NM_006710 | COP9 | COP9 homolog |
| 483 | Protein | NP_006701 | COP9 | COP9 homolog |
| 484 | DNA | NM_012425 | RSU1 | Ras suppressor protein 1 |
| 485 | Protein | NP_036557 | RSU1 | Ras suppressor protein 1 |
| 486 | DNA | NM_012321 | LSM4 | U6 snRNA-associated Sm-like |
| | | | | protein |
| 487 | Protein | NP_036453 | LSM4 | U6 snRNA-associated Sm-like |
| | | | | protein |
| 488 | DNA | NM_000430 | PAFAH1B1 | platelet-activating factor |
| | | | | acetylhydrolase, isoform Ib, |
| | | | | alpha subunit 45 kDa |
| 489 | Protein | NP_000421 | PAFAH1B1 | platelet-activating factor |
| | | | | acetylhydrolase, isoform Ib, |
| | | | | alpha subunit 45 kDa |
| 490 | DNA | D86971 | KIAA0217 | KIAA0217 protein |
| 491 | Protein | D86971 (Translation) | KIAA0217 | KIAA0217 protein |
| 492 | DNA | NM_006887 | ZFP36L2 | zinc finger protein 36, C3H |
| | | | | type-like 2 |
| 493 | Protein | NP_008818 | ZFP36L2 | zinc finger protein 36, C3H |
| | | | | type-like 2 |
| 494 | DNA | NM_005483 | CHAF1A | chromatin assembly factor 1, |
| | | | | subunit A (p150) |
| 495 | Protein | NP_005474 | CHAF1A | chromatin assembly factor 1, |
| | | | | subunit A (p150) |
| 496 | DNA | AF000560 | | Homo sapiens, clone |
| | | | | IMAGE: 4477095, mRNA, |
| | | | | mRNA sequence |
| 497 | Protein | AAB58413 | | Homo sapiens, clone |
| | | | | IMAGE: 4477095, mRNA, |
| | | | | mRNA sequence |
| 498 | DNA | NM_002567 | PBP | prostatic binding protein |
| 499 | Protein | NP_002558 | PBP | prostatic binding protein |
| 500 | DNA | NM_015906 | TRIM33 | tripartite motif-containing 33 |
| 501 | Protein | NP_056990 | TRIM33 | tripartite motif-containing 33 |
| 502 | DNA | NM_033020 | TRIM33 | tripartite motif-containing 33 |
| 503 | Protein | NP_148980 | TRIM33 | tripartite motif-containing 33 |
| 504 | DNA | NM_006696 | SMAP | skeletal muscle abundant |
| | | | | protein |
| 505 | Protein | NP_006687 | SMAP | skeletal muscle abundant |
| | | | | protein |
| 506 | DNA | NM_015636 | EIF2B4 | eukaryotic translation initiation |
| | | | | factor 2B, subunit 4 delta, |
| | | | | 67 kDa |
| 507 | Protein | NP_056451 | EIF2B4 | eukaryotic translation initiation |
| | | | | factor 2B, subunit 4 delta, |
| | | | | 67 kDa |
| 508 | DNA | NM_006195 | PBX3 | pre-B-cell leukemia |
| | | | | transcription factor 3 |
| 509 | Protein | NP_006186 | PBX3 | pre-B-cell leukemia |
| | | | | transcription factor 3 |
| 510 | DNA | NM_003325 | HIRA | HIR histone cell cycle |
| | | | | regulation defective homolog A |
| | | | | (S. cerevisiae) |
| 511 | Protein | NP_003316 | HIRA | HIR histone cell cycle |
| | | | | regulation defective homolog A |
| | | | | (S. cerevisiae) |
| 512 | DNA | NM_001324 | CSTF1 | cleavage stimulation factor, 3′ |
| | | | | pre-RNA, subunit 1, 50 kDa |
| 513 | Protein | NP_001315 | CSTF1 | cleavage stimulation factor, 3′ |
| | | | | pre-RNA, subunit 1, 50 kDa |
| 514 | DNA | NM_006246 | PPP2R5E | protein phosphatase 2, |
| | | | | regulatory subunit B (B56), |
| | | | | epsilon isoform |
| 515 | Protein | NP_006237 | PPP2R5E | protein phosphatase 2, |
| | | | | regulatory subunit B (B56), |
| | | | | epsilon isoform |
| 516 | DNA | AB023148 | KIAA0931 | KIAA0931 protein |
| 517 | Protein | AB023148 | KIAA0931 | KIAA0931 protein |
| | | (Translation) | | |
| 518 | DNA | NM_003610 | RAE1 | RAE1 RNA export 1 homolog |
| | | | | (S. pombe) |
| 519 | Protein | NP_003601 | RAE1 | RAE1 RNA export 1 homolog |
| | | | | (S. pombe) |
| 520 | DNA | NM_001469 | G22P1 | thyroid autoantigen 70 kDa (Ku |
| | | | | antigen) |
| 521 | Protein | NP_001460 | G22P1 | thyroid autoantigen 70 kDa (Ku |
| | | | | antigen) |
| 522 | DNA | NM_003035 | SIL | TAL1 (SCL) interrupting locus |
| 523 | Protein | NP_003026 | SIL | TAL1 (SCL) interrupting locus |
| 524 | DNA | NM_030794 | FLJ21007 | hypothetical protein FLJ21007 |
| 525 | Protein | NP_110421 | FLJ21007 | hypothetical protein FLJ21007 |
| 526 | DNA | NM_006267 | RANBP2 | RAN binding protein 2 |
| 527 | Protein | NP_006258 | RANBP2 | RAN binding protein 2 |
| 528 | DNA | L19183 | MAC30 | hypothetical protein MAC30 |
| 529 | Protein | L19183 (Translation) | MAC30 | hypothetical protein MAC30 |
| 530 | DNA | AF004292 | DKFZP566C134 | DKFZP566C134 protein |
| 531 | DNA | AL118582 | | OVN6-2 [Homo sapiens], |
| | | | | mRNA sequence |
| 532 | DNA | NM_003021 | SGT | small glutamine-rich |
| | | | | tetratricopeptide repeat (TPR)- |
| | | | | containing |
| 533 | Protein | NP_003012 | SGT | small glutamine-rich |
| | | | | tetratricopeptide repeat (TPR)- |
| | | | | containing |
| 534 | DNA | NM_005882 | MAEA | macrophage erythroblast |
| | | | | attacher |
| 535 | Protein | NP_005873 | MAEA | macrophage erythroblast |
| | | | | attacher |
| 536 | DNA | NM_006411 | AGPAT1 | 1-acylglycerol-3-phosphate O- |
| | | | | acyltransferase 1 |
| | | | | (lysophosphatidic acid |
| | | | | acyltransferase, alpha) |
| 537 | Protein | NP_006402 | AGPAT1 | 1-acylglycerol-3-phosphate O- |
| | | | | acyltransferase 1 |
| | | | | (lysophosphatidic acid |
| | | | | acyltransferase, alpha) |
| 538 | DNA | NM_032741 | AGPAT1 | 1-acylglycerol-3-phosphate O- |
| | | | | acyltransferase 1 |
| | | | | (lysophosphatidic acid |
| | | | | acyltransferase, alpha) |
| 539 | DNA | NM_014820 | TOMM70A | translocase of outer |
| | | | | mitochondrial membrane 70 |
| | | | | homolog A (yeast) |
| 540 | Protein | NP_055635 | TOMM70A | translocase of outer |
| | | | | mitochondrial membrane 70 |
| | | | | homolog A (yeast) |
| 541 | DNA | NM_012300 | FBXW1B | F-box and WD-40 domain |
| | | | | protein 1B |
| 542 | Protein | NP_036432 | FBXW1B | F-box and WD-40 domain |
| | | | | protein 1B |
| 543 | DNA | NM_033644 | FBXW1B | F-box and WD-40 domain |
| | | | | protein 1B |
| 544 | Protein | NP_387448 | FBXW1B | F-box and WD-40 domain |
| | | | | protein 1B |
| 545 | DNA | NM_033645 | FBXW1B | F-box and WD-40 domain |
| | | | | protein 1B |
| 546 | Protein | NP_387449 | FBXW1B | F-box and WD-40 domain |
| | | | | protein 1B |
| 547 | DNA | NM_016936 | UBN1 | ubinuclein 1 |
| 548 | Protein | NP_058632 | UBN1 | ubinuclein 1 |
| 549 | DNA | NM_006950 | SYN1 | synapsin I |
| 550 | Protein | NP_008881 | SYN1 | synapsin I |
| 551 | DNA | NM_133499 | SYN1 | synapsin I |
| 552 | Protein | NP_598006 | SYN1 | synapsin I |
| 553 | DNA | NM_153208 | MGC35048 | hypothetical protein |
| | | | | MGC35048 |
| 554 | Protein | NP_694940 | MGC35048 | hypothetical protein |
| | | | | MGC35048 |
| 555 | DNA | NM_014282 | HABP4 | hyaluronan binding protein 4 |
| 556 | Protein | NP_055097 | HABP4 | hyaluronan binding protein 4 |
| 557 | DNA | AF035314 | | Homo sapiens clone 23651 |
| | | | | mRNA sequence |
| 558 | DNA | NM_003637 | ITGA10 | integrin, alpha 10 |
| 559 | Protein | NP_003628 | ITGA10 | integrin, alpha 10 |
| 560 | DNA | NM_001016 | RPS12 | ribosomal protein S12 |
| 561 | Protein | NP_001007 | RPS12 | ribosomal protein S12 |
| 562 | DNA | L10379 | HRIHFB2206 | HRIHFB2206 protein |
| 563 | DNA | NM_003107 | SOX4 | SRY (sex determining region |
| | | | | Y)-box 4 |
| 564 | Protein | NP_003098 | SOX4 | SRY (sex determining region |
| | | | | Y)-box 4 |
| 565 | DNA | NM_003056 | SLC19A1 | solute carrier family 19 (folate |
| | | | | transporter), member 1 |
| 566 | Protein | NP_003047 | SLC19A1 | solute carrier family 19 (folate |
| | | | | transporter), member 1 |
| 567 | DNA | NM_006831 | HEAB | ATP/GTP-binding protein |
| 568 | Protein | NP_006822 | HEAB | ATP/GTP-binding protein |
| 569 | DNA | NM_020368 | SAS10 | disrupter of silencing 10 |
| 570 | Protein | NP_065101 | SAS10 | disrupter of silencing 10 |
| 571 | DNA | NM_002061 | GCLM | glutamate-cysteine ligase, |
| | | | | modifier subunit |
| 572 | Protein | NP_002052 | GCLM | glutamate-cysteine ligase, |
| | | | | modifier subunit |
| 573 | DNA | NM_018121 | C10ORF6 | hypothetical protein FLJ10512 |
| 574 | Protein | NP_060591 | C10ORF6 | hypothetical protein FLJ10512 |
| 575 | DNA | NM_144592 | C10ORF6 | hypothetical protein FLJ10512 |
| 576 | Protein | NP_653193 | C10ORF6 | hypothetical protein FLJ10512 |
| 577 | DNA | NM_006165 | NFRKB | nuclear factor related to kappa |
| | | | | B binding protein |
| 578 | Protein | NP_006156 | NFRKB | nuclear factor related to kappa |
| | | | | B binding protein |
| 579 | DNA | NM_004587 | RRBP1 | ribosome binding protein 1 |
| | | | | homolog 180 kDa (dog) |
| 580 | Protein | NP_004578 | RRBP1 | ribosome binding protein 1 |
| | | | | homolog 180 kDa (dog) |
| 581 | DNA | AA887480 | KIAA0117 | KIAA0117 protein |
| 582 | DNA | NM_014788 | TRIM14 | tripartite motif-containing 14 |
| 583 | Protein | NP_055603 | TRIM14 | tripartite motif-containing 14 |
| 584 | DNA | NM_033219 | TRIM14 | tripartite motif-containing 14 |
| 585 | DNA | NM_033220 | TRIM14 | tripartite motif-containing 14 |
| 586 | DNA | NM_033221 | TRIM14 | tripartite motif-containing 14 |
| 587 | Protein | NP_150090 | TRIM14 | tripartite motif-containing 14 |
| 588 | DNA | NM_003705 | SLC25A12 | solute carrier family 25 |
| | | | | (mitochondrial carrier, Aralar), |
| | | | | member 12 |
| 589 | Protein | NP_003696 | SLC25A12 | solute carrier family 25 |
| | | | | (mitochondrial carrier, Aralar), |
| | | | | member 12 |
| 590 | DNA | NM_021983 | HLA-DRB4 | major histocompatibility |
| | | | | complex, class II, DR beta 4 |
| 591 | Protein | NP_068818 | HLA-DRB4 | major histocompatibility |
| | | | | complex, class II, DR beta 4 |
| 592 | DNA | NM_015004 | KIAA0116 | KIAA0116 protein |
| 593 | Protein | NP_055819 | KIAA0116 | KIAA0116 protein |
| 594 | DNA | NM_015703 | CGI-96 | CGI-96 protein |
| 595 | Protein | NP_056518 | CGI-96 | CGI-96 protein |
| 596 | DNA | NM_000181 | GUSB | glucuronidase, beta |
| 597 | Protein | NP_000172 | GUSB | glucuronidase, beta |
| 598 | DNA | NM_014509 | | Homo sapiens kraken-like |
| | | | | (dJ222E13.1), mRNA |
| 599 | Protein | NP_055324 | | Homo sapiens kraken-like |
| | | | | (dJ222E13.1) |
| 600 | DNA | NM_004290 | RNF14 | ring finger protein 14 |
| 601 | Protein | NP_004281 | RNF14 | ring finger protein 14 |
| 602 | DNA | NM_002254 | KIF3C | kinesin family member 3C |
| 603 | Protein | NP_002245 | KIF3C | kinesin family member 3C |
| 604 | DNA | NM_003205 | TCF12 | transcription factor 12 (HTF4, |
| | | | | helix-loop-helix transcription |
| | | | | factors 4) |
| 605 | Protein | NP_003196 | TCF12 | transcription factor 12 (HTF4, |
| | | | | helix-loop-helix transcription |
| | | | | factors 4) |
| 606 | DNA | NM_005875 | GC20 | translation factor suil homolog |
| 607 | Protein | NP_005866 | GC20 | translation factor suil homolog |
| 608 | DNA | NM_022739 | SMURF2 | E3 ubiquitin ligase SMURF2 |
| 609 | Protein | NP_073576 | SMURF2 | E3 ubiquitin ligase SMURF2 |
| 610 | DNA | NM_012308 | FBXL11 | F-box and leucine-rich repeat |
| | | | | protein 11 |
| 611 | Protein | NP_036440 | FBXL11 | F-box and leucine-rich repeat |
| | | | | protein 11 |
| 612 | DNA | NM_014952 | KIAA0945 | KIAA0945 protein |
| 613 | Protein | NP_055767 | KIAA0945 | KIAA0945 protein |
| 614 | DNA | NM_004793 | PRSS15 | protease, serine, 15 |
| 615 | Protein | NP_004784 | PRSS15 | protease, serine, 15 |
| 616 | DNA | NM_015384 | IDN3 | IDN3 protein |
| 617 | Protein | NP_056199 | IDN3 | IDN3 protein |
| 618 | DNA | NM_133433 | IDN3 | IDN3 protein |
| 619 | Protein | NP_597677 | IDN3 | IDN3 protein |
| 620 | DNA | NM_006999 | POLS | polymerase (DNA directed) |
| | | | | sigma |
| 621 | Protein | NP_008930 | POLS | polymerase (DNA directed) |
| | | | | sigma |
| 622 | DNA | NM_005318 | | Cluster Incl. Z97630: Human |
| | | | | DNA sequence from clone |
| | | | | 466N1 on chromosome 22q12-13 |
| | | | | Contains H1F0(H1 histone |
| | | | | family, member 0) gene, 2- |
| | | | | amino-3-ketobutyrate-CoA |
| | | | | ligase(nuclear gene encoding |
| | | | | mitochondrial protein), GALR3 |
| | | | | (galanin receptor) gene, ESTs, |
| | | | | GSSs an |
| 623 | Protein | NP_005309 | | Cluster Incl. Z97630: Human |
| | | | | DNA sequence from clone |
| | | | | 466N1 on chromosome 22q12-13 |
| | | | | Contains H1F0(H1 histone |
| | | | | family, member 0) gene, 2- |
| | | | | amino-3-ketobutyrate-CoA |
| | | | | ligase(nuclear gene encoding |
| | | | | mitochondrial protein), GALR3 |
| | | | | (galanin receptor) gene, ESTs, |
| | | | | GSSs an |
| 624 | DNA | NM_000852 | GSTP1 | glutathione S-transferase pi |
| 625 | Protein | NP_000843 | GSTP1 | glutathione S-transferase pi |
| 626 | DNA | NM_015607 | DKFZP547E1010 | DKFZP547E1010 protein |
| 627 | Protein | NP_056422 | DKFZP547E1010 | DKFZP547E1010 protein |
| 628 | DNA | AL096752 | | Homo sapiens mRNA; cDNA |
| | | | | DKFZp434A012 (from clone |
| | | | | DKFZp434A012), mRNA |
| | | | | sequence |
| 629 | DNA | NM_000983 | RPL22 | ribosomal protein L22 |
| 630 | Protein | NP_000974 | RPL22 | ribosomal protein L22 |
| 631 | DNA | NM_005269 | GLI | glioma-associated oncogene |
| | | | | homolog (zinc finger protein) |
| 632 | Protein | NP_005260 | GLI | glioma-associated oncogene |
| | | | | homolog (zinc finger protein) |
| 633 | DNA | NM_000968 | RPL4 | ribosomal protein L4 |
| 634 | Protein | NP_000959 | RPL4 | ribosomal protein L4 |
| 635 | DNA | NM_000838 | GRM1 | glutamate receptor, |
| | | | | metabotropic 1 |
| 636 | Protein | NP_000829 | GRM1 | glutamate receptor, |
| | | | | metabotropic 1 |
| 637 | DNA | NM_000704 | ATP4A | ATPase, H+/K+ exchanging, |
| | | | | alpha polypeptide |
| 638 | Protein | NP_000695 | ATP4A | ATPase, H+/K+ exchanging, |
| | | | | alpha polypeptide |
| 639 | DNA | NM_006213 | PHKG1 | phosphorylase kinase, gamma 1 |
| | | | | (muscle) |
| 640 | Protein | NP_006204 | PHKG1 | phosphorylase kinase, gamma 1 |
| | | | | (muscle) |
| 641 | DNA | NM_001060 | TBXA2R | thromboxane A2 receptor |
| 642 | Protein | NP_001051 | TBXA2R | thromboxane A2 receptor |
| 643 | DNA | NM_000980 | RPL18A | ribosomal protein L18a |
| 644 | Protein | NP_000971 | RPL18A | ribosomal protein L18a |
| 645 | DNA | NM_000405 | GM2A | GM2 ganglioside activator |
| | | | | protein |
| 646 | Protein | NP_000396 | GM2A | GM2 ganglioside activator |
| | | | | protein |
| 647 | DNA | NM_000997 | RPL37 | ribosomal protein L37 |
| 648 | Protein | NP_000988 | RPL37 | ribosomal protein L37 |
| 649 | DNA | NM_003431 | ZNF124 | zinc finger protein 124 (HZF- |
| | | | | 16) |
| 650 | Protein | NP_003422 | ZNF124 | zinc finger protein 124 (HZF- |
| | | | | 16) |
| 651 | DNA | NM_005507 | CFL1 | cofilin 1 (non-muscle) |
| 652 | Protein | NP_005498 | CFL1 | cofilin 1 (non-muscle) |
| 653 | DNA | NM_021130 | PPIA | peptidylprolyl isomerase A |
| | | | | (cyclophilin A) |
| 654 | Protein | NP_066953 | PPIA | peptidylprolyl isomerase A |
| | | | | (cyclophilin A) |
| 655 | DNA | NM_000976 | RPL12 | ribosomal protein L12 |
| 656 | Protein | NP_000967 | RPL12 | ribosomal protein L12 |
| 657 | DNA | NM_000992 | RPL29 | ribosomal protein L29 |
| 658 | Protein | NP_000983 | RPL29 | ribosomal protein L29 |
| 659 | DNA | NM_000993 | RPL31 | ribosomal protein L31 |
| 660 | Protein | NP_000984 | RPL31 | ribosomal protein L31 |
| 661 | DNA | D50525 | | Cluster Incl. D50525: Human |
| | | | | mRNA for TI-227H |
| | | | | /cds = UNKNOWN/gb = D50525 |
| | | | | /gi = 1167502 /ug = Hs.184914 |
| | | | | /len = 3911 |
| 662 | DNA | NM_001355 | DDT | D-dopachrome tautomerase |
| 663 | Protein | NP_001346 | DDT | D-dopachrome tautomerase |
| 664 | DNA | NM_005834 | TIMM17B | translocase of inner |
| | | | | mitochondrial membrane 17 |
| | | | | homolog B (yeast) |
| 665 | Protein | NP_005825 | TIMM17B | translocase of inner |
| | | | | mitochondrial membrane 17 |
| | | | | homolog B (yeast) |
| 666 | DNA | NM_007294 | BRCA1 | breast cancer 1, early onset |
| 667 | Protein | NP_009225 | BRCA1 | breast cancer 1, early onset |
| 668 | DNA | NM_007295 | BRCA1 | breast cancer 1, early onset |
| 669 | DNA | NM_007296 | BRCA1 | breast cancer 1, early onset |
| 670 | DNA | NM_007297 | BRCA1 | breast cancer 1, early onset |
| 671 | Protein | NP_009228 | BRCA1 | breast cancer 1, early onset |
| 672 | DNA | NM_007298 | BRCA1 | breast cancer 1, early onset |
| 673 | Protein | NP_009229 | BRCA1 | breast cancer 1, early onset |
| 674 | DNA | NM_004805 | POLR2D | polymerase (RNA) II (DNA |
| | | | | directed) polypeptide D |
| 675 | Protein | NP_004796 | POLR2D | polymerase (RNA) II (DNA |
| | | | | directed) polypeptide D |
| 676 | DNA | NM_015487 | GEMIN4 | gem (nuclear organelle) |
| | | | | associated protein 4 |
| 677 | Protein | NP_056302 | GEMIN4 | gem (nuclear organelle) |
| | | | | associated protein 4 |
| 678 | DNA | NM_015721 | GEMIN4 | gem (nuclear organelle) |
| | | | | associated protein 4 |
| 679 | DNA | AJ006835 | RNU17D | RNA, U17D small nucleolar |
| 680 | DNA | NM_031246 | PSG2 | pregnancy specific beta-1- |
| | | | | glycoprotein 2 |
| 681 | Protein | NP_112536 | PSG2 | pregnancy specific beta-1- |
| | | | | glycoprotein 2 |
| 682 | DNA | NM_004565 | PEX14 | peroxisomal biogenesis factor |
| | | | | 14 |
| 683 | Protein | NP_004556 | PEX14 | peroxisomal biogenesis factor |
| | | | | 14 |
| 684 | DNA | NM_001228 | CASP8 | caspase 8, apoptosis-related |
| | | | | cysteine protease |
| 685 | Protein | NP_001219 | CASP8 | caspase 8, apoptosis-related |
| | | | | cysteine protease |
| 686 | DNA | NM_033355 | CASP8 | caspase 8, apoptosis-related |
| | | | | cysteine protease |
| 687 | Protein | NP_203519 | CASP8 | caspase 8, apoptosis-related |
| | | | | cysteine protease |
| 688 | DNA | NM_033356 | CASP8 | caspase 8, apoptosis-related |
| | | | | cysteine protease |
| 689 | Protein | NP_203520 | CASP8 | caspase 8, apoptosis-related |
| | | | | cysteine protease |
| 690 | DNA | NM_033357 | CASP8 | caspase 8, apoptosis-related |
| | | | | cysteine protease |
| 691 | Protein | NP_203521 | CASP8 | caspase 8, apoptosis-related |
| | | | | cysteine protease |
| 692 | DNA | NM_033358 | CASP8 | caspase 8, apoptosis-related |
| | | | | cysteine protease |
| 693 | Protein | NP_203522 | CASP8 | caspase 8, apoptosis-related |
| | | | | cysteine protease |
| 694 | DNA | NM_001061 | TBXAS1 | thromboxane A synthase 1 |
| | | | | (platelet, cytochrome P450, |
| | | | | subfamily V) |
| 695 | Protein | NP_001052 | TBXAS1 | thromboxane A synthase 1 |
| | | | | (platelet, cytochrome P450, |
| | | | | subfamily V) |
| 696 | DNA | NM_030984 | TBXAS1 | thromboxane A synthase 1 |
| | | | | (platelet, cytochrome P450, |
| | | | | subfamily V) |
| 697 | Protein | NP_112246 | TBXAS1 | thromboxane A synthase 1 |
| | | | | (platelet, cytochrome P450, |
| | | | | subfamily V) |
| 698 | DNA | NM_004901 | LYSAL1 | lysosomal apyrase-like 1 |
| 699 | Protein | NP_004892 | LYSAL1 | lysosomal apyrase-like 1 |
| 700 | DNA | X98494 | MPHOSPH10 | M-phase phosphoprotein 10 |
| | | | | (U3 small nucleolar |
| | | | | ribonucleoprotein) |
| 701 | Protein | X98494 (Translation) | MPHOSPH10 | M-phase phosphoprotein 10 |
| | | | | (U3 small nucleolar |
| | | | | ribonucleoprotein) |
| 702 | DNA | NM_017575 | C17orf31 | chromosome 17 open reading |
| | | | | frame 31 |
| 703 | Protein | NP_060045 | C17orf31 | chromosome 17 open reading |
| | | | | frame 31 |
| 704 | DNA | NM_001116 | ADCY9 | adenylate cyclase 9 |
| 705 | Protein | NP_001107 | ADCY9 | adenylate cyclase 9 |
| 706 | DNA | NM_014810 | CAP350 | centrosome-associated protein |
| | | | | 350 |
| 707 | Protein | NP_055625 | CAP350 | centrosome-associated protein |
| | | | | 350 |
| 708 | DNA | NM_005884 | PAK4 | p21(CDKN1A)-activated |
| | | | | kinase 4 |
| 709 | Protein | NP_005875 | PAK4 | p21(CDKN1A)-activated |
| | | | | kinase 4 |
| 710 | DNA | NM_000373 | UMPS | uridine monophosphate |
| | | | | synthetase (orotate |
| | | | | phosphoribosyl transferase and |
| | | | | orotidine-5′-decarboxylase) |
| 711 | Protein | NP_000364 | UMPS | uridine monophosphate |
| | | | | synthetase (orotate |
| | | | | phosphoribosyl transferase and |
| | | | | orotidine-5′-decarboxylase) |
| 712 | DNA | NM_002273 | KRT8 | keratin 8 |
| 713 | Protein | NP_002264 | KRT8 | keratin 8 |
| 714 | DNA | NM_006985 | NPIP | nuclear pore complex |
| | | | | interacting protein |
| 715 | Protein | NP_008916 | NPIP | nuclear pore complex |
| | | | | interacting protein |
| 716 | DNA | NM_004064 | CDKN1B | cyclin-dependent kinase |
| | | | | inhibitor 1B (p27, Kip1) |
| 717 | Protein | NP_004055 | CDKN1B | cyclin-dependent kinase |
| | | | | inhibitor 1B (p27, Kip1) |
| 718 | DNA | NM_020765 | RBAF600 | retinoblastoma-associated |
| | | | | factor 600 |
| 719 | Protein | NP_065816 | RBAF600 | retinoblastoma-associated |
| | | | | factor 600 |
| 720 | DNA | AI123426 | | EST |
| 721 | DNA | NM_005997 | TCFL1 | transcription factor-like 1 |
| 722 | Protein | NP_005988 | TCFL1 | transcription factor-like 1 |
| 723 | DNA | NM_005866 | SR-BP1 | type I sigma receptor |
| 724 | Protein | NP_005857 | SR-BP1 | type I sigma receptor |
| 725 | DNA | NM_147157 | SR-BP1 | type I sigma receptor |
| 726 | Protein | NP_671513 | SR-BP1 | type I sigma receptor |
| 727 | DNA | NM_147158 | SR-BP1 | type I sigma receptor |
| 728 | Protein | NP_671514 | SR-BP1 | type I sigma receptor |
| 729 | DNA | NM_147159 | SR-BP1 | type I sigma receptor |
| 730 | Protein | NP_671515 | SR-BP1 | type I sigma receptor |
| 731 | DNA | NM_147160 | SR-BP1 | type I sigma receptor |
| 732 | Protein | NP_671516 | SR-BP1 | type I sigma receptor |
| 733 | DNA | NM_004457 | FACL3 | fatty-acid-Coenzyme A ligase, |
| | | | | long-chain 3 |
| 734 | Protein | NP_004448 | FACL3 | fatty-acid-Coenzyme A ligase, |
| | | | | long-chain 3 |
| 735 | DNA | NM_005137 | DGCR2 | DiGeorge syndrome critical |
| | | | | region gene 2 |
| 736 | Protein | NP_005128 | DGCR2 | DiGeorge syndrome critical |
| | | | | region gene 2 |
| 737 | DNA | NM_014812 | KIAA0470 | KIAA0470 gene product |
| 738 | Protein | NP_055627 | KIAA0470 | KIAA0470 gene product |
| 739 | DNA | NM_001348 | DAPK3 | death-associated protein kinase 3 |
| 740 | Protein | NP_001339 | DAPK3 | death-associated protein kinase 3 |
| 741 | DNA | NM_003927 | MBD2 | methyl-CpG binding domain |
| | | | | protein 2 |
| 742 | Protein | NP_003918 | MBD2 | methyl-CpG binding domain |
| | | | | protein 2 |
| 743 | DNA | NM_015832 | MBD2 | methyl-CpG binding domain |
| | | | | protein 2 |
| 744 | Protein | NP_056647 | MBD2 | methyl-CpG binding domain |
| | | | | protein 2 |
| 745 | DNA | NM_004638 | BAT2 | HLA-B associated transcript 2 |
| 746 | Protein | NP_004629 | BAT2 | HLA-B associated transcript 2 |
| 747 | DNA | NM_080686 | BAT2 | HLA-B associated transcript 2 |
| 748 | Protein | NP_542417 | BAT2 | HLA-B associated transcript 2 |
| 749 | DNA | NM_002032 | FTH1 | ferritin, heavy polypeptide 1 |
| 750 | Protein | NP_002023 | FTH1 | ferritin, heavy polypeptide 1 |
| 751 | DNA | NM_000477 | ALB | albumin |
| 752 | Protein | NP_000468 | ALB | albumin |
| 753 | DNA | NM_021019 | MYL6 | myosin, light polypeptide 6, |
| | | | | alkali, smooth muscle and non- |
| | | | | muscle |
| 754 | Protein | NP_066299 | MYL6 | myosin, light polypeptide 6, |
| | | | | alkali, smooth muscle and non- |
| | | | | muscle |
| 755 | DNA | NM_079423 | MYL6 | myosin, light polypeptide 6, |
| | | | | alkali, smooth muscle and non- |
| | | | | muscle |
| 756 | Protein | NP_524147 | MYL6 | myosin, light polypeptide 6, |
| | | | | alkali, smooth muscle and non- |
| | | | | muscle |
| 757 | DNA | NM_079424 | MYL6 | myosin, light polypeptide 6, |
| | | | | alkali, smooth muscle and non- |
| | | | | muscle |
| 758 | Protein | NP_524148 | MYL6 | myosin, light polypeptide 6, |
| | | | | alkali, smooth muscle and non- |
| | | | | muscle |
| 759 | DNA | NM_079425 | MYL6 | myosin, light polypeptide 6, |
| | | | | alkali, smooth muscle and non- |
| | | | | muscle |
| 760 | Protein | NP_524149 | MYL6 | myosin, light polypeptide 6, |
| | | | | alkali, smooth muscle and non- |
| | | | | muscle |
| 761 | DNA | AL049449 | | Homo sapiens mRNA; cDNA |
| | | | | DKFZp586B1722 (from clone |
| | | | | DKFZp586B1722), mRNA |
| | | | | sequence |
| 762 | DNA | NM_002381 | MATN3 | matrilin 3 |
| 763 | Protein | NP_002372 | MATN3 | matrilin 3 |
| 764 | DNA | NM_000365 | TPI1 | triosephosphate isomerase 1 |
| 765 | Protein | NP_000356 | TPI1 | triosephosphate isomerase 1 |
| 766 | DNA | NM_004996 | ABCC1 | ATP-binding cassette, sub- |
| | | | | family C (CFTR/MRP), |
| | | | | member 1 |
| 767 | Protein | NP_004987 | ABCC1 | ATP-binding cassette, sub- |
| | | | | family C (CFTR/MRP), |
| | | | | member 1 |
| 768 | DNA | NM_019862 | ABCC1 | ATP-binding cassette, sub- |
| | | | | family C (CFTR/MRP), |
| | | | | member 1 |
| 769 | Protein | NP_063915 | ABCC1 | ATP-binding cassette, sub- |
| | | | | family C (CFTR/MRP), |
| | | | | member 1 |
| 770 | DNA | NM_019898 | ABCC1 | ATP-binding cassette, sub- |
| | | | | family C (CFTR/MRP), |
| | | | | member 1 |
| 771 | Protein | NP_063953 | ABCC1 | ATP-binding cassette, sub- |
| | | | | family C (CFTR/MRP), |
| | | | | member 1 |
| 772 | DNA | NM_019899 | ABCC1 | ATP-binding cassette, sub- |
| | | | | family C (CFTR/MRP), |
| | | | | member 1 |
| 773 | Protein | NP_063954 | ABCC1 | ATP-binding cassette, sub- |
| | | | | family C (CFTR/MRP), |
| | | | | member 1 |
| 774 | DNA | NM_000490 | AVP | arginine vasopressin |
| | | | | (neurophysin II, antidiuretic |
| | | | | hormone, diabetes insipidus, |
| | | | | neurohypophyseal) |
| 775 | Protein | NP_000481 | AVP | arginine vasopressin |
| | | | | (neurophysin II, antidiuretic |
| | | | | hormone, diabetes insipidus, |
| | | | | neurohypophyseal) |
| 776 | DNA | NM_000999 | RPL38 | ribosomal protein L38 |
| 777 | Protein | NP_000990 | RPL38 | ribosomal protein L38 |
| 778 | DNA | NM_002297 | LCN1 | lipocalin 1 (protein migrating |
| | | | | faster than albumin, tear |
| | | | | prealbumin) |
| 779 | Protein | NP_002288 | LCN1 | lipocalin 1 (protein migrating |
| | | | | faster than albumin, tear |
| | | | | prealbumin) |
| 780 | DNA | NM_006068 | TLR6 | toll-like receptor 6 |
| 781 | Protein | NP_006059 | TLR6 | toll-like receptor 6 |
| 782 | DNA | NM_012302 | LPHH1 | latrophilin 1 |
| 783 | Protein | NP_036434 | LPHH1 | latrophilin 1 |
| 784 | DNA | NM_005453 | ZNF297 | zinc finger protein 297 |
| 785 | Protein | NP_005444 | ZNF297 | zinc finger protein 297 |
| 786 | DNA | AB020676 | KIAA0869 | KIAA0869 protein |
| 787 | Protein | AB020676 | KIAA0869 | KIAA0869 protein |
| | | (Translation) | | |
| 788 | DNA | D83781 | NUP160 | nucleoporin 160 kDa |
| 789 | Protein | D83781 (Translation) | NUP160 | nucleoporin 160 kDa |
| 790 | DNA | NM_015229 | KIAA0664 | KIAA0664 protein |
| 791 | Protein | NP_056044 | KIAA0664 | KIAA0664 protein |
| 792 | DNA | NM_005873 | RGS19 | regulator of G-protein |
| | | | | signalling 19 |
| 793 | Protein | NP_005864 | RGS19 | regulator of G-protein |
| | | | | signalling 19 |
| 794 | DNA | NM_015608 | DKFZp586F1019 | DKFZp586F1019 protein |
| 795 | Protein | NP_056423 | DKFZp586F1019 | DKFZp586F1019 protein |
| 796 | DNA | NM_014892 | KIAA1116 | KIAA1116 protein |
| 797 | Protein | NP_055707 | KIAA1116 | KIAA1116 protein |
| 798 | DNA | NM_025176 | KIAA0980 | KIAA0980 protein |
| 799 | Protein | NP_079452 | KIAA0980 | KIAA0980 protein |
| 800 | DNA | NM_001217 | CA11 | carbonic anhydrase XI |
| 801 | Protein | NP_001208 | CA11 | carbonic anhydrase XI |
| 802 | DNA | NM_014323 | ZNF278 | zinc finger protein 278 |
| 803 | Protein | NP_055138 | ZNF278 | zinc finger protein 278 |
| 804 | DNA | NM_032050 | ZNF278 | zinc finger protein 278 |
| 805 | Protein | NP_114439 | ZNF278 | zinc finger protein 278 |
| 806 | DNA | NM_032051 | ZNF278 | zinc finger protein 278 |
| 807 | Protein | NP_114440 | ZNF278 | zinc finger protein 278 |
| 808 | DNA | NM_032052 | ZNF278 | zinc finger protein 278 |
| 809 | Protein | NP_114441 | ZNF278 | zinc finger protein 278 |
| 810 | DNA | NM_006196 | PCBP1 | poly(rC) binding protein 1 |
| 811 | Protein | NP_006187 | PCBP1 | poly(rC) binding protein 1 |
| 812 | DNA | NM_021038 | MBNL | muscleblind-like (Drosophila) |
| 813 | Protein | NP_066368 | MBNL | muscleblind-like (Drosophila) |
| 814 | DNA | NM_000485 | APRT | adenine |
| | | | | phosphoribosyltransferase |
| 815 | Protein | NP_000476 | APRT | adenine |
| | | | | phosphoribosyltransferase |
| 816 | DNA | AI040324 | | ESTs, Weakly similar to |
| | | | | A56429 I-kappa-B-related |
| | | | | protein - human [H. sapiens] |
| 817 | DNA | NM_006796 | AFG3L2 | AFG3 ATPase family gene 3- |
| | | | | like 2 (yeast) |
| 818 | Protein | NP_006787 | AFG3L2 | AFG3 ATPase family gene 3- |
| | | | | like 2 (yeast) |
| 819 | DNA | NM_014876 | KIAA0063 | KIAA0063 gene product |
| 820 | Protein | NP_055691 | KIAA0063 | KIAA0063 gene product |
| 821 | DNA | NM_007358 | M96 | likely ortholog of mouse metal |
| | | | | response element binding |
| | | | | transcription factor 2 |
| 822 | Protein | NP_031384 | M96 | likely ortholog of mouse metal |
| | | | | response element binding |
| | | | | transcription factor 2 |
| 823 | DNA | NM_002956 | RSN | restin (Reed-Steinberg cell- |
| | | | | expressed intermediate |
| | | | | filament-associated protein) |
| 824 | Protein | NP_002947 | RSN | restin (Reed-Steinberg cell- |
| | | | | expressed intermediate |
| | | | | filament-associated protein) |
| 825 | DNA | NM_000281 | PCBD | 6-pyruvoyl-tetrahydropterin |
| | | | | synthase/dimerization cofactor |
| | | | | of hepatocyte nuclear factor 1 |
| | | | | alpha (TCF1) |
| 826 | Protein | NP_000272 | PCBD | 6-pyruvoyl-tetrahydropterin |
| | | | | synthase/dimerization cofactor |
| | | | | of hepatocyte nuclear factor 1 |
| | | | | alpha (TCF1) |
| 827 | DNA | NM_015200 | KIAA0648 | KIAA0648 protein |
| 828 | Protein | NP_056015 | KIAA0648 | KIAA0648 protein |
| 829 | DNA | NM_004992 | MECP2 | methyl CpG binding protein 2 |
| | | | | (Rett syndrome) |
| 830 | Protein | NP_004983 | MECP2 | methyl CpG binding protein 2 |
| | | | | (Rett syndrome) |
| 831 | DNA | NM_021134 | MRPL23 | mitochondrial ribosomal |
| | | | | protein L23 |
| 832 | Protein | NP_066957 | MRPL23 | mitochondrial ribosomal |
| | | | | protein L23 |
| 833 | DNA | NM_005134 | PPP4R1 | protein phosphatase 4, |
| | | | | regulatory subunit 1 |
| 834 | Protein | NP_005125 | PPP4R1 | protein phosphatase 4, |
| | | | | regulatory subunit 1 |
| 835 | DNA | NM_001122 | ADFP | adipose differentiation-related |
| | | | | protein |
| 836 | Protein | NP_001113 | ADFP | adipose differentiation-related |
| | | | | protein |
| 837 | DNA | NM_003368 | USP1 | ubiquitin specific protease 1 |
| 838 | Protein | NP_003359 | USP1 | ubiquitin specific protease 1 |
| 839 | DNA | NM_003925 | MBD4 | methyl-CpG binding domain |
| | | | | protein 4 |
| 840 | Protein | NP_003916 | MBD4 | methyl-CpG binding domain |
| | | | | protein 4 |
| 841 | DNA | NM_015339 | ADNP | activity-dependent |
| | | | | neuroprotector |
| 842 | Protein | NP_056154 | ADNP | activity-dependent |
| | | | | neuroprotector |
| 843 | DNA | NM_015338 | KIAA0978 | KIAA0978 protein |
| 844 | Protein | NP_056153 | KIAA0978 | KIAA0978 protein |
| 845 | DNA | NM_006107 | OA48-18 | acid-inducible phosphoprotein |
| 846 | Protein | NP_006098 | OA48-18 | acid-inducible phosphoprotein |
| 847 | DNA | NM_014402 | QP-C | low molecular mass |
| | | | | ubiquinone-binding protein |
| | | | | (9.5 kD) |
| 848 | Protein | NP_055217 | QP-C | low molecular mass |
| | | | | ubiquinone-binding protein |
| | | | | (9.5 kD) |
| 849 | DNA | NM_005928 | MFGE8 | milk fat globule-EGF factor 8 |
| | | | | protein |
| 850 | Protein | NP_005919 | MFGE8 | milk fat globule-EGF factor 8 |
| | | | | protein |
| 851 | DNA | NM_003356 | UCP3 | uncoupling protein 3 |
| | | | | (mitochondrial, proton carrier) |
| 852 | Protein | NP_003347 | UCP3 | uncoupling protein 3 |
| | | | | (mitochondrial, proton carrier) |
| 853 | DNA | NM_022803 | UCP3 | uncoupling protein 3 |
| | | | | (mitochondrial, proton carrier) |
| 854 | Protein | NP_073714 | UCP3 | uncoupling protein 3 |
| | | | | (mitochondrial, proton carrier) |
| 855 | DNA | R61362 | | Unknown protein [Homo |
| | | | | sapiens], mRNA sequence |
| 856 | DNA | NM_003176 | SYCP1 | synaptonemal complex protein 1 |
| 857 | Protein | NP_003167 | SYCP1 | synaptonemal complex protein 1 |
| 858 | DNA | NM_005680 | TAF1B | TATA box binding protein |
| | | | | (TBP)-associated factor, RNA |
| | | | | polymerase I, B, 63 kDa |
| 859 | Protein | NP_005671 | TAF1B | TATA box binding protein |
| | | | | (TBP)-associated factor, RNA |
| | | | | polymerase I, B, 63 kDa |
| 860 | DNA | NM_030928 | CDT1 | DNA replication factor |
| 861 | Protein | NP_112190 | CDT1 | DNA replication factor |
| 862 | DNA | AF052108 | | Homo sapiens clone 23687 |
| | | | | mRNA sequence |
| 863 | DNA | NM_021012 | KCNJ12 | potassium inwardly-rectifying |
| | | | | channel, subfamily J, member |
| | | | | 12 |
| 864 | Protein | NP_066292 | KCNJ12 | potassium inwardly-rectifying |
| | | | | channel, subfamily J, member |
| | | | | 12 |
| 865 | DNA | NM_014875 | KIF14 | kinesin family member 14 |
| 866 | Protein | NP_055690 | KIF14 | kinesin family member 14 |
| 867 | DNA | NM_002954 | RPS27A | ribosomal protein S27a |
| 868 | Protein | NP_002945 | RPS27A | ribosomal protein S27a |
| 869 | DNA | NM_001021 | RPS17 | ribosomal protein S17 |
| 870 | Protein | NP_001012 | RPS17 | ribosomal protein S17 |
| 871 | DNA | NM_004983 | KCNJ9 | potassium inwardly-rectifying |
| | | | | channel, subfamily J, member 9 |
| 872 | Protein | NP_004974 | KCNJ9 | potassium inwardly-rectifying |
| | | | | channel, subfamily J, member 9 |
| 873 | DNA | NM_001926 | DEFA6 | defensin, alpha 6, Paneth cell- |
| | | | | specific |
| 874 | Protein | NP_001917 | DEFA6 | defensin, alpha 6, Paneth cell- |
| | | | | specific |
| 875 | DNA | NM_001005 | RPS3 | ribosomal protein S3 |
| 876 | Protein | NP_000996 | RPS3 | ribosomal protein S3 |
| 877 | DNA | NM_001011 | RPS7 | ribosomal protein S7 |
| 878 | Protein | NP_001002 | RPS7 | ribosomal protein S7 |
| 879 | DNA | NM_004396 | DDX5 | DEAD/H (Asp-Glu-Ala- |
| | | | | Asp/His) box polypeptide 5 |
| | | | | (RNA helicase, 68 kDa) |
| 880 | Protein | NP_004387 | DDX5 | DEAD/H (Asp-Glu-Ala- |
| | | | | Asp/His) box polypeptide 5 |
| | | | | (RNA helicase, 68 kDa) |
| 881 | DNA | NM_145809 | LOC220594 | TL132 protein |
| 882 | Protein | NP_665808 | LOC220594 | TL132 protein |
| 883 | DNA | NM_005718 | ARPC4 | actin related protein 2/3 |
| | | | | complex, subunit 4, 20 kDa |
| 884 | Protein | NP_005709 | ARPC4 | actin related protein 2/3 |
| | | | | complex, subunit 4, 20 kDa |
| 885 | DNA | NM_002336 | LRP6 | low density lipoprotein |
| | | | | receptor-related protein 6 |
| 886 | Protein | NP_002327 | LRP6 | low density lipoprotein |
| | | | | receptor-related protein 6 |
| 887 | DNA | NM_012120 | CD2AP | CD2-associated protein |
| 888 | Protein | NP_036252 | CD2AP | CD2-associated protein |
| 889 | DNA | AB011090 | MGA | MAX gene associated |
| 890 | Protein | AB011090 | MGA | MAX gene associated |
| | | (Translation) | | |
| 891 | DNA | NM_000875 | IGF1R | insulin-like growth factor 1 |
| | | | | receptor |
| 892 | Protein | NP_000866 | IGF1R | insulin-like growth factor 1 |
| | | | | receptor |
| 893 | DNA | U44385 | | Cluster Incl. U44385: Human |
| | | | | tissue inhibitor of |
| | | | | metalloproteinases-2 (TIMP-2) |
| | | | | gene /cds = (302.958) |
| | | | | /gb = U44385 /gi = 1517892 |
| | | | | /ug = Hs.239409 /len = 1069 |
| 894 | Protein | U44385 (Translation) | | Cluster Incl. U44385: Human |
| | | | | tissue inhibitor of |
| | | | | metalloproteinases-2 (TIMP-2) |
| | | | | gene /cds = (302.958) |
| | | | | /gb = U44385 /gi = 1517892 |
| | | | | /ug = Hs.239409 /len = 1069 |
| 895 | DNA | NM_004491 | GRLF1 | glucocorticoid receptor DNA |
| | | | | binding factor 1 |
| 896 | Protein | NP_004482 | GRLF1 | glucocorticoid receptor DNA |
| | | | | binding factor 1 |
| 897 | DNA | NM_024342 | GRLF1 | glucocorticoid receptor DNA |
| | | | | binding factor 1 |
| 898 | Protein | NP_077318 | GRLF1 | glucocorticoid receptor DNA |
| | | | | binding factor 1 |
| 899 | DNA | NM_017737 | FLJ20275 | hypothetical protein FLJ20275 |
| 900 | Protein | NP_060207 | FLJ20275 | hypothetical protein FLJ20275 |
| 901 | DNA | NM_005484 | ADPRTL2 | ADP-ribosyltransferase |
| | | | | (NAD+; poly(ADP-ribose) |
| | | | | polymerase)-like 2 |
| 902 | Protein | NP_005475 | ADPRTL2 | ADP-ribosyltransferase |
| | | | | (NAD+; poly(ADP-ribose) |
| | | | | polymerase)-like 2 |
| 903 | DNA | NM_005445 | CSPG6 | chondroitin sulfate |
| | | | | proteoglycan 6 (bamacan) |
| 904 | Protein | NP_005436 | CSPG6 | chondroitin sulfate |
| | | | | proteoglycan 6 (bamacan) |
| 905 | DNA | NM_012121 | CDC42EP4 | CDC42 effector protein (Rho |
| | | | | GTPase binding) 4 |
| 906 | Protein | NP_036253 | CDC42EP4 | CDC42 effector protein (Rho |
| | | | | GTPase binding) 4 |
| 907 | DNA | AB028948 | KIAA1025 | KIAA1025 protein |
| 908 | Protein | AB028948 | KIAA1025 | KIAA1025 protein |
| | | (Translation) | | |
| 909 | DNA | NM_018433 | TSGA | zinc finger protein |
| 910 | Protein | NP_060903 | TSGA | zinc finger protein |
| 911 | DNA | D14678 | KNSL2 | kinesin-like 2 |
| 912 | Protein | D14678 (Translation) | KNSL2 | kinesin-like 2 |
| 913 | DNA | AF022789 | USP12 | ubiquitin specific protease 12 |
| 914 | Protein | AF022789 | USP12 | ubiquitin specific protease 12 |
| | | (Translation) | | |
| 915 | DNA | NM_018155 | FLJ10618 | hypothetical protein FLJ10618 |
| 916 | Protein | NP_060625 | FLJ10618 | hypothetical protein FLJ10618 |
| 917 | DNA | AB023216 | | KIAA0999 protein [Homo |
| | | | | sapiens], mRNA sequence |
| 918 | Protein | AB023216 | | KIAA0999 protein [Homo |
| | | (Translation) | | sapiens], mRNA sequence |
| 919 | DNA | NM_004454 | ETV5 | ets variant gene 5 (ets-related |
| | | | | molecule) |
| 920 | Protein | NP_004445 | ETV5 | ets variant gene 5 (ets-related |
| | | | | molecule) |
| 921 | DNA | NM_016614 | TTRAP | TRAF and TNF receptor- |
| | | | | associated protein |
| 922 | Protein | NP_057698 | TTRAP | TRAF and TNF receptor- |
| | | | | associated protein |
| 923 | DNA | AB002374 | KIAA0376 | KIAA0376 protein |
| 924 | Protein | AB002374 | KIAA0376 | KIAA0376 protein |
| | | (Translation) | | |
| 925 | DNA | NM_014889 | PITRM1 | pitrilysin metalloproteinase 1 |
| 926 | Protein | NP_055704 | PITRM1 | pitrilysin metalloproteinase 1 |
| 927 | DNA | NM_014968 | PITRM1 | pitrilysin metalloproteinase 1 |
| 928 | Protein | NP_055783 | PITRM1 | pitrilysin metalloproteinase 1 |
| 929 | DNA | NM_014643 | KIAA0222 | KIAA0222 gene product |
| 930 | Protein | NP_055458 | KIAA0222 | KIAA0222 gene product |
| 931 | DNA | NM_003158 | STK6 | serine/threonine kinase 6 |
| 932 | Protein | NP_003149 | STK6 | serine/threonine kinase 6 |
| 933 | DNA | NM_003600 | STK6 | serine/threonine kinase 6 |
| 934 | Protein | NP_003591 | STK6 | serine/threonine kinase 6 |
| 935 | DNA | NM_006392 | NOL5A | nucleolar protein 5A (56 kDa |
| | | | | with KKE/D repeat) |
| 936 | Protein | NP_006383 | NOL5A | nucleolar protein 5A (56 kDa |
| | | | | with KKE/D repeat) |
| 937 | DNA | NM_021074 | NDUFV2 | NADH dehydrogenase |
| | | | | (ubiquinone) flavoprotein 2, |
| | | | | 24 kDa |
| 938 | Protein | NP_066552 | NDUFV2 | NADH dehydrogenase |
| | | | | (ubiquinone) flavoprotein 2, |
| | | | | 24 kDa |
| 939 | DNA | U51704 | KIAA1971 | similar to junction-mediating |
| | | | | and regulatory protein p300 |
| | | | | JMY |
| 940 | DNA | AI655458 | OPLAH | 5-oxoprolinase (ATP- |
| | | | | hydrolysing) |
| 941 | DNA | NM_002136 | HNRPA1 | heterogeneous nuclear |
| | | | | ribonucleoprotein A1 |
| 942 | Protein | NP_002127 | HNRPA1 | heterogeneous nuclear |
| | | | | ribonucleoprotein A1 |
| 943 | DNA | NM_031157 | HNRPA1 | heterogeneous nuclear |
| | | | | ribonucleoprotein A1 |
| 944 | Protein | NP_112420 | HNRPA1 | heterogeneous nuclear |
| | | | | ribonucleoprotein A1 |
| 945 | DNA | NM_000337 | SGCD | sarcoglycan, delta (35 kDa |
| | | | | dystrophin-associated |
| | | | | glycoprotein) |
| 946 | Protein | NP_000328 | SGCD | sarcoglycan, delta (35 kDa |
| | | | | dystrophin-associated |
| | | | | glycoprotein) |
| 947 | DNA | NM_172244 | SGCD | sarcoglycan, delta (35 kDa |
| | | | | dystrophin-associated |
| | | | | glycoprotein) |
| 948 | Protein | NP_758447 | SGCD | sarcoglycan, delta (35 kDa |
| | | | | dystrophin-associated |
| | | | | glycoprotein) |
| 949 | DNA | NM_004876 | ZNF254 | zinc finger protein 254 |
| 950 | Protein | NP_004867 | ZNF254 | zinc finger protein 254 |
| 951 | DNA | D87466 | KIAA0276 | KIAA0276 protein |
| 952 | Protein | D87466 (Translation) | KIAA0276 | KIAA0276 protein |
| 953 | DNA | NM_000828 | GRIA3 | glutamate receptor, ionotrophic, |
| | | | | AMPA 3 |
| 954 | Protein | NP_000819 | GRIA3 | glutamate receptor, ionotrophic, |
| | | | | AMPA 3 |
| 955 | DNA | NM_007325 | GRIA3 | glutamate receptor, ionotrophic, |
| | | | | AMPA 3 |
| 956 | Protein | NP_015564 | GRIA3 | glutamate receptor, ionotrophic, |
| | | | | AMPA 3 |
| 957 | DNA | NM_001207 | BTF3 | basic transcription factor 3 |
| 958 | Protein | NP_001198 | BTF3 | basic transcription factor 3 |
| 959 | DNA | NM_152260 | C18B11 | C18B11 homolog (44.9 kD) |
| 960 | Protein | NP_689473 | C18B11 | C18B11 homolog (44.9 kD) |
| 961 | DNA | NM_000146 | FTL | ferritin, light polypeptide |
| 962 | Protein | NP_000137 | FTL | ferritin, light polypeptide |
| 963 | DNA | W27417 | HSMPP8 | M-phase phosphoprotein, mpp8 |
| 964 | DNA | NM_012423 | RPL13A | ribosomal protein L13a |
| 965 | Protein | NP_036555 | RPL13A | ribosomal protein L13a |
| 966 | DNA | NM_005858 | AKAP8 | A kinase (PRKA) anchor |
| | | | | protein 8 |
| 967 | Protein | NP_005849 | AKAP8 | A kinase (PRKA) anchor |
| | | | | protein 8 |
| 968 | DNA | R59697 | | Homo sapiens mRNA |
| | | | | fragment, mRNA sequence |
| 969 | DNA | NM_002485 | NBS1 | Nijmegen breakage syndrome 1 |
| | | | | (nibrin) |
| 970 | Protein | NP_002476 | NBS1 | Nijmegen breakage syndrome 1 |
| | | | | (nibrin) |
| 971 | DNA | NM_003893 | LDB1 | LIM domain binding 1 |
| 972 | Protein | NP_003884 | LDB1 | LIM domain binding 1 |
| 973 | DNA | NM_014947 | KIAA1041 | KIAA1041 protein |
| 974 | Protein | NP_055762 | KIAA1041 | KIAA1041 protein |
| 975 | DNA | NM_006052 | DSCR3 | Down syndrome critical region |
| | | | | gene 3 |
| 976 | Protein | NP_006043 | DSCR3 | Down syndrome critical region |
| | | | | gene 3 |
| 977 | DNA | NM_138350 | LOC90326 | Homo sapiens hypothetical |
| | | | | protein MGC33488 |
| 978 | Protein | NP_612359 | LOC90326 | Homo sapiens hypothetical |
| | | | | protein MGC33488 |
| 979 | DNA | NM_012330 | MORF | monocytic leukemia zinc finger |
| | | | | protein-related factor |
| 980 | Protein | NP_036462 | MORF | monocytic leukemia zinc finger |
| | | | | protein-related factor |
| 981 | DNA | NM_007218 | TRC8 | patched related protein |
| | | | | translocated in renal cancer |
| 982 | Protein | NP_009149 | TRC8 | patched related protein |
| | | | | translocated in renal cancer |
| 983 | DNA | NM_003135 | SRP19 | signal recognition particle |
| | | | | 19 kDa |
| 984 | Protein | NP_003126 | SRP19 | signal recognition particle |
| | | | | 19 kDa |
| 985 | DNA | AA535884 | PCTK3 | PCTAIRE protein kinase 3 |
| 986 | DNA | NM_004860 | FXR2 | fragile X mental retardation, |
| | | | | autosomal homolog 2 |
| 987 | Protein | NP_004851 | FXR2 | fragile X mental retardation, |
| | | | | autosomal homolog 2 |
| 988 | DNA | NM_006698 | BLCAP | bladder cancer associated |
| | | | | protein |
| 989 | Protein | NP_006689 | BLCAP | bladder cancer associated |
| | | | | protein |
| 990 | DNA | NM_022826 | AXOT | axotrophin |
| 991 | Protein | NP_073737 | AXOT | axotrophin |
| 992 | DNA | NM_004597 | SNRPD2 | small nuclear ribonucleoprotein |
| | | | | D2 polypeptide 16.5 kDa |
| 993 | Protein | NP_004588 | SNRPD2 | small nuclear ribonucleoprotein |
| | | | | D2 polypeptide 16.5 kDa |
| 994 | DNA | NM_001032 | | Cluster Incl. |
| | | | | AI541542: libtest16.A02.r |
| | | | | Homo sapiens cDNA, 5′ end |
| | | | | /clone_end = 5′ /gb = AI541542 |
| | | | | /gi = 4458915 /ug = Hs.539 |
| | | | | /len = 639 |
| 995 | Protein | NP_001023 | | Cluster Incl. |
| | | | | AI541542: libtest16.A02.r |
| | | | | Homo sapiens cDNA, 5′ end |
| | | | | /clone_end = 5′ /gb = AI541542 |
| | | | | /gi = 4458915 /ug = Hs.539 |
| | | | | /len = 639 |
| 996 | DNA | NM_004356 | CD81 | CD81 antigen (target of |
| | | | | antiproliferative antibody 1) |
| 997 | Protein | NP_004347 | CD81 | CD81 antigen (target of |
| | | | | antiproliferative antibody 1) |
| 998 | DNA | NM_152758 | FLJ31657 | hypothetical protein FLJ31657 |
| 999 | Protein | NP_689971 | FLJ31657 | hypothetical protein FLJ31657 |
| 1000 | DNA | NM_012399 | PITPNB | phosphotidylinositol transfer |
| | | | | protein, beta |
| 1001 | Protein | NP_036531 | PITPNB | phosphotidylinositol transfer |
| | | | | protein, beta |
| 1002 | DNA | AL049941 | | Homo sapiens mRNA; cDNA |
| | | | | DKFZp564E2222 (from clone |
| | | | | DKFZp564E2222), mRNA |
| | | | | sequence |
| 1003 | DNA | NM_006362 | NXF1 | nuclear RNA export factor 1 |
| 1004 | Protein | NP_006353 | NXF1 | nuclear RNA export factor 1 |
| 1005 | DNA | NM_001358 | DDX15 | DEAD/H (Asp-Glu-Ala- |
| | | | | Asp/His) box polypeptide 15 |
| 1006 | Protein | NP_001349 | DDX15 | DEAD/H (Asp-Glu-Ala- |
| | | | | Asp/His) box polypeptide 15 |
| 1007 | DNA | NM_006570 | RAGA | Ras-related GTP-binding |
| | | | | protein |
| 1008 | Protein | NP_006561 | RAGA | Ras-related GTP-binding |
| | | | | protein |
| 1009 | DNA | NM_006565 | CTCF | CCCTC-binding factor (zinc |
| | | | | finger protein) |
| 1010 | Protein | NP_006556 | CTCF | CCCTC-binding factor (zinc |
| | | | | finger protein) |
| 1011 | DNA | NM_006852 | TLK2 | tousled-like kinase 2 |
| 1012 | Protein | NP_006843 | TLK2 | tousled-like kinase 2 |
| 1013 | DNA | NM_012289 | KEAP1 | Kelch-like ECH-associated |
| | | | | protein 1 |
| 1014 | Protein | NP_036421 | KEAP1 | Kelch-like ECH-associated |
| | | | | protein 1 |
| 1015 | DNA | NM_016322 | RAB14 | RAB14, member RAS |
| | | | | oncogene family |
| 1016 | Protein | NP_057406 | RAB14 | RAB14, member RAS |
| | | | | oncogene family |
| 1017 | DNA | NM_003756 | EIF3S3 | eukaryotic translation initiation |
| | | | | factor 3, subunit 3 gamma, |
| | | | | 40 kDa |
| 1018 | Protein | NP_003747 | EIF3S3 | eukaryotic translation initiation |
| | | | | factor 3, subunit 3 gamma, |
| | | | | 40 kDa |
| 1019 | DNA | NM_002569 | FURIN | furin (paired basic amino acid |
| | | | | cleaving enzyme) |
| 1020 | Protein | NP_002560 | FURIN | furin (paired basic amino acid |
| | | | | cleaving enzyme) |
| 1021 | DNA | NM_014862 | ARNT2 | aryl-hydrocarbon receptor |
| | | | | nuclear translocator 2 |
| 1022 | Protein | NP_055677 | ARNT2 | aryl-hydrocarbon receptor |
| | | | | nuclear translocator 2 |
| 1023 | DNA | NM_014966 | DDX30 | DEAD/H (Asp-Glu-Ala- |
| | | | | Asp/His) box polypeptide 30 |
| 1024 | Protein | NP_055781 | DDX30 | DEAD/H (Asp-Glu-Ala- |
| | | | | Asp/His) box polypeptide 30 |
| 1025 | DNA | NM_138614 | DDX30 | DEAD/H (Asp-Glu-Ala- |
| | | | | Asp/His) box polypeptide 30 |
| 1026 | Protein | NP_619519 | DDX30 | DEAD/H (Asp-Glu-Ala- |
| | | | | Asp/His) box polypeptide 30 |
| 1027 | DNA | NM_138615 | DDX30 | DEAD/H (Asp-Glu-Ala- |
| | | | | Asp/His) box polypeptide 30 |
| 1028 | Protein | NP_619520 | DDX30 | DEAD/H (Asp-Glu-Ala- |
| | | | | Asp/His) box polypeptide 30 |
| 1029 | DNA | NM_152301 | MGC9651 | hypothetical protein MGC9651 |
| 1030 | Protein | NP_689514 | MGC9651 | hypothetical protein MGC9651 |
| 1031 | DNA | NM_015317 | PUM2 | pumilio homolog 2 |
| | | | | (Drosophila) |
| 1032 | Protein | NP_056132 | PUM2 | pumilio homolog 2 |
| | | | | (Drosophila) |
| 1033 | DNA | NM_003457 | ZNF207 | zinc finger protein 207 |
| 1034 | Protein | NP_003448 | ZNF207 | zinc finger protein 207 |
| 1035 | DNA | M61906 | PIK3R1 | phosphoinositide-3-kinase, |
| | | | | regulatory subunit, polypeptide |
| | | | | 1 (p85 alpha) |
| 1036 | DNA | NM_015649 | DKFZP434M154 | DKFZP434M154 protein |
| 1037 | Protein | NP_056464 | DKFZP434M154 | DKFZP434M154 protein |
| 1038 | DNA | NM_004194 | ADAM22 | a disintegrin and |
| | | | | metalloproteinase domain 22 |
| 1039 | Protein | NP_004185 | ADAM22 | a disintegrin and |
| | | | | metalloproteinase domain 22 |
| 1040 | DNA | NM_016351 | ADAM22 | a disintegrin and |
| | | | | metalloproteinase domain 22 |
| 1041 | Protein | NP_057435 | ADAM22 | a disintegrin and |
| | | | | metalloproteinase domain 22 |
| 1042 | DNA | NM_021721 | ADAM22 | a disintegrin and |
| | | | | metalloproteinase domain 22 |
| 1043 | Protein | NP_068367 | ADAM22 | a disintegrin and |
| | | | | metalloproteinase domain 22 |
| 1044 | DNA | NM_005466 | MED6 | mediator of RNA polymerase II |
| | | | | transcription, subunit 6 |
| | | | | homolog (yeast) |
| 1045 | Protein | NP_005457 | MED6 | mediator of RNA polymerase II |
| | | | | transcription, subunit 6 |
| | | | | homolog (yeast) |
| 1046 | DNA | NM_004486 | GOLGA2 | golgi autoantigen, golgin |
| | | | | subfamily a, 2 |
| 1047 | Protein | NP_004477 | GOLGA2 | golgi autoantigen, golgin |
| | | | | subfamily a, 2 |
| 1048 | DNA | NM_021047 | ZNF253 | zinc finger protein 253 |
| 1049 | Protein | NP_066385 | ZNF253 | zinc finger protein 253 |
| 1050 | DNA | NM_017523 | HSXIAPAF1 | XIAP associated factor-1 |
| 1051 | Protein | NP_059993 | HSXIAPAF1 | XIAP associated factor-1 |
| 1052 | DNA | NM_014010 | ASTN2 | astrotactin 2 |
| 1053 | Protein | NP_054729 | ASTN2 | astrotactin 2 |
| 1054 | DNA | NM_006114 | TOMM40 | translocase of outer |
| | | | | mitochondrial membrane 40 |
| | | | | homolog (yeast) |
| 1055 | Protein | NP_006105 | TOMM40 | translocase of outer |
| | | | | mitochondrial membrane 40 |
| | | | | homolog (yeast) |
| 1056 | DNA | NM_006556 | PMVK | phosphomevalonate kinase |
| 1057 | Protein | NP_006547 | PMVK | phosphomevalonate kinase |
| 1058 | DNA | NM_020831 | MKL1 | megakaryoblastic leukemia |
| | | | | (translocation) 1 |
| 1059 | Protein | NP_065882 | MKL1 | megakaryoblastic leukemia |
| | | | | (translocation) 1 |
| 1060 | DNA | NM_003172 | SURF1 | surfeit 1 |
| 1061 | Protein | NP_003163 | SURF1 | surfeit 1 |
| 1062 | DNA | NM_005922 | MAP3K4 | mitogen-activated protein |
| | | | | kinase kinase kinase 4 |
| 1063 | Protein | NP_005913 | MAP3K4 | mitogen-activated protein |
| | | | | kinase kinase kinase 4 |
| 1064 | DNA | NM_006724 | MAP3K4 | mitogen-activated protein |
| | | | | kinase kinase kinase 4 |
| 1065 | Protein | NP_006715 | MAP3K4 | mitogen-activated protein |
| | | | | kinase kinase kinase 4 |
| 1066 | DNA | NM_015446 | ELYS | ELYS transcription factor-like |
| | | | | protein TMBS62 |
| 1067 | Protein | NP_056261 | ELYS | ELYS transcription factor-like |
| | | | | protein TMBS62 |
| 1068 | DNA | NM_002589 | PCDH7 | BH-protocadherin (brain-heart) |
| 1069 | Protein | NP_002580 | PCDH7 | BH-protocadherin (brain-heart) |
| 1070 | DNA | NM_032456 | PCDH7 | BH-protocadherin (brain-heart) |
| 1071 | Protein | NP_115832 | PCDH7 | BH-protocadherin (brain-heart) |
| 1072 | DNA | NM_032457 | PCDH7 | BH-protocadherin (brain-heart) |
| 1073 | Protein | NP_115833 | PCDH7 | BH-protocadherin (brain-heart) |
| 1074 | DNA | NM_020119 | ZAP | zinc finger antiviral protein |
| 1075 | Protein | NP_064504 | ZAP | zinc finger antiviral protein |
| 1076 | DNA | NM_024625 | ZAP | zinc finger antiviral protein |
| 1077 | Protein | NP_078901 | ZAP | zinc finger antiviral protein |
| 1078 | DNA | NM_001211 | BUB1B | BUB1 budding uninhibited by |
| | | | | benzimidazoles 1 homolog beta |
| | | | | (yeast) |
| 1079 | Protein | NP_001202 | BUB1B | BUB1 budding uninhibited by |
| | | | | benzimidazoles 1 homolog beta |
| | | | | (yeast) |
| 1080 | DNA | NM_014042 | DKFZP564M082 | DKFZP564M082 protein |
| 1081 | Protein | NP_054761 | DKFZP564M082 | DKFZP564M082 protein |
| 1082 | DNA | AB011178 | SCOP | SCN Circadian Oscillatory |
| | | | | Protein (SCOP) |
| 1083 | Protein | AB011178 | SCOP | SCN Circadian Oscillatory |
| | | (Translation) | | Protein (SCOP) |
| 1084 | DNA | NM_015542 | RENT2 | regulator of nonsense |
| | | | | transcripts 2 |
| 1085 | Protein | NP_056357 | RENT2 | regulator of nonsense |
| | | | | transcripts 2 |
| 1086 | DNA | NM_080599 | RENT2 | regulator of nonsense |
| | | | | transcripts 2 |
| 1087 | DNA | NM_005722 | ACTR2 | ARP2 actin-related protein 2 |
| | | | | homolog (yeast) |
| 1088 | Protein | NP_005713 | ACTR2 | ARP2 actin-related protein 2 |
| | | | | homolog (yeast) |
| 1089 | DNA | NM_021090 | MTMR3 | myotubularin related protein 3 |
| 1090 | Protein | NP_066576 | MTMR3 | myotubularin related protein 3 |
| 1091 | DNA | NM_153050 | MTMR3 | myotubularin related protein 3 |
| 1092 | Protein | NP_694690 | MTMR3 | myotubularin related protein 3 |
| 1093 | DNA | NM_153051 | MTMR3 | myotubularin related protein 3 |
| 1094 | Protein | NP_694691 | MTMR3 | myotubularin related protein 3 |
| 1095 | DNA | NM_003559 | PIP5K2B | phosphatidylinositol-4- |
| | | | | phosphate 5-kinase, type II, |
| | | | | beta |
| 1096 | Protein | NP_003550 | PIP5K2B | phosphatidylinositol-4- |
| | | | | phosphate 5-kinase, type II, |
| | | | | beta |
| 1097 | DNA | NM_138687 | PIP5K2B | phosphatidylinositol-4- |
| | | | | phosphate 5-kinase, type II, |
| | | | | beta |
| 1098 | Protein | NP_619632 | PIP5K2B | phosphatidylinositol-4- |
| | | | | phosphate 5-kinase, type II, |
| | | | | beta |
| 1099 | DNA | NM_006356 | ATP5H | ATP synthase, H+ transporting, |
| | | | | mitochondrial F0 complex, |
| | | | | subunit d |
| 1100 | Protein | NP_006347 | ATP5H | ATP synthase, H+ transporting, |
| | | | | mitochondrial F0 complex, |
| | | | | subunit d |
| 1101 | DNA | NM_015176 | KIAA0483 | KIAA0483 protein |
| 1102 | Protein | NP_055991 | KIAA0483 | KIAA0483 protein |
| 1103 | DNA | NM_003611 | OFD1 | oral-facial-digital syndrome 1 |
| 1104 | Protein | NP_003602 | OFD1 | oral-facial-digital syndrome 1 |
| 1105 | DNA | NM_002938 | RNF4 | ring finger protein 4 |
| 1106 | Protein | NP_002929 | RNF4 | ring finger protein 4 |
| 1107 | DNA | NM_015310 | EFA6R | ADP-ribosylation factor |
| | | | | guanine nucleotide factor 6 |
| 1108 | Protein | NP_056125 | EFA6R | ADP-ribosylation factor |
| | | | | guanine nucleotide factor 6 |
| 1109 | DNA | NM_015530 | GORASP2 | golgi reassembly stacking |
| | | | | protein 2, 55 kDa |
| 1110 | Protein | NP_056345 | GORASP2 | golgi reassembly stacking |
| | | | | protein 2, 55 kDa |
| 1111 | DNA | NM_006275 | Homo sapiens | Homo sapiens mRNA; cDNA |
| | | | splicing factor, | DKFZp564J223 (from clone |
| | | | arginine/serine- | DKFZp564J223), mRNA |
| | | | rich 6 | sequence |
| | | | (SFRS6), | |
| | | | mRNA | |
| 1112 | Protein | NP_006266 | Homo sapiens | Homo sapiens mRNA; cDNA |
| | | | splicing factor, | DKFZp564J223 (from clone |
| | | | arginine/serine- | DKFZp564J223), mRNA |
| | | | rich 6 | sequence |
| | | | (SFRS6) | |
| 1113 | DNA | NM_012470 | TRN-SR | transportin-SR |
| 1114 | Protein | NP_036602 | TRN-SR | transportin-SR |
| 1115 | DNA | NM_006360 | GA17 | dendritic cell protein |
| 1116 | Protein | NP_006351 | GA17 | dendritic cell protein |
| 1117 | DNA | NM_014159 | HIF1 | huntingtin interacting protein 1 |
| 1118 | Protein | NP_054878 | HIF1 | huntingtin interacting protein 1 |
| 1119 | DNA | NM_000100 | CSTB | cystatin B (stefin B) |
| 1120 | Protein | NP_000091 | CSTB | cystatin B (stefin B) |
| 1121 | DNA | NM_018947 | CYCS | cytochrome c, somatic |
| 1122 | Protein | NP_061820 | CYCS | cytochrome c, somatic |
| 1123 | DNA | NM_001312 | CRIP2 | cysteine-rich protein 2 |
| 1124 | Protein | NP_001303 | CRIP2 | cysteine-rich protein 2 |
| 1125 | DNA | AB002368 | RANBP20 | RAN binding protein 20 |
| 1126 | Protein | AB002368 | RANBP20 | RAN binding protein 20 |
| | | (Translation) | | |
| 1127 | DNA | NM_021188 | APA1 | likely ortholog of mouse |
| | | | | another partner for ARF 1 |
| 1128 | Protein | NP_067011 | APA1 | likely ortholog of mouse |
| | | | | another partner for ARF 1 |
| 1129 | DNA | NM_003129 | SQLE | squalene epoxidase |
| 1130 | Protein | NP_003120 | SQLE | squalene epoxidase |
| 1131 | DNA | NM_020357 | PCNP | PEST-containing nuclear |
| | | | | protein |
| 1132 | Protein | NP_065090 | PCNP | PEST-containing nuclear |
| | | | | protein |
| 1133 | DNA | NM_006323 | SEC24B | SEC24 related gene family, |
| | | | | member B (S. cerevisiae) |
| 1134 | Protein | NP_006314 | SEC24B | SEC24 related gene family, |
| | | | | member B (S. cerevisiae) |
| 1135 | DNA | AB028980 | USP24 | ubiquitin specific protease 24 |
| 1136 | Protein | AB028980 | USP24 | ubiquitin specific protease 24 |
| | | (Translation) | | |
| 1137 | DNA | AL049432 | RAI17 | retinoic acid induced 17 |
| 1138 | DNA | NM_015167 | PTDSR | phosphatidylserine receptor |
| 1139 | Protein | NP_055982 | PTDSR | phosphatidylserine receptor |
| 1140 | DNA | NM_000753 | PDE3B | phosphodiesterase 3B, cGMP- |
| | | | | inhibited |
| 1141 | Protein | NP_000744 | PDE3B | phosphodiesterase 3B, cGMP- |
| | | | | inhibited |
| 1142 | DNA | NM_000922 | PDE3B | phosphodiesterase 3B, cGMP- |
| | | | | inhibited |
| 1143 | Protein | NP_000913 | PDE3B | phosphodiesterase 3B, cGMP- |
| | | | | inhibited |
| 1144 | DNA | NM_005224 | DRIL1 | dead ringer-like 1 (Drosophila) |
| 1145 | Protein | NP_005215 | DRIL1 | dead ringer-like 1 (Drosophila) |
| 1146 | DNA | NM_002155 | HSPA6 | heat shock 70 kDa protein 6 |
| | | | | (HSP70B′) |
| 1147 | Protein | NP_002146 | HSPA6 | heat shock 70 kDa protein 6 |
| | | | | (HSP70B′) |
| 1148 | DNA | NM_012242 | DKK1 | dickkopf homolog 1 (Xenopus |
| | | | | laevis) |
| 1149 | Protein | NP_036374 | DKK1 | dickkopf homolog 1 (Xenopus |
| | | | | laevis) |
| 1150 | DNA | NM_004715 | CTDP1 | CTD (carboxy-terminal |
| | | | | domain, RNA polymerase II, |
| | | | | polypeptide A) phosphatase, |
| | | | | subunit 1 |
| 1151 | Protein | NP_004706 | CTDP1 | CTD (carboxy-terminal |
| | | | | domain, RNA polymerase II, |
| | | | | polypeptide A) phosphatase, |
| | | | | subunit 1 |
| 1152 | DNA | NM_048368 | CTDP1 | CTD (carboxy-terminal |
| | | | | domain, RNA polymerase II, |
| | | | | polypeptide A) phosphatase, |
| | | | | subunit 1 |
| 1153 | Protein | NP_430255 | CTDP1 | CTD (carboxy-terminal |
| | | | | domain, RNA polymerase II, |
| | | | | polypeptide A) phosphatase, |
| | | | | subunit 1 |
| 1154 | DNA | NM_001952 | E2F6 | E2F transcription factor 6 |
| 1155 | Protein | NP_001943 | E2F6 | E2F transcription factor 6 |
| 1156 | DNA | NM_014939 | KIAA1012 | KIAA1012 protein |
| 1157 | Protein | NP_055754 | KIAA1012 | KIAA1012 protein |
| 1158 | DNA | NM_006250 | PRH1 | proline-rich protein HaeIII |
| | | | | subfamily 1 |
| 1159 | Protein | NP_006241 | PRH1 | proline-rich protein HaeIII |
| | | | | subfamily 1 |
| 1160 | DNA | NM_021974 | POLR2F | polymerase (RNA) II (DNA |
| | | | | directed) polypeptide F |
| 1161 | Protein | NP_068809 | POLR2F | polymerase (RNA) II (DNA |
| | | | | directed) polypeptide F |
| 1162 | DNA | NM_001584 | C11orf8 | chromosome 11 open reading |
| | | | | frame 8 |
| 1163 | Protein | NP_001575 | C11orf8 | chromosome 11 open reading |
| | | | | frame 8 |
| 1164 | DNA | NM_015438 | DKFZP586I2223 | intermediate filament-like |
| | | | | MGC: 2625 |
| 1165 | Protein | NP_056253 | DKFZP586I2223 | intermediate filament-like |
| | | | | MGC: 2625 |
| 1166 | DNA | NM_080730 | DKFZP586I2223 | intermediate filament-like |
| | | | | MGC: 2625 |
| 1167 | Protein | NP_542768 | DKFZP586I2223 | intermediate filament-like |
| | | | | MGC: 2625 |
| 1168 | DNA | NM_080731 | DKFZP586I2223 | intermediate filament-like |
| | | | | MGC: 2625 |
| 1169 | Protein | NP_542769 | DKFZP586I2223 | intermediate filament-like |
| | | | | MGC: 2625 |
| 1170 | DNA | NM_003801 | GPAA1 | GPAA1P anchor attachment |
| | | | | protein 1 homolog (yeast) |
| 1171 | Protein | NP_003792 | GPAA1 | GPAA1P anchor attachment |
| | | | | protein 1 homolog (yeast) |
| 1172 | DNA | NM_000347 | SPTB | spectrin, beta, erythrocytic |
| | | | | (includes spherocytosis, clinical |
| | | | | type I) |
| 1173 | Protein | NP_000338 | SPTB | spectrin, beta, erythrocytic |
| | | | | (includes spherocytosis, clinical |
| | | | | type I) |
| 1174 | DNA | NM_003686 | EXO1 | exonuclease 1 |
| 1175 | Protein | NP_003677 | EXO1 | exonuclease 1 |
| 1176 | DNA | NM_006027 | EXO1 | exonuclease 1 |
| 1177 | Protein | NP_006018 | EXO1 | exonuclease 1 |
| 1178 | DNA | NM_130398 | EXO1 | exonuclease 1 |
| 1179 | Protein | NP_569082 | EXO1 | exonuclease 1 |
| 1180 | DNA | NM_014345 | ZFP318 | endocrine regulator |
| 1181 | Protein | NP_055160 | ZFP318 | endocrine regulator |
| 1182 | DNA | NM_001262 | CDKN2C | cyclin-dependent kinase |
| | | | | inhibitor 2C (p18, inhibits |
| | | | | CDK4) |
| 1183 | Protein | NP_001253 | CDKN2C | cyclin-dependent kinase |
| | | | | inhibitor 2C (p18, inhibits |
| | | | | CDK4) |
| 1184 | DNA | NM_078626 | CDKN2C | cyclin-dependent kinase |
| | | | | inhibitor 2C (p18, inhibits |
| | | | | CDK4) |
| 1185 | DNA | AB020699 | KIAA0892 | KIAA0892 protein |
| 1186 | Protein | AB020699 | KIAA0892 | KIAA0892 protein |
| | | (Translation) | | |
| 1187 | DNA | AB007925 | FNBP2 | formin binding protein 2 |
| 1188 | Protein | AB007925 | FNBP2 | formin binding protein 2 |
| | | (Translation) | | |
| 1189 | DNA | NM_004898 | CLOCK | clock homolog (mouse) |
| 1190 | Protein | NP_004889 | CLOCK | clock homolog (mouse) |
| 1191 | DNA | NM_003720 | DSCR2 | Down syndrome critical region |
| | | | | gene 2 |
| 1192 | Protein | NP_003711 | DSCR2 | Down syndrome critical region |
| | | | | gene 2 |
| 1193 | DNA | NM_006924 | SFRS1 | splicing factor, arginine/serine- |
| | | | | rich 1 (splicing factor 2, |
| | | | | alternate splicing factor) |
| 1194 | Protein | NP_008855 | SFRS1 | splicing factor, arginine/serine- |
| | | | | rich 1 (splicing factor 2, |
| | | | | alternate splicing factor) |
| 1195 | DNA | NM_004326 | BCL9 | B-cell CLL/lymphoma 9 |
| 1196 | Protein | NP_004317 | BCL9 | B-cell CLL/lymphoma 9 |
| 1197 | DNA | NM_003283 | TNNT1 | troponin T1, skeletal, slow |
| 1198 | Protein | NP_003274 | TNNT1 | troponin T1, skeletal, slow |
| 1199 | DNA | NM_021126 | MPST | mercaptopyruvate |
| | | | | sulfurtransferase |
| 1200 | Protein | NP_066949 | MPST | mercaptopyruvate |
| | | | | sulfurtransferase |
| 1201 | DNA | NM_001182 | ALDH7A1 | aldehyde dehydrogenase 7 |
| | | | | family, member A1 |
| 1202 | Protein | NP_001173 | ALDH7A1 | aldehyde dehydrogenase 7 |
| | | | | family, member A1 |
| 1203 | DNA | NM_001749 | CAPNS1 | calpain, small subunit 1 |
| 1204 | Protein | NP_001740 | CAPNS1 | calpain, small subunit 1 |
| 1205 | DNA | NM_004346 | CASP3 | caspase 3, apoptosis-related |
| | | | | cysteine protease |
| 1206 | Protein | NP_004337 | CASP3 | caspase 3, apoptosis-related |
| | | | | cysteine protease |
| 1207 | DNA | NM_032991 | CASP3 | caspase 3, apoptosis-related |
| | | | | cysteine protease |
| 1208 | DNA | NM_003145 | SSR2 | signal sequence receptor, beta |
| | | | | (translocon-associated protein |
| | | | | beta) |
| 1209 | Protein | NP_003136 | SSR2 | signal sequence receptor, beta |
| | | | | (translocon-associated protein |
| | | | | beta) |
| 1210 | DNA | NM_153273 | IHPK1 | inositol hexaphosphate kinase 1 |
| 1211 | Protein | NP_695005 | IHPK1 | inositol hexaphosphate kinase 1 |
| 1212 | DNA | NM_001728 | BSG | basigin (OK blood group) |
| 1213 | Protein | NP_001719 | BSG | basigin (OK blood group) |
| 1214 | DNA | NM_004374 | COX6C | cytochrome c oxidase subunit |
| | | | | VIc |
| 1215 | Protein | NP_004365 | COX6C | cytochrome c oxidase subunit |
| | | | | VIc |
| 1216 | DNA | NM_004047 | ATP6V0B | ATPase, H+ transporting, |
| | | | | lysosomal 21 kDa, V0 subunit |
| | | | | c″ |
| 1217 | Protein | NP_004038 | ATP6V0B | ATPase, H+ transporting, |
| | | | | lysosomal 21 kDa, V0 subunit |
| | | | | c″ |
| 1218 | DNA | NM_004541 | NDUFA1 | NADH dehydrogenase |
| | | | | (ubiquinone) 1 alpha |
| | | | | subcomplex, 1, 7.5 kDa |
| 1219 | Protein | NP_004532 | NDUFA1 | NADH dehydrogenase |
| | | | | (ubiquinone) 1 alpha |
| | | | | subcomplex, 1, 7.5 kDa |
| 1220 | DNA | NM_014297 | YF13H12 | protein expressed in thyroid |
| 1221 | Protein | NP_055112 | YF13H12 | protein expressed in thyroid |
| 1222 | DNA | NM_004759 | MAPKAPK2 | mitogen-activated protein |
| | | | | kinase-activated protein kinase 2 |
| 1223 | Protein | NP_004750 | MAPKAPK2 | mitogen-activated protein |
| | | | | kinase-activated protein kinase 2 |
| 1224 | DNA | NM_032960 | MAPKAPK2 | mitogen-activated protein |
| | | | | kinase-activated protein kinase 2 |
| 1225 | Protein | NP_116584 | MAPKAPK2 | mitogen-activated protein |
| | | | | kinase-activated protein kinase 2 |
| 1226 | DNA | NM_000289 | PFKM | phosphofructokinase, muscle |
| 1227 | Protein | NP_000280 | PFKM | phosphofructokinase, muscle |
| 1228 | DNA | NM_005104 | BRD2 | bromodomain containing 2 |
| 1229 | Protein | NP_005095 | BRD2 | bromodomain containing 2 |
| 1230 | DNA | NM_004235 | KLF4 | Kruppel-like factor 4 (gut) |
| 1231 | Protein | NP_004226 | KLF4 | Kruppel-like factor 4 (gut) |
| 1232 | DNA | NM_007271 | STK38 | serine/threonine kinase 38 |
| 1233 | Protein | NP_009202 | STK38 | serine/threonine kinase 38 |
| 1234 | DNA | NM_138448 | ACYP2 | acylphosphatase 2, muscle type |
| 1235 | Protein | NP_612457 | ACYP2 | acylphosphatase 2, muscle type |
| 1236 | DNA | NM_003045 | SLC7A1 | solute carrier family 7 (cationic |
| | | | | amino acid transporter, y+ |
| | | | | system), member 1 |
| 1237 | Protein | NP_003036 | SLC7A1 | solute carrier family 7 (cationic |
| | | | | amino acid transporter, y+ |
| | | | | system), member 1 |
| 1238 | DNA | NM_002446 | MAP3K10 | mitogen-activated protein |
| | | | | kinase kinase kinase 10 |
| 1239 | Protein | NP_002437 | MAP3K10 | mitogen-activated protein |
| | | | | kinase kinase kinase 10 |
| 1240 | DNA | NM_003429 | ZNF85 | zinc finger protein 85 (HPF4, |
| | | | | HTF1) |
| 1241 | Protein | NP_003420 | ZNF85 | zinc finger protein 85 (HPF4, |
| | | | | HTF1) |
| 1242 | DNA | NM_005547 | IVL | involucrin |
| 1243 | Protein | NP_005538 | IVL | involucrin |
| 1244 | DNA | NM_000661 | RPL9 | ribosomal protein L9 |
| 1245 | Protein | NP_000652 | RPL9 | ribosomal protein L9 |
| 1246 | DNA | W28729 | EST | EST |
| 1247 | DNA | NM_052855 | MGC15396 | hypothetical protein |
| | | | | MGC15396 |
| 1248 | Protein | NP_443087 | MGC15396 | hypothetical protein |
| | | | | MGC15396 |
| 1249 | DNA | NM_004160 | PYY | peptide YY |
| 1250 | Protein | NP_004151 | PYY | peptide YY |
| 1251 | DNA | NM_004875 | RPA40 | RNA polymerase I subunit |
| 1252 | Protein | NP_004866 | RPA40 | RNA polymerase I subunit |
| 1253 | DNA | NM_014291 | GCAT | glycine C-acetyltransferase (2- |
| | | | | amino-3-ketobutyrate |
| | | | | coenzyme A ligase) |
| 1254 | Protein | NP_055106 | GCAT | glycine C-acetyltransferase (2- |
| | | | | amino-3-ketobutyrate |
| | | | | coenzyme A ligase) |
| 1255 | DNA | NM_007344 | TTF1 | transcription termination factor, |
| | | | | RNA polymerase I |
| 1256 | Protein | NP_031370 | TTF1 | transcription termination factor, |
| | | | | RNA polymerase I |
| 1257 | DNA | NM_005632 | SOLH | small optic lobes homolog |
| | | | | (Drosophila) |
| 1258 | Protein | NP_005623 | SOLH | small optic lobes homolog |
| | | | | (Drosophila) |
| 1259 | DNA | AB011542 | EGFL5 | EGF-like-domain, multiple 5 |
| 1260 | Protein | AB011542 | EGFL5 | EGF-like-domain, multiple 5 |
| | | (Translation) | | |
| 1261 | DNA | NM_021003 | PPM1A | protein phosphatase 1A |
| | | | | (formerly 2C), magnesium- |
| | | | | dependent, alpha isoform |
| 1262 | Protein | NP_066283 | PPM1A | protein phosphatase 1A |
| | | | | (formerly 2C), magnesium- |
| | | | | dependent, alpha isoform |
| 1263 | DNA | D30612 | ZNF282 | zinc finger protein 282 |
| 1264 | Protein | D30612 (Translation) | ZNF282 | zinc finger protein 282 |
| 1265 | DNA | NM_005476 | GNE | UDP-N-acetylglucosamine-2- |
| | | | | epimerase/N- |
| | | | | acetylmannosamine kinase |
| 1266 | Protein | NP_005467 | GNE | UDP-N-acetylglucosamine-2- |
| | | | | epimerase/N- |
| | | | | acetylmannosamine kinase |
| 1267 | DNA | NM_005926 | MFAP1 | microfibrillar-associated |
| | | | | protein 1 |
| 1268 | Protein | NP_005917 | MFAP1 | microfibrillar-associated |
| | | | | protein 1 |
| 1269 | DNA | NM_006359 | SLC9A6 | solute carrier family 9 |
| | | | | (sodium/hydrogen exchanger), |
| | | | | isoform 6 |
| 1270 | Protein | NP_006350 | SLC9A6 | solute carrier family 9 |
| | | | | (sodium/hydrogen exchanger), |
| | | | | isoform 6 |
| 1271 | DNA | NM_003087 | SNCG | synuclein, gamma (breast |
| | | | | cancer-specific protein 1) |
| 1272 | Protein | NP_003078 | SNCG | synuclein, gamma (breast |
| | | | | cancer-specific protein 1) |
| 1273 | DNA | NM_153341 | FLJ90005 | hypothetical protein FLJ90005 |
| 1274 | Protein | NP_699172 | FLJ90005 | hypothetical protein FLJ90005 |
| 1275 | DNA | NM_006978 | ZNF183 | zinc finger protein 183 (RING |
| | | | | finger, C3HC4 type) |
| 1276 | Protein | NP_008909 | ZNF183 | zinc finger protein 183 (RING |
| | | | | finger, C3HC4 type) |
| 1277 | DNA | NM_004135 | IDH3G | isocitrate dehydrogenase 3 |
| | | | | (NAD+) gamma |
| 1278 | Protein | NP_004126 | IDH3G | isocitrate dehydrogenase 3 |
| | | | | (NAD+) gamma |
| 1279 | DNA | NM_174869 | IDH3G | isocitrate dehydrogenase 3 |
| | | | | (NAD+) gamma |
| 1280 | Protein | NP_777358 | IDH3G | isocitrate dehydrogenase 3 |
| | | | | (NAD+) gamma |
| 1281 | DNA | NM_001166 | BIRC2 | baculoviral IAP repeat- |
| | | | | containing 2 |
| 1282 | Protein | NP_001157 | BIRC2 | baculoviral IAP repeat- |
| | | | | containing 2 |
| 1283 | DNA | NM_004788 | UBE4A | ubiquitination factor E4A |
| | | | | (UFD2 homolog, yeast) |
| 1284 | Protein | NP_004779 | UBE4A | ubiquitination factor E4A |
| | | | | (UFD2 homolog, yeast) |
| 1285 | DNA | D87470 | KIAA0280 | KIAA0280 protein |
| 1286 | Protein | D87470 (Translation) | KIAA0280 | KIAA0280 protein |
| 1287 | DNA | NM_006010 | ARMET | arginine-rich, mutated in early |
| | | | | stage tumors |
| 1288 | Protein | NP_006001 | ARMET | arginine-rich, mutated in early |
| | | | | stage tumors |
| 1289 | DNA | NM_002165 | ID1 | inhibitor of DNA binding 1, |
| | | | | dominant negative helix-loop- |
| | | | | helix protein |
| 1290 | Protein | NP_002156 | ID1 | inhibitor of DNA binding 1, |
| | | | | dominant negative helix-loop- |
| | | | | helix protein |
| 1291 | DNA | NM_000454 | SOD1 | superoxide dismutase 1, soluble |
| | | | | (amyotrophic lateral sclerosis 1 |
| | | | | (adult)) |
| 1292 | Protein | NP_000445 | SOD1 | superoxide dismutase 1, soluble |
| | | | | (amyotrophic lateral sclerosis 1 |
| | | | | (adult)) |
| 1293 | DNA | NM_007202 | AKAP10 | A kinase (PRKA) anchor |
| | | | | protein 10 |
| 1294 | Protein | NP_009133 | AKAP10 | A kinase (PRKA) anchor |
| | | | | protein 10 |
| 1295 | DNA | J00287 | | Cluster Incl. J00287: Human |
| | | | | pepsinogen gene |
| | | | | /cds = (55.1221) /gb = J00287 |
| | | | | /gi = 189798 /ug = Hs.75558 |
| | | | | /len = 1381 |
| 1296 | Protein | J00287 (Translation) | | Cluster Incl. J00287: Human |
| | | | | pepsinogen gene |
| | | | | /cds = (55.1221) /gb = J00287 |
| | | | | /gi = 189798 /ug = Hs.75558 |
| | | | | /len = 1381 |
| 1297 | DNA | NM_004357 | CD151 | CD151 antigen |
| 1298 | Protein | NP_004348 | CD151 | CD151 antigen |
| 1299 | DNA | NM_139030 | CD151 | CD151 antigen |
| 1300 | Protein | NP_620599 | CD151 | CD151 antigen |
| 1301 | DNA | NM_139031 | CD151 | CD151 antigen |
| 1302 | DNA | NM_004270 | CRSP9 | cofactor required for Sp1 |
| | | | | transcriptional activation, |
| | | | | subunit 9, 33 kDa |
| 1303 | Protein | NP_004261 | CRSP9 | cofactor required for Sp1 |
| | | | | transcriptional activation, |
| | | | | subunit 9, 33 kDa |
| 1304 | DNA | NM_000375 | UROS | uroporphyrinogen III synthase |
| | | | | (congenital erythropoietic |
| | | | | porphyria) |
| 1305 | Protein | NP_000366 | UROS | uroporphyrinogen III synthase |
| | | | | (congenital erythropoietic |
| | | | | porphyria) |
| 1306 | DNA | NM_000155 | GALT | galactose-1-phosphate |
| | | | | uridylyltransferase |
| 1307 | Protein | NP_000146 | GALT | galactose-1-phosphate |
| | | | | uridylyltransferase |
| 1308 | DNA | NM_147131 | GALT | galactose-1-phosphate |
| | | | | uridylyltransferase |
| 1309 | Protein | NP_667342 | GALT | galactose-1-phosphate |
| | | | | uridylyltransferase |
| 1310 | DNA | NM_147132 | GALT | galactose-1-phosphate |
| | | | | uridylyltransferase |
| 1311 | Protein | NP_667343 | GALT | galactose-1-phosphate |
| | | | | uridylyltransferase |
| 1312 | DNA | NM_000918 | P4HB | procollagen-proline, 2- |
| | | | | oxoglutarate 4-dioxygenase |
| | | | | (proline 4-hydroxylase), beta |
| | | | | polypeptide (protein disulfide |
| | | | | isomerase; thyroid hormone |
| | | | | binding protein p55) |
| 1313 | Protein | NP_000909 | P4HB | procollagen-proline, 2- |
| | | | | oxoglutarate 4-dioxygenase |
| | | | | (proline 4-hydroxylase), beta |
| | | | | polypeptide (protein disulfide |
| | | | | isomerase; thyroid hormone |
| | | | | binding protein p55) |
| 1314 | DNA | NM_005022 | PFN1 | profilin 1 |
| 1315 | Protein | NP_005013 | PFN1 | profilin 1 |
| 1316 | DNA | NM_001647 | APOD | apolipoprotein D |
| 1317 | Protein | NP_001638 | APOD | apolipoprotein D |
| 1318 | DNA | NM_153747 | | Cluster Incl. AB000359: Homo |
| | | | | sapiens PIGCP1 pseudogene |
| | | | | /cds = (0.416) /gb = AB000359 |
| | | | | /gi = 2547040 /ug = Hs.47974 |
| | | | | /len = 417 |
| 1319 | Protein | NP_714969 | | Cluster Incl. AB000359: Homo |
| | | | | sapiens PIGCP1 pseudogene |
| | | | | /cds = (0.416) /gb = AB000359 |
| | | | | /gi = 2547040 /ug = Hs.47974 |
| | | | | /len = 417 |
| 1320 | DNA | NM_002642 | | Cluster Incl. AB000359: Homo |
| | | | | sapiens PIGCP1 pseudogene |
| | | | | /cds = (0.416) /gb = AB000359 |
| | | | | /gi = 2547040 /ug = Hs.47974 |
| | | | | /len = 417 |
| 1321 | DNA | AL080093 | | Homo sapiens mRNA; cDNA |
| | | | | DKFZp564N1662 (from clone |
| | | | | DKFZp564N1662), mRNA |
| | | | | sequence |
| 1322 | DNA | NM_001831 | CLU | clusterin (complement lysis |
| | | | | inhibitor, SP-40,40, sulfated |
| | | | | glycoprotein 2, testosterone- |
| | | | | repressed prostate message 2, |
| | | | | apolipoprotein J) |
| 1323 | Protein | NP_001822 | CLU | clusterin (complement lysis |
| | | | | inhibitor, SP-40,40, sulfated |
| | | | | glycoprotein 2, testosterone- |
| | | | | repressed prostate message 2, |
| | | | | apolipoprotein J) |
| 1324 | DNA | NM_015852 | H-plk | Krueppel-related zinc finger |
| | | | | protein |
| 1325 | Protein | NP_056936 | H-plk | Krueppel-related zinc finger |
| | | | | protein |
| 1326 | DNA | NM_001318 | CSHL1 | chorionic somatomammotropin |
| | | | | hormone-like 1 |
| 1327 | Protein | NP_001309 | CSHL1 | chorionic somatomammotropin |
| | | | | hormone-like 1 |
| 1328 | DNA | NM_022578 | CSHL1 | chorionic somatomammotropin |
| | | | | hormone-like 1 |
| 1329 | Protein | NP_072100 | CSHL1 | chorionic somatomammotropin |
| | | | | hormone-like 1 |
| 1330 | DNA | NM_022579 | CSHL1 | chorionic somatomammotropin |
| | | | | hormone-like 1 |
| 1331 | Protein | NP_072101 | CSHL1 | chorionic somatomammotropin |
| | | | | hormone-like 1 |
| 1332 | DNA | NM_022580 | CSHL1 | chorionic somatomammotropin |
| | | | | hormone-like 1 |
| 1333 | Protein | NP_072102 | CSHL1 | chorionic somatomammotropin |
| | | | | hormone-like 1 |
| 1334 | DNA | NM_001540 | | 28 kDa heat shock protein |
| | | | | [Homo sapiens], mRNA |
| | | | | sequence |
| 1335 | Protein | NP_001531 | | 28 kDa heat shock protein |
| | | | | [Homo sapiens], mRNA |
| | | | | sequence |
| 1336 | DNA | NM_007104 | RPL10A | ribosomal protein L10a |
| 1337 | Protein | NP_009035 | RPL10A | ribosomal protein L10a |
| 1338 | DNA | NM_002778 | PSAP | prosaposin (variant Gaucher |
| | | | | disease and variant |
| | | | | metachromatic leukodystrophy) |
| 1339 | Protein | NP_002769 | PSAP | prosaposin (variant Gaucher |
| | | | | disease and variant |
| | | | | metachromatic leukodystrophy) |
| 1340 | DNA | NM_001466 | FZD2 | frizzled homolog 2 |
| | | | | (Drosophila) |
| 1341 | Protein | NP_001457 | FZD2 | frizzled homolog 2 |
| | | | | (Drosophila) |
| 1342 | DNA | NM_022735 | GOCAP1 | golgi complex associated |
| | | | | protein 1, 60 kDa |
| 1343 | Protein | NP_073572 | GOCAP1 | golgi complex associated |
| | | | | protein 1, 60 kDa |
| 1344 | DNA | AB002324 | KIAA0326 | KIAA0326 protein |
| 1345 | Protein | AB002324 | KIAA0326 | KIAA0326 protein |
| | | (Translation) | | |
| 1346 | DNA | NM_006845 | KNSL6 | kinesin-like 6 (mitotic |
| | | | | centromere-associated kinesin) |
| 1347 | Protein | NP_006836 | KNSL6 | kinesin-like 6 (mitotic |
| | | | | centromere-associated kinesin) |
| 1348 | DNA | NM_001254 | CDC6 | CDC6 cell division cycle 6 |
| | | | | homolog (S. cerevisiae) |
| 1349 | Protein | NP_001245 | CDC6 | CDC6 cell division cycle 6 |
| | | | | homolog (S. cerevisiae) |
| 1350 | DNA | D50926 | NXP-2 | nuclear matrix protein NXP-2 |
| 1351 | Protein | D50926 (Translation) | NXP-2 | nuclear matrix protein NXP-2 |
| 1352 | DNA | NM_016199 | LSM7 | U6 snRNA-associated Sm-like |
| | | | | protein LSm7 |
| 1353 | Protein | NP_057283 | LSM7 | U6 snRNA-associated Sm-like |
| | | | | protein LSm7 |
| 1354 | DNA | NM_002853 | RAD1 | RAD1 homolog (S. pombe) |
| 1355 | Protein | NP_002844 | RAD1 | RAD1 homolog (S. pombe) |
| 1356 | DNA | NM_133282 | RAD1 | RAD1 homolog (S. pombe) |
| 1357 | Protein | NP_579816 | RAD1 | RAD1 homolog (S. pombe) |
| 1358 | DNA | NM_133377 | RAD1 | RAD1 homolog (S. pombe) |
| 1359 | DNA | NM_015169 | RRS1 | homolog of yeast ribosome |
| | | | | biogenesis regulatory protein |
| | | | | RRS1 |
| 1360 | Protein | NP_055984 | RRS1 | homolog of yeast ribosome |
| | | | | biogenesis regulatory protein |
| | | | | RRS1 |
| 1361 | DNA | AB028987 | C19orf7 | chromosome 19 open reading |
| | | | | frame 7 |
| 1362 | Protein | AB028987 | C19orf7 | chromosome 19 open reading |
| | | (Translation) | | frame 7 |
| 1363 | DNA | NM_014213 | HOXD9 | homeo box D9 |
| 1364 | Protein | NP_055028 | HOXD9 | homeo box D9 |
| 1365 | DNA | NM_003344 | UBE2H | ubiquitin-conjugating enzyme |
| | | | | E2H (UBC8 homolog, yeast) |
| 1366 | Protein | NP_003335 | UBE2H | ubiquitin-conjugating enzyme |
| | | | | E2H (UBC8 homolog, yeast) |
| 1367 | DNA | NM_001665 | ARHG | ras homolog gene family, |
| | | | | member G (rho G) |
| 1368 | Protein | NP_001656 | ARHG | ras homolog gene family, |
| | | | | member G (rho G) |
| 1369 | DNA | NM_003188 | MAP3K7 | mitogen-activated protein |
| | | | | kinase kinase kinase 7 |
| 1370 | Protein | NP_003179 | MAP3K7 | mitogen-activated protein |
| | | | | kinase kinase kinase 7 |
| 1371 | DNA | NM_145331 | MAP3K7 | mitogen-activated protein |
| | | | | kinase kinase kinase 7 |
| 1372 | Protein | NP_663304 | MAP3K7 | mitogen-activated protein |
| | | | | kinase kinase kinase 7 |
| 1373 | DNA | NM_145332 | MAP3K7 | mitogen-activated protein |
| | | | | kinase kinase kinase 7 |
| 1374 | Protein | NP_663305 | MAP3K7 | mitogen-activated protein |
| | | | | kinase kinase kinase 7 |
| 1375 | DNA | NM_145333 | MAP3K7 | mitogen-activated protein |
| | | | | kinase kinase kinase 7 |
| 1376 | Protein | NP_663306 | MAP3K7 | mitogen-activated protein |
| | | | | kinase kinase kinase 7 |
| 1377 | DNA | NM_003390 | WEE1 | WEE1 homolog (S. pombe) |
| 1378 | Protein | NP_003381 | WEE1 | WEE1 homolog (S. pombe) |
| 1379 | DNA | NM_006527 | SLBP | stem-loop (histone) binding |
| | | | | protein |
| 1380 | Protein | NP_006518 | SLBP | stem-loop (histone) binding |
| | | | | protein |
| 1381 | DNA | NM_000856 | GUCY1A3 | guanylate cyclase 1, soluble, |
| | | | | alpha 3 |
| 1382 | Protein | NP_000847 | GUCY1A3 | guanylate cyclase 1, soluble, |
| | | | | alpha 3 |
| 1383 | DNA | NM_002748 | MAPK6 | mitogen-activated protein |
| | | | | kinase 6 |
| 1384 | Protein | NP_002739 | MAPK6 | mitogen-activated protein |
| | | | | kinase 6 |
| 1385 | DNA | NM_007145 | ZNF146 | zinc finger protein 146 |
| 1386 | Protein | NP_009076 | ZNF146 | zinc finger protein 146 |
| 1387 | DNA | NM_003186 | TAGLN | transgelin |
| 1388 | Protein | NP_003177 | TAGLN | transgelin |
| 1389 | DNA | NM_014761 | KIAA0174 | KIAA0174 gene product |
| 1390 | Protein | NP_055576 | KIAA0174 | KIAA0174 gene product |
| 1391 | DNA | NM_001396 | DYRK1A | dual-specificity tyrosine-(Y)- |
| | | | | phosphorylation regulated |
| | | | | kinase 1A |
| 1392 | Protein | NP_001387 | DYRK1A | dual-specificity tyrosine-(Y)- |
| | | | | phosphorylation regulated |
| | | | | kinase 1A |
| 1393 | DNA | NM_101395 | DYRK1A | dual-specificity tyrosine-(Y)- |
| | | | | phosphorylation regulated |
| | | | | kinase 1A |
| 1394 | Protein | NP_567824 | DYRK1A | dual-specificity tyrosine-(Y)- |
| | | | | phosphorylation regulated |
| | | | | kinase 1A |
| 1395 | DNA | NM_130436 | DYRK1A | dual-specificity tyrosine-(Y)- |
| | | | | phosphorylation regulated |
| | | | | kinase 1A |
| 1396 | Protein | NP_569120 | DYRK1A | dual-specificity tyrosine-(Y)- |
| | | | | phosphorylation regulated |
| | | | | kinase 1A |
| 1397 | DNA | NM_000182 | HADHA | hydroxyacyl-Coenzyme A |
| | | | | dehydrogenase/3-ketoacyl- |
| | | | | Coenzyme A thiolase/enoyl- |
| | | | | Coenzyme A hydratase |
| | | | | (trifunctional protein), alpha |
| | | | | subunit |
| 1398 | Protein | NP_000173 | HADHA | hydroxyacyl-Coenzyme A |
| | | | | dehydrogenase/3-ketoacyl- |
| | | | | Coenzyme A thiolase/enoyl- |
| | | | | Coenzyme A hydratase |
| | | | | (trifunctional protein), alpha |
| | | | | subunit |
| 1399 | DNA | NM_005359 | MADH4 | MAD, mothers against |
| | | | | decapentaplegic homolog 4 |
| | | | | (Drosophila) |
| 1400 | Protein | NP_005350 | MADH4 | MAD, mothers against |
| | | | | decapentaplegic homolog 4 |
| | | | | (Drosophila) |
| 1401 | DNA | NM_012408 | PRKCBP1 | protein kinase C binding |
| | | | | protein 1 |
| 1402 | Protein | NP_036540 | PRKCBP1 | protein kinase C binding |
| | | | | protein 1 |
| 1403 | DNA | AL050353 | OIP2 | Opa-interacting protein 2 |
| 1404 | DNA | NM_004181 | UCHL1 | ubiquitin carboxyl-terminal |
| | | | | esterase L1 (ubiquitin |
| | | | | thiolesterase) |
| 1405 | Protein | NP_004172 | UCHL1 | ubiquitin carboxyl-terminal |
| | | | | esterase L1 (ubiquitin |
| | | | | thiolesterase) |
| 1406 | DNA | NM_005626 | SFRS4 | splicing factor, arginine/serine- |
| | | | | rich 4 |
| 1407 | Protein | NP_005617 | SFRS4 | splicing factor, arginine/serine- |
| | | | | rich 4 |
| 1408 | DNA | NM_001694 | ATP6V0C | ATPase, H+ transporting, |
| | | | | lysosomal 16 kDa, V0 subunit c |
| 1409 | Protein | NP_001685 | ATP6V0C | ATPase, H+ transporting, |
| | | | | lysosomal 16 kDa, V0 subunit c |
| 1410 | DNA | M88249 | | Cluster Incl. M88249: Human |
| | | | | inter-alpha-trypsin inhibitor |
| | | | | light chain (ITI) gene |
| | | | | /cds = (94.1152) /gb = M88249 |
| | | | | /gi = 186599 /ug = Hs.76177 |
| | | | | /len = 1262 |
| 1411 | Protein | AAA59196 | | Cluster Incl. M88249: Human |
| | | | | inter-alpha-trypsin inhibitor |
| | | | | light chain (ITI) gene |
| | | | | /cds = (94.1152) /gb = M88249 |
| | | | | /gi = 186599 /ug = Hs.76177 |
| | | | | /len = 1262 |
| 1412 | DNA | M80899 | AHNAK | AHNAK nucleoprotein |
| | | | | (desmoyokin) |
| 1413 | Protein | M80899 | AHNAK | AHNAK nucleoprotein |
| | | (Translation) | | (desmoyokin) |
| 1414 | DNA | NM_014611 | MDN1 | MDN1, midasin homolog |
| | | | | (yeast) |
| 1415 | Protein | NP_055426 | MDN1 | MDN1, midasin homolog |
| | | | | (yeast) |
| 1416 | DNA | NM_002167 | ID3 | inhibitor of DNA binding 3, |
| | | | | dominant negative helix-loop- |
| | | | | helix protein |
| 1417 | Protein | NP_002158 | ID3 | inhibitor of DNA binding 3, |
| | | | | dominant negative helix-loop- |
| | | | | helix protein |
| 1418 | DNA | NM_003300 | TRAF3 | TNF receptor-associated factor 3 |
| 1419 | Protein | NP_003291 | TRAF3 | TNF receptor-associated factor 3 |
| 1420 | DNA | NM_145725 | TRAF3 | TNF receptor-associated factor 3 |
| 1421 | DNA | NM_145726 | TRAF3 | TNF receptor-associated factor 3 |
| 1422 | Protein | NP_663778 | TRAF3 | TNF receptor-associated factor 3 |
| 1423 | DNA | NM_001462 | FPRL1 | formyl peptide receptor-like 1 |
| 1424 | Protein | NP_001453 | FPRL1 | formyl peptide receptor-like 1 |
| 1425 | DNA | NM_005649 | ZNF354A | zinc finger protein 354A |
| 1426 | Protein | NP_005640 | ZNF354A | zinc finger protein 354A |
| 1427 | DNA | NM_001399 | ED1 | ectodermal dysplasia 1, |
| | | | | anhidrotic |
| 1428 | Protein | NP_001390 | ED1 | ectodermal dysplasia 1, |
| | | | | anhidrotic |
| 1429 | DNA | NM_014458 | AB026190 | Kelch motif containing protein |
| 1430 | Protein | NP_055273 | AB026190 | Kelch motif containing protein |
| 1431 | DNA | NM_001813 | CENPE | centromere protein E, 312 kDa |
| 1432 | Protein | NP_001804 | CENPE | centromere protein E, 312 kDa |
| 1433 | DNA | NM_002437 | MPV17 | MpV17 transgene, murine |
| | | | | homolog, glomerulosclerosis |
| 1434 | Protein | NP_002428 | MPV17 | MpV17 transgene, murine |
| | | | | homolog, glomerulosclerosis |
| 1435 | DNA | NM_012474 | UMPK | uridine monophosphate kinase |
| 1436 | Protein | NP_036606 | UMPK | uridine monophosphate kinase |
| 1437 | DNA | NM_012304 | FBXL7 | F-box and leucine-rich repeat |
| | | | | protein 7 |
| 1438 | Protein | NP_036436 | FBXL7 | F-box and leucine-rich repeat |
| | | | | protein 7 |
| 1439 | DNA | NM_005030 | PLK | polo-like kinase (Drosophila) |
| 1440 | Protein | NP_005021 | PLK | polo-like kinase (Drosophila) |
| 1441 | DNA | NM_001184 | ATR | ataxia telangiectasia and Rad3 |
| | | | | related |
| 1442 | Protein | NP_001175 | ATR | ataxia telangiectasia and Rad3 |
| | | | | related |
| 1443 | DNA | NM_014851 | KIAA0469 | KIAA0469 gene product |
| 1444 | Protein | NP_055666 | KIAA0469 | KIAA0469 gene product |
| 1445 | DNA | NM_021222 | HTCD37 | TcD37 homolog |
| 1446 | Protein | NP_067045 | HTCD37 | TcD37 homolog |
| 1447 | DNA | NM_005691 | ABCC9 | ATP-binding cassette, sub- |
| | | | | family C (CFTR/MRP), |
| | | | | member 9 |
| 1448 | Protein | NP_005682 | ABCC9 | ATP-binding cassette, sub- |
| | | | | family C (CFTR/MRP), |
| | | | | member 9 |
| 1449 | DNA | NM_020297 | ABCC9 | ATP-binding cassette, sub- |
| | | | | family C (CFTR/MRP), |
| | | | | member 9 |
| 1450 | Protein | NP_064693 | ABCC9 | ATP-binding cassette, sub- |
| | | | | family C (CFTR/MRP), |
| | | | | member 9 |
| 1451 | DNA | NM_020298 | ABCC9 | ATP-binding cassette, sub- |
| | | | | family C (CFTR/MRP), |
| | | | | member 9 |
| 1452 | Protein | NP_064694 | ABCC9 | ATP-binding cassette, sub- |
| | | | | family C (CFTR/MRP), |
| | | | | member 9 |
| 1453 | DNA | NM_003377 | VEGFB | vascular endothelial growth |
| | | | | factor B |
| 1454 | Protein | NP_003368 | VEGFB | vascular endothelial growth |
| | | | | factor B |
| 1455 | DNA | NM_005254 | GABPB1 | GA binding protein |
| | | | | transcription factor, beta |
| | | | | subunit 1, 53 kDa |
| 1456 | Protein | NP_005245 | GABPB1 | GA binding protein |
| | | | | transcription factor, beta |
| | | | | subunit 1, 53 kDa |
| 1457 | DNA | NM_016654 | GABPB1 | GA binding protein |
| | | | | transcription factor, beta |
| | | | | subunit 1, 53 kDa |
| 1458 | Protein | NP_057738 | GABPB1 | GA binding protein |
| | | | | transcription factor, beta |
| | | | | subunit 1, 53 kDa |
| 1459 | DNA | NM_014745 | KIAA0233 | KIAA0233 gene product |
| 1460 | Protein | NP_055560 | KIAA0233 | KIAA0233 gene product |
| 1461 | DNA | NM_014757 | MAML1 | mastermind-like 1 (Drosophila) |
| 1462 | Protein | NP_055572 | MAML1 | mastermind-like 1 (Drosophila) |
| 1463 | DNA | NM_014756 | KIAA0097 | KIAA0097 gene product |
| 1464 | Protein | NP_055571 | KIAA0097 | KIAA0097 gene product |
| 1465 | DNA | NM_002095 | GTF2E2 | general transcription factor IIE, |
| | | | | polypeptide 2, beta 34 kDa |
| 1466 | Protein | NP_002086 | GTF2E2 | general transcription factor IIE, |
| | | | | polypeptide 2, beta 34 kDa |
| 1467 | DNA | Z84718 | | Z84718 /FEATURE = cds#3 |
| | | | | /DEFINITION = HS322B1 |
| | | | | Human DNA sequence from |
| | | | | clone 322B1 on chromosome |
| | | | | 22q11-12, complete sequence |
| | | | | [Homo sapiens] |
| 1468 | DNA | AB002323 | DNCH1 | dynein, cytoplasmic, heavy |
| | | | | polypeptide 1 |
| 1469 | Protein | AB002323 | DNCH1 | dynein, cytoplasmic, heavy |
| | | (Translation) | | polypeptide 1 |
| 1470 | DNA | NM_002070 | GNAI2 | guanine nucleotide binding |
| | | | | protein (G protein), alpha |
| | | | | inhibiting activity polypeptide 2 |
| 1471 | Protein | NP_002061 | GNAI2 | guanine nucleotide binding |
| | | | | protein (G protein), alpha |
| | | | | inhibiting activity polypeptide 2 |
| 1472 | DNA | NM_006755 | TALDO1 | transaldolase 1 |
| 1473 | Protein | NP_006746 | TALDO1 | transaldolase 1 |
| 1474 | DNA | NM_014755 | TRIP-Br2 | transcriptional regulator |
| | | | | interacting with the PHS- |
| | | | | bromodomain 2 |
| 1475 | Protein | NP_055570 | TRIP-Br2 | transcriptional regulator |
| | | | | interacting with the PHS- |
| | | | | bromodomain 2 |
| 1476 | DNA | U80017 | | Cluster Incl. U80017: Homo |
| | | | | sapiens basic transcription |
| | | | | factor 2 p44 (btf2p44) gene, |
| | | | | partial cds, neuronal apoptosis |
| | | | | inhibitory protein (naip) and |
| | | | | survival motor neuron protein |
| | | | | (smn) genes, complete cds |
| | | | | /cds = (33.917) /gb = U80017 |
| | | | | /gi = 1737211 /ug = Hs.77306 /len |
| 1477 | Protein | U80017 (Translation) | | Cluster Incl. U80017: Homo |
| | | | | sapiens basic transcription |
| | | | | factor 2 p44 (btf2p44) gene, |
| | | | | partial cds, neuronal apoptosis |
| | | | | inhibitory protein (naip) and |
| | | | | survival motor neuron protein |
| | | | | (smn) genes, complete cds |
| | | | | /cds = (33.917) /gb = U80017 |
| | | | | /gi = 1737211 /ug = Hs.77306 /len |
| 1478 | DNA | NM_018453 | C14orf11 | chromosome 14 open reading |
| | | | | frame 11 |
| 1479 | Protein | NP_060923 | C14orf11 | chromosome 14 open reading |
| | | | | frame 11 |
| 1480 | DNA | U93305 | | Cluster Incl. U93305: Homo |
| | | | | sapiens A4 differentiation- |
| | | | | dependent protein (A4), triple |
| | | | | LIM domain protein (LMO6), |
| | | | | and synaptophysin (SYP) |
| | | | | genes, complete cds; and |
| | | | | calcium channel alpha-1 |
| | | | | subunit (CACNA1F) gene, |
| | | | | partial cds /cds = (75.533) |
| | | | | /gb = U93305 /gi = 270759 |
| 1481 | Protein | AAB92359 | | Cluster Incl. U93305: Homo |
| | | | | sapiens A4 differentiation- |
| | | | | dependent protein (A4), triple |
| | | | | LIM domain protein (LMO6), |
| | | | | and synaptophysin (SYP) |
| | | | | genes, complete cds; and |
| | | | | calcium channel alpha-1 |
| | | | | subunit (CACNA1F) gene, |
| | | | | partial cds /cds = (75.533) |
| | | | | /gb = U93305 /gi = 270759 |
| 1482 | DNA | NM_007103 | NDUFV1 | NADH dehydrogenase |
| | | | | (ubiquinone) flavoprotein 1, |
| | | | | 51 kDa |
| 1483 | Protein | NP_009034 | NDUFV1 | NADH dehydrogenase |
| | | | | (ubiquinone) flavoprotein 1, |
| | | | | 51 kDa |
| 1484 | DNA | NM_002766 | PRPSAP1 | phosphoribosyl pyrophosphate |
| | | | | synthetase-associated protein 1 |
| 1485 | Protein | NP_002757 | PRPSAP1 | phosphoribosyl pyrophosphate |
| | | | | synthetase-associated protein 1 |
| 1486 | DNA | NM_001662 | ARF5 | ADP-ribosylation factor 5 |
| 1487 | Protein | NP_001653 | ARF5 | ADP-ribosylation factor 5 |
| 1488 | DNA | NM_002346 | LY6E | lymphocyte antigen 6 complex, |
| | | | | locus E |
| 1489 | Protein | NP_002337 | LY6E | lymphocyte antigen 6 complex, |
| | | | | locus E |
| 1490 | DNA | NM_006736 | DNAJB2 | DnaJ (Hsp40) homolog, |
| | | | | subfamily B, member 2 |
| 1491 | Protein | NP_006727 | DNAJB2 | DnaJ (Hsp40) homolog, |
| | | | | subfamily B, member 2 |
| 1492 | DNA | NM_006801 | KDELR1 | KDEL (Lys-Asp-Glu-Leu) |
| | | | | endoplasmic reticulum protein |
| | | | | retention receptor 1 |
| 1493 | Protein | NP_006792 | KDELR1 | KDEL (Lys-Asp-Glu-Leu) |
| | | | | endoplasmic reticulum protein |
| | | | | retention receptor 1 |
| 1494 | DNA | NM_004231 | ATP6V1F | ATPase, H+ transporting, |
| | | | | lysosomal 14 kDa, V1 subunit F |
| 1495 | Protein | NP_004222 | ATP6V1F | ATPase, H+ transporting, |
| | | | | lysosomal 14 kDa, V1 subunit F |
| 1496 | DNA | NM_000516 | GNAS | GNAS complex locus |
| 1497 | Protein | NP_000507 | GNAS | GNAS complex locus |
| 1498 | DNA | NM_016592 | GNAS | GNAS complex locus |
| 1499 | Protein | NP_057676 | GNAS | GNAS complex locus |
| 1500 | DNA | NM_080425 | GNAS | GNAS complex locus |
| 1501 | Protein | NP_536350 | GNAS | GNAS complex locus |
| 1502 | DNA | NM_002618 | PEX13 | peroxisome biogenesis factor |
| | | | | 13 |
| 1503 | Protein | NP_002609 | PEX13 | peroxisome biogenesis factor |
| | | | | 13 |
| 1504 | DNA | NM_006638 | RPP40 | ribonuclease P, 40 kD subunit |
| 1505 | Protein | NP_006629 | RPP40 | ribonuclease P, 40 kD subunit |
| 1506 | DNA | NM_017544 | NRF | transcription factor NRF |
| 1507 | Protein | NP_060014 | NRF | transcription factor NRF |
| 1508 | DNA | AC004893 | | Cluster Incl. AC004893: Homo |
| | | | | sapiens PAC clone DJ0808A01 |
| | | | | from 7q21.1-q31.1 |
| | | | | /cds = (0.2138) /gb = AC004893 |
| | | | | /gi = 3694662 /ug = Hs.119120 |
| | | | | /len = 2139 |
| 1509 | DNA | NM_005063 | SCD | stearoyl-CoA desaturase (delta- |
| | | | | 9-desaturase) |
| 1510 | Protein | NP_005054 | SCD | stearoyl-CoA desaturase (delta- |
| | | | | 9-desaturase) |
| 1511 | DNA | NM_012345 | NUFIP1 | nuclear fragile X mental |
| | | | | retardation protein interacting |
| | | | | protein 1 |
| 1512 | Protein | NP_036477 | NUFIP1 | nuclear fragile X mental |
| | | | | retardation protein interacting |
| | | | | protein 1 |
| 1513 | DNA | NM_004379 | CREB1 | cAMP responsive element |
| | | | | binding protein 1 |
| 1514 | Protein | NP_004370 | CREB1 | cAMP responsive element |
| | | | | binding protein 1 |
| 1515 | DNA | NM_134442 | CREB1 | cAMP responsive element |
| | | | | binding protein 1 |
| 1516 | Protein | NP_604391 | CREB1 | cAMP responsive element |
| | | | | binding protein 1 |
| 1517 | DNA | D86961 | LHFPL2 | lipoma HMGIC fusion partner- |
| | | | | like 2 |
| 1518 | Protein | D86961 (Translation) | LHFPL2 | lipoma HMGIC fusion partner- |
| | | | | like 2 |
| 1519 | DNA | AL031778 | | Cluster Incl. |
| | | | | AL031778: dJ34B21.4.1 |
| | | | | (nuclear transcription factor Y, |
| | | | | alpha (CCAAT-Binding |
| | | | | transcription factor subunit B, |
| | | | | CBF-B, CAAT-Box DNA |
| | | | | binding pr /cds = (175.1218) |
| | | | | /gb = AL031778 /gi = 4153958 |
| | | | | /ug = Hs.797 /len = 3778 |
| 1520 | DNA | NM_015517 | MIZF | MBD2 (methyl-CpG-binding |
| | | | | protein)-interacting zinc finger |
| | | | | protein |
| 1521 | Protein | NP_056332 | MIZF | MBD2 (methyl-CpG-binding |
| | | | | protein)-interacting zinc finger |
| | | | | protein |
| 1522 | DNA | X98834 | SALL2 | sal-like 2 (Drosophila) |
| 1523 | DNA | NM_004425 | ECM1 | extracellular matrix protein 1 |
| 1524 | Protein | NP_004416 | ECM1 | extracellular matrix protein 1 |
| 1525 | DNA | NM_022664 | ECM1 | extracellular matrix protein 1 |
| 1526 | Protein | NP_073155 | ECM1 | extracellular matrix protein 1 |
| 1527 | DNA | NM_000156 | GAMT | guanidinoacetate N- |
| | | | | methyltransferase |
| 1528 | Protein | NP_000147 | GAMT | guanidinoacetate N- |
| | | | | methyltransferase |
| 1529 | DNA | NM_138924 | GAMT | guanidinoacetate N- |
| | | | | methyltransferase |
| 1530 | Protein | NP_620279 | GAMT | guanidinoacetate N- |
| | | | | methyltransferase |
| 1531 | DNA | NM_018224 | FLJ10803 | hypothetical protein FLJ10803 |
| 1532 | Protein | NP_060694 | FLJ10803 | hypothetical protein FLJ10803 |
| 1533 | DNA | NM_018999 | KIAA1128 | KIAA1128 protein |
| 1534 | Protein | NP_061872 | KIAA1128 | KIAA1128 protein |
| 1535 | DNA | NM_004502 | HOXB7 | homeo box B7 |
| 1536 | Protein | NP_004493 | HOXB7 | homeo box B7 |
| 1537 | DNA | NM_017790 | RGS3 | regulator of G-protein |
| | | | | signalling 3 |
| 1538 | Protein | NP_060260 | RGS3 | regulator of G-protein |
| | | | | signalling 3 |
| 1539 | DNA | NM_021106 | RGS3 | regulator of G-protein |
| | | | | signalling 3 |
| 1540 | Protein | NP_066929 | RGS3 | regulator of G-protein |
| | | | | signalling 3 |
| 1541 | DNA | NM_130795 | RGS3 | regulator of G-protein |
| | | | | signalling 3 |
| 1542 | Protein | NP_570613 | RGS3 | regulator of G-protein |
| | | | | signalling 3 |
| 1543 | DNA | NM_134427 | RGS3 | regulator of G-protein |
| | | | | signalling 3 |
| 1544 | Protein | NP_602299 | RGS3 | regulator of G-protein |
| | | | | signalling 3 |
| 1545 | DNA | NM_032182 | KIAA0157 | KIAA0157 protein |
| 1546 | Protein | NP_115558 | KIAA0157 | KIAA0157 protein |
| 1547 | DNA | NM_013446 | MKRN1 | makorin, ring finger protein, 1 |
| 1548 | Protein | NP_038474 | MKRN1 | makorin, ring finger protein, 1 |
| 1549 | DNA | NM_015156 | RCOR | REST corepressor |
| 1550 | Protein | NP_055971 | RCOR | REST corepressor |
| 1551 | DNA | NM_001682 | ATP2B1 | ATPase, Ca++ transporting, |
| | | | | plasma membrane 1 |
| 1552 | Protein | NP_001673 | ATP2B1 | ATPase, Ca++ transporting, |
| | | | | plasma membrane 1 |
| 1553 | DNA | NM_003342 | UBE2G1 | ubiquitin-conjugating enzyme |
| | | | | E2G 1 (UBC7 homolog, C. elegans) |
| 1554 | Protein | NP_003333 | UBE2G1 | ubiquitin-conjugating enzyme |
| | | | | E2G 1 (UBC7 homolog, C. elegans) |
| 1555 | DNA | NM_003470 | USP7 | ubiquitin specific protease 7 |
| | | | | (herpes virus-associated) |
| 1556 | Protein | NP_003461 | USP7 | ubiquitin specific protease 7 |
| | | | | (herpes virus-associated) |
| 1557 | DNA | NM_000688 | ALAS1 | aminolevulinate, delta-, |
| | | | | synthase 1 |
| 1558 | Protein | NP_000679 | ALAS1 | aminolevulinate, delta-, |
| | | | | synthase 1 |
| 1559 | DNA | NM_005153 | USP10 | ubiquitin specific protease 10 |
| 1560 | Protein | NP_005144 | USP10 | ubiquitin specific protease 10 |
| 1561 | DNA | NM_003362 | UNG | uracil-DNA glycosylase |
| 1562 | Protein | NP_003353 | UNG | uracil-DNA glycosylase |
| 1563 | DNA | NM_080911 | UNG | uracil-DNA glycosylase |
| 1564 | Protein | NP_550433 | UNG | uracil-DNA glycosylase |
| 1565 | DNA | NM_015153 | PHF3 | PHD finger protein 3 |
| 1566 | Protein | NP_055968 | PHF3 | PHD finger protein 3 |
| 1567 | DNA | NM_003488 | AKAP1 | A kinase (PRKA) anchor |
| | | | | protein 1 |
| 1568 | Protein | NP_003479 | AKAP1 | A kinase (PRKA) anchor |
| | | | | protein 1 |
| 1569 | DNA | NM_139275 | AKAP1 | A kinase (PRKA) anchor |
| | | | | protein 1 |
| 1570 | Protein | NP_644804 | AKAP1 | A kinase (PRKA) anchor |
| | | | | protein 1 |
| 1571 | DNA | NM_004582 | RABGGTB | Rab geranylgeranyltransferase, |
| | | | | beta subunit |
| 1572 | Protein | NP_004573 | RABGGTB | Rab geranylgeranyltransferase, |
| | | | | beta subunit |
| 1573 | DNA | NM_002713 | PPP1R8 | protein phosphatase 1, |
| | | | | regulatory (inhibitor) subunit 8 |
| 1574 | Protein | NP_002704 | PPP1R8 | protein phosphatase 1, |
| | | | | regulatory (inhibitor) subunit 8 |
| 1575 | DNA | NM_014110 | PPP1R8 | protein phosphatase 1, |
| | | | | regulatory (inhibitor) subunit 8 |
| 1576 | Protein | NP_054829 | PPP1R8 | protein phosphatase 1, |
| | | | | regulatory (inhibitor) subunit 8 |
| 1577 | DNA | NM_138558 | PPP1R8 | protein phosphatase 1, |
| | | | | regulatory (inhibitor) subunit 8 |
| 1578 | Protein | NP_612568 | PPP1R8 | protein phosphatase 1, |
| | | | | regulatory (inhibitor) subunit 8 |
| 1579 | DNA | NM_004354 | | Homo sapiens mRNA; cDNA |
| | | | | DKFZp434B142 (from clone |
| | | | | DKFZp434B142), mRNA |
| | | | | sequence |
| 1580 | Protein | NP_004345 | | Homo sapiens mRNA; cDNA |
| | | | | DKFZp434B142 (from clone |
| | | | | DKFZp434B142), mRNA |
| | | | | sequence |
| 1581 | DNA | NM_012234 | RYBP | RING1 and YY1 binding |
| | | | | protein |
| 1582 | Protein | NP_036366 | RYBP | RING1 and YY1 binding |
| | | | | protein |
| 1583 | DNA | NM_001315 | MAPK14 | mitogen-activated protein |
| | | | | kinase 14 |
| 1584 | Protein | NP_001306 | MAPK14 | mitogen-activated protein |
| | | | | kinase 14 |
| 1585 | DNA | NM_139012 | MAPK14 | mitogen-activated protein |
| | | | | kinase 14 |
| 1586 | Protein | NP_620581 | MAPK14 | mitogen-activated protein |
| | | | | kinase 14 |
| 1587 | DNA | NM_139013 | MAPK14 | mitogen-activated protein |
| | | | | kinase 14 |
| 1588 | Protein | NP_620582 | MAPK14 | mitogen-activated protein |
| | | | | kinase 14 |
| 1589 | DNA | NM_139014 | MAPK14 | mitogen-activated protein |
| | | | | kinase 14 |
| 1590 | Protein | NP_620583 | MAPK14 | mitogen-activated protein |
| | | | | kinase 14 |
| 1591 | DNA | NM_014962 | BTBD3 | BTB (POZ) domain containing 3 |
| 1592 | Protein | NP_055777 | BTBD3 | BTB (POZ) domain containing 3 |
| 1593 | DNA | NM_006340 | BAIAP2 | BAI1-associated protein 2 |
| 1594 | Protein | NP_006331 | BAIAP2 | BAI1-associated protein 2 |
| 1595 | DNA | NM_017450 | BAIAP2 | BAI1-associated protein 2 |
| 1596 | Protein | NP_059344 | BAIAP2 | BAI1-associated protein 2 |
| 1597 | DNA | NM_017451 | BAIAP2 | BAI1-associated protein 2 |
| 1598 | Protein | NP_059345 | BAIAP2 | BAI1-associated protein 2 |
| 1599 | DNA | AL049227 | | Homo sapiens mRNA; cDNA |
| | | | | DKFZp564N1116 (from clone |
| | | | | DKFZp564N1116), mRNA |
| | | | | sequence |
| 1600 | DNA | NM_012066 | 20D7-FC4 | hypothetical protein 20D7-FC4 |
| 1601 | Protein | NP_036198 | 20D7-FC4 | hypothetical protein 20D7-FC4 |
| 1602 | DNA | NM_006675 | NET-5 | transmembrane 4 superfamily |
| | | | | member tetraspan NET-5 |
| 1603 | Protein | NP_006666 | NET-5 | transmembrane 4 superfamily |
| | | | | member tetraspan NET-5 |
| 1604 | DNA | AL080062 | DKFZP564I122 | DKFZP564I122 protein |
| 1605 | Protein | AL080062 | DKFZP564I122 | DKFZP564I122 protein |
| | | (Translation) | | |
| 1606 | DNA | NM_005677 | COLQ | collagen-like tail subunit |
| | | | | (single strand of homotrimer) |
| | | | | of asymmetric |
| | | | | acetylcholinesterase |
| 1607 | Protein | NP_005668 | COLQ | collagen-like tail subunit |
| | | | | (single strand of homotrimer) |
| | | | | of asymmetric |
| | | | | acetylcholinesterase |
| 1608 | DNA | NM_080538 | COLQ | collagen-like tail subunit |
| | | | | (single strand of homotrimer) |
| | | | | of asymmetric |
| | | | | acetylcholinesterase |
| 1609 | Protein | NP_536799 | COLQ | collagen-like tail subunit |
| | | | | (single strand of homotrimer) |
| | | | | of asymmetric |
| | | | | acetylcholinesterase |
| 1610 | DNA | NM_080539 | COLQ | collagen-like tail subunit |
| | | | | (single strand of homotrimer) |
| | | | | of asymmetric |
| | | | | acetylcholinesterase |
| 1611 | Protein | NP_536800 | COLQ | collagen-like tail subunit |
| | | | | (single strand of homotrimer) |
| | | | | of asymmetric |
| | | | | acetylcholinesterase |
| 1612 | DNA | NM_015064 | ELKS | ELKS protein |
| 1613 | Protein | NP_055879 | ELKS | ELKS protein |
| 1614 | DNA | NM_005513 | GTF2E1 | general transcription factor IIE, |
| | | | | polypeptide 1, alpha 56 kDa |
| 1615 | Protein | NP_005504 | GTF2E1 | general transcription factor IIE, |
| | | | | polypeptide 1, alpha 56 kDa |
| 1616 | DNA | NM_013310 | AF038169 | hypothetical protein AF038169 |
| 1617 | Protein | NP_037442 | AF038169 | hypothetical protein AF038169 |
| 1618 | DNA | NM_003846 | PEX11B | peroxisomal biogenesis factor |
| | | | | 11B |
| 1619 | Protein | NP_003837 | PEX11B | peroxisomal biogenesis factor |
| | | | | 11B |
| 1620 | DNA | NM_014602 | PIK3R4 | phosphoinositide-3-kinase, |
| | | | | regulatory subunit 4, p150 |
| 1621 | Protein | NP_055417 | PIK3R4 | phosphoinositide-3-kinase, |
| | | | | regulatory subunit 4, p150 |
| 1622 | DNA | NM_012151 | F8A | coagulation factor VIII- |
| | | | | associated (intronic transcript) |
| 1623 | Protein | NP_036283 | F8A | coagulation factor VIII- |
| | | | | associated (intronic transcript) |
| 1624 | DNA | NM_005334 | HCFC1 | host cell factor C1 (VP16- |
| | | | | accessory protein) |
| 1625 | Protein | NP_005325 | HCFC1 | host cell factor C1 (VP16- |
| | | | | accessory protein) |
| 1626 | DNA | NM_004295 | TRAF4 | TNF receptor-associated factor 4 |
| 1627 | Protein | NP_004286 | TRAF4 | TNF receptor-associated factor 4 |
| 1628 | DNA | NM_145751 | TRAF4 | TNF receptor-associated factor 4 |
| 1629 | Protein | NP_665694 | TRAF4 | TNF receptor-associated factor 4 |
| 1630 | DNA | NM_019005 | FLJ20323 | hypothetical protein FLJ20323 |
| 1631 | Protein | NP_061878 | FLJ20323 | hypothetical protein FLJ20323 |
| 1632 | DNA | NM_002653 | PITX1 | paired-like homeodomain |
| | | | | transcription factor 1 |
| 1633 | Protein | NP_002644 | PITX1 | paired-like homeodomain |
| | | | | transcription factor 1 |
| 1634 | DNA | NM_001810 | CENPB | centromere protein B, 80 kDa |
| 1635 | Protein | NP_001801 | CENPB | centromere protein B, 80 kDa |
| 1636 | DNA | NM_004239 | TRIP11 | thyroid hormone receptor |
| | | | | interactor 11 |
| 1637 | Protein | NP_004230 | TRIP11 | thyroid hormone receptor |
| | | | | interactor 11 |
| 1638 | DNA | NM_006910 | RBBP6 | retinoblastoma binding protein 6 |
| 1639 | Protein | NP_008841 | RBBP6 | retinoblastoma binding protein 6 |
| 1640 | DNA | NM_004697 | PRPF4 | PRP4 pre-mRNA processing |
| | | | | factor 4 homolog (yeast) |
| 1641 | Protein | NP_004688 | PRPF4 | PRP4 pre-mRNA processing |
| | | | | factor 4 homolog (yeast) |
| 1642 | DNA | NM_018096 | FLJ10458 | hypothetical protein similar to |
| | | | | beta-transducin family |
| 1643 | Protein | NP_060566 | FLJ10458 | hypothetical protein similar to |
| | | | | beta-transducin family |
| 1644 | DNA | NM_014255 | TMEM4 | transmembrane protein 4 |
| 1645 | Protein | NP_055070 | TMEM4 | transmembrane protein 4 |
| 1646 | DNA | NM_014001 | GGA3 | golgi associated, gamma |
| | | | | adaptin ear containing, ARF |
| | | | | binding protein 3 |
| 1647 | Protein | NP_054720 | GGA3 | golgi associated, gamma |
| | | | | adaptin ear containing, ARF |
| | | | | binding protein 3 |
| 1648 | DNA | NM_138619 | GGA3 | golgi associated, gamma |
| | | | | adaptin ear containing, ARF |
| | | | | binding protein 3 |
| 1649 | Protein | NP_619525 | GGA3 | golgi associated, gamma |
| | | | | adaptin ear containing, ARF |
| | | | | binding protein 3 |
| 1650 | DNA | NM_003629 | PIK3R3 | phosphoinositide-3-kinase, |
| | | | | regulatory subunit, polypeptide |
| | | | | 3 (p55, gamma) |
| 1651 | Protein | NP_003620 | PIK3R3 | phosphoinositide-3-kinase, |
| | | | | regulatory subunit, polypeptide |
| | | | | 3 (p55, gamma) |
| 1652 | DNA | NM_153250 | MGC40413 | hypothetical protein |
| | | | | MGC40413 |
| 1653 | Protein | NP_694982 | MGC40413 | hypothetical protein |
| | | | | MGC40413 |
| 1654 | DNA | NM_001663 | ARF6 | ADP-ribosylation factor 6 |
| 1655 | Protein | NP_001654 | ARF6 | ADP-ribosylation factor 6 |
| 1656 | DNA | NM_001687 | ATP5D | ATP synthase, H+ transporting, |
| | | | | mitochondrial F1 complex, |
| | | | | delta subunit |
| 1657 | Protein | NP_001678 | ATP5D | ATP synthase, H+ transporting, |
| | | | | mitochondrial F1 complex, |
| | | | | delta subunit |
| 1658 | DNA | NM_001894 | CSNK1E | casein kinase 1, epsilon |
| 1659 | Protein | NP_001885 | CSNK1E | casein kinase 1, epsilon |
| 1660 | DNA | NM_152221 | CSNK1E | casein kinase 1, epsilon |
| 1661 | DNA | NM_005871 | SPF30 | splicing factor 30, survival of |
| | | | | motor neuron-related |
| 1662 | Protein | NP_005862 | SPF30 | splicing factor 30, survival of |
| | | | | motor neuron-related |
| 1663 | DNA | AL080234 | | Homo sapiens clone FBD3 Cri- |
| | | | | du-chat critical region mRNA, |
| | | | | mRNA sequence |
| 1664 | DNA | NM_003799 | RNMT | RNA (guanine-7-) |
| | | | | methyltransferase |
| 1665 | Protein | NP_003790 | RNMT | RNA (guanine-7-) |
| | | | | methyltransferase |
| 1666 | DNA | NM_015144 | BDG-29 | BDG-29 proten |
| 1667 | Protein | NP_055959 | BDG-29 | BDG-29 proten |
| 1668 | DNA | NM_032909 | BDG-29 | BDG-29 proten |
| 1669 | DNA | AB014542 | TNRC15 | trinucleotide repeat containing |
| | | | | 15 |
| 1670 | Protein | AB014542 | TNRC15 | trinucleotide repeat containing |
| | | (Translation) | | 15 |
| 1671 | DNA | NM_001359 | DECR1 | 2,4-dienoyl CoA reductase 1, |
| | | | | mitochondrial |
| 1672 | Protein | NP_001350 | DECR1 | 2,4-dienoyl CoA reductase 1, |
| | | | | mitochondrial |
| 1673 | DNA | NM_023012 | FLJ11021 | hypothetical protein FLJ11021 |
| | | | | similar to splicing factor, |
| | | | | arginine/serine-rich 4 |
| 1674 | Protein | NP_075388 | FLJ11021 | hypothetical protein FLJ11021 |
| | | | | similar to splicing factor, |
| | | | | arginine/serine-rich 4 |
| 1675 | DNA | NM_006265 | RAD21 | RAD21 homolog (S. pombe) |
| 1676 | Protein | NP_006256 | RAD21 | RAD21 homolog (S. pombe) |
| 1677 | DNA | NM_007275 | FUS1 | lung cancer candidate |
| 1678 | Protein | NP_009206 | FUS1 | lung cancer candidate |
| 1679 | DNA | NM_002391 | MDK | midkine (neurite growth- |
| | | | | promoting factor 2) |
| 1680 | Protein | NP_002382 | MDK | midkine (neurite growth- |
| | | | | promoting factor 2) |
| 1681 | DNA | NM_007061 | CDC42EP1 | CDC42 effector protein (Rho |
| | | | | GTPase binding) 1 |
| 1682 | Protein | NP_008992 | CDC42EP1 | CDC42 effector protein (Rho |
| | | | | GTPase binding) 1 |
| 1683 | DNA | NM_152243 | CDC42EP1 | CDC42 effector protein (Rho |
| | | | | GTPase binding) 1 |
| 1684 | Protein | NP_689449 | CDC42EP1 | CDC42 effector protein (Rho |
| | | | | GTPase binding) 1 |
| 1685 | DNA | NM_005620 | S100A11 | S100 calcium binding protein |
| | | | | A11 (calgizzarin) |
| 1686 | Protein | NP_005611 | S100A11 | S100 calcium binding protein |
| | | | | A11 (calgizzarin) |
| 1687 | DNA | NM_004075 | CRY1 | cryptochrome 1 (photolyase- |
| | | | | like) |
| 1688 | Protein | NP_004066 | CRY1 | cryptochrome 1 (photolyase- |
| | | | | like) |
| 1689 | DNA | NM_017503 | SURF2 | surfeit 2 |
| 1690 | Protein | NP_059973 | SURF2 | surfeit 2 |
| 1691 | DNA | NM_001478 | GALGT | UDP-N-acetyl-alpha-D- |
| | | | | galactosamine:(N- |
| | | | | acetylneuraminyl)- |
| | | | | galactosylglucosylceramide N- |
| | | | | acetylgalactosaminyltransferase |
| | | | | (GalNAc-T) |
| 1692 | Protein | NP_001469 | GALGT | UDP-N-acetyl-alpha-D- |
| | | | | galactosamine:(N- |
| | | | | acetylneuraminyl)- |
| | | | | galactosylglucosylceramide N- |
| | | | | acetylgalactosaminyltransferase |
| | | | | (GalNAc-T) |
| 1693 | DNA | NM_000110 | DPYD | dihydropyrimidine |
| | | | | dehydrogenase |
| 1694 | Protein | NP_000101 | DPYD | dihydropyrimidine |
| | | | | dehydrogenase |
| 1695 | DNA | D26488 | KIAA0007 | KIAA0007 protein |
| 1696 | Protein | D26488 (Translation) | KIAA0007 | KIAA0007 protein |
| 1697 | DNA | NM_002475 | MLC1SA | myosin light chain 1 slow a |
| 1698 | Protein | NP_002466 | MLC1SA | myosin light chain 1 slow a |
| 1699 | DNA | W21827 | DKFZP564O092 | DKFZP564O092 protein |
| 1700 | DNA | NM_002496 | NDUFS8 | NADH dehydrogenase |
| | | | | (ubiquinone) Fe—S protein 8, |
| | | | | 23 kDa (NADH-coenzyme Q |
| | | | | reductase) |
| 1701 | Protein | NP_002487 | NDUFS8 | NADH dehydrogenase |
| | | | | (ubiquinone) Fe—S protein 8, |
| | | | | 23 kDa (NADH-coenzyme Q |
| | | | | reductase) |
| 1702 | DNA | NM_031206 | FLJ12525 | hypothetical protein FLJ12525 |
| 1703 | Protein | NP_112483 | FLJ12525 | hypothetical protein FLJ12525 |
| 1704 | DNA | NM_002871 | RABIF | RAB interacting factor |
| 1705 | Protein | NP_002862 | RABIF | RAB interacting factor |
| 1706 | DNA | NM_003631 | PARG | poly (ADP-ribose) |
| | | | | glycohydrolase |
| 1707 | Protein | NP_003622 | PARG | poly (ADP-ribose) |
| | | | | glycohydrolase |
| 1708 | DNA | NM_007026 | DUSP14 | dual specificity phosphatase 14 |
| 1709 | Protein | NP_008957 | DUSP14 | dual specificity phosphatase 14 |
| 1710 | DNA | NM_007024 | PL6 | PL6 protein |
| 1711 | Protein | NP_008955 | PL6 | PL6 protein |
| 1712 | DNA | NM_003815 | ADAM15 | a disintegrin and |
| | | | | metalloproteinase domain 15 |
| | | | | (metargidin) |
| 1713 | Protein | NP_003806 | ADAM15 | a disintegrin and |
| | | | | metalloproteinase domain 15 |
| | | | | (metargidin) |
| 1714 | DNA | NM_004215 | EBAG9 | estrogen receptor binding site |
| | | | | associated, antigen, 9 |
| 1715 | Protein | NP_004206 | EBAG9 | estrogen receptor binding site |
| | | | | associated, antigen, 9 |
| 1716 | DNA | NM_006421 | BIG1 | brefeldin A-inhibited guanine |
| | | | | nucleotide-exchange protein 1 |
| 1717 | Protein | NP_006412 | BIG1 | brefeldin A-inhibited guanine |
| | | | | nucleotide-exchange protein 1 |
| 1718 | DNA | NM_014284 | NCDN | neurochondrin |
| 1719 | Protein | NP_055099 | NCDN | neurochondrin |
| 1720 | DNA | NM_021809 | TGIF2 | TGFB-induced factor 2 (TALE |
| | | | | family homeobox) |
| 1721 | Protein | NP_068581 | TGIF2 | TGFB-induced factor 2 (TALE |
| | | | | family homeobox) |
| 1722 | DNA | NM_015125 | CIC | capicua homolog (Drosophila) |
| 1723 | Protein | NP_055940 | CIC | capicua homolog (Drosophila) |
| 1724 | DNA | NM_004897 | MINPP1 | multiple inositol polyphosphate |
| | | | | histidine phosphatase, 1 |
| 1725 | Protein | NP_004888 | MINPP1 | multiple inositol polyphosphate |
| | | | | histidine phosphatase, 1 |
| 1726 | DNA | NM_006928 | SILV | silver homolog (mouse) |
| 1727 | Protein | NP_008859 | SILV | silver homolog (mouse) |
| 1728 | DNA | NM_015288 | KIAA0239 | KIAA0239 protein |
| 1729 | Protein | NP_056103 | KIAA0239 | KIAA0239 protein |
| 1730 | DNA | NM_006322 | TUBGCP3 | tubulin, gamma complex |
| | | | | associated protein 3 |
| 1731 | Protein | NP_006313 | TUBGCP3 | tubulin, gamma complex |
| | | | | associated protein 3 |
| 1732 | DNA | AL049321 | | Homo sapiens mRNA; cDNA |
| | | | | DKFZp564D156 (from clone |
| | | | | DKFZp564D156), mRNA |
| | | | | sequence |
| 1733 | DNA | NM_007010 | ROK1 | ATP-dependent RNA helicase |
| 1734 | Protein | NP_008941 | ROK1 | ATP-dependent RNA helicase |
| 1735 | DNA | NM_152300 | ROK1 | ATP-dependent RNA helicase |
| 1736 | Protein | NP_689513 | ROK1 | ATP-dependent RNA helicase |
| 1737 | DNA | NM_001155 | ANXA6 | annexin A6 |
| 1738 | Protein | NP_001146 | ANXA6 | annexin A6 |
| 1739 | DNA | NM_004033 | ANXA6 | annexin A6 |
| 1740 | Protein | NP_004024 | ANXA6 | annexin A6 |
| 1741 | DNA | NM_007005 | BCE-1 | BCE-1 protein |
| 1742 | Protein | NP_008936 | BCE-1 | BCE-1 protein |
| 1743 | DNA | NM_000202 | IDS | iduronate 2-sulfatase (Hunter |
| | | | | syndrome) |
| 1744 | Protein | NP_000193 | IDS | iduronate 2-sulfatase (Hunter |
| | | | | syndrome) |
| 1745 | DNA | NM_006123 | IDS | iduronate 2-sulfatase (Hunter |
| | | | | syndrome) |
| 1746 | Protein | NP_006114 | IDS | iduronate 2-sulfatase (Hunter |
| | | | | syndrome) |
| 1747 | DNA | NM_000018 | ACADVL | acyl-Coenzyme A |
| | | | | dehydrogenase, very long chain |
| 1748 | Protein | NP_000009 | ACADVL | acyl-Coenzyme A |
| | | | | dehydrogenase, very long chain |
| 1749 | DNA | NM_006766 | ZNF220 | zinc finger protein 220 |
| 1750 | Protein | NP_006757 | ZNF220 | zinc finger protein 220 |
| 1751 | DNA | NM_003682 | MADD | MAP-kinase activating death |
| | | | | domain |
| 1752 | Protein | NP_003673 | MADD | MAP-kinase activating death |
| | | | | domain |
| 1753 | DNA | NM_130470 | MADD | MAP-kinase activating death |
| | | | | domain |
| 1754 | Protein | NP_569826 | MADD | MAP-kinase activating death |
| | | | | domain |
| 1755 | DNA | NM_130471 | MADD | MAP-kinase activating death |
| | | | | domain |
| 1756 | Protein | NP_569827 | MADD | MAP-kinase activating death |
| | | | | domain |
| 1757 | DNA | NM_130472 | MADD | MAP-kinase activating death |
| | | | | domain |
| 1758 | Protein | NP_569828 | MADD | MAP-kinase activating death |
| | | | | domain |
| 1759 | DNA | AF070546 | DKFZp451J0118 | hypothetical protein |
| | | | | DKFZp451J0118 |
| 1760 | DNA | NM_001450 | FHL2 | four and a half LIM domains 2 |
| 1761 | Protein | NP_001441 | FHL2 | four and a half LIM domains 2 |
| 1762 | DNA | NM_007359 | MLN51 | MLN51 protein |
| 1763 | Protein | NP_031385 | MLN51 | MLN51 protein |
| 1764 | DNA | AA015605 | FLJ20811 | hypothetical protein FLJ20811 |
| 1765 | DNA | NM_006830 | UQCR | ubiquinol-cytochrome c |
| | | | | reductase (6.4 kD) subunit |
| 1766 | Protein | NP_006821 | UQCR | ubiquinol-cytochrome c |
| | | | | reductase (6.4 kD) subunit |
| 1767 | DNA | NM_006302 | GCS1 | glucosidase I |
| 1768 | Protein | NP_006293 | GCS1 | glucosidase I |
| 1769 | DNA | NM_001383 | DPH2L1 | diptheria toxin resistance |
| | | | | protein required for |
| | | | | diphthamide biosynthesis-like 1 |
| | | | | (S. cerevisiae) |
| 1770 | Protein | NP_001374 | DPH2L1 | diptheria toxin resistance |
| | | | | protein required for |
| | | | | diphthamide biosynthesis-like 1 |
| | | | | (S. cerevisiae) |
| 1771 | DNA | NM_004592 | SFRS8 | splicing factor, arginine/serine- |
| | | | | rich 8 (suppressor-of-white- |
| | | | | apricot homolog, Drosophila) |
| 1772 | Protein | NP_004583 | SFRS8 | splicing factor, arginine/serine- |
| | | | | rich 8 (suppressor-of-white- |
| | | | | apricot homolog, Drosophila) |
| 1773 | DNA | NM_152235 | SFRS8 | splicing factor, arginine/serine- |
| | | | | rich 8 (suppressor-of-white- |
| | | | | apricot homolog, Drosophila) |
| 1774 | Protein | NP_689421 | SFRS8 | splicing factor, arginine/serine- |
| | | | | rich 8 (suppressor-of-white- |
| | | | | apricot homolog, Drosophila) |
| 1775 | DNA | NM_015029 | POP1 | processing of precursors 1 |
| 1776 | Protein | NP_055844 | POP1 | processing of precursors 1 |
| 1777 | DNA | NM_014783 | ARHGAP11A | KIAA0013 gene product |
| 1778 | Protein | NP_055598 | ARHGAP11A | KIAA0013 gene product |
| 1779 | DNA | NM_002936 | RNASEH1 | ribonuclease H1 |
| 1780 | Protein | NP_002927 | RNASEH1 | ribonuclease H1 |
| 1781 | DNA | NM_005802 | TP53BPL | tumor protein p53-binding |
| | | | | protein |
| 1782 | Protein | NP_005793 | TP53BPL | tumor protein p53-binding |
| | | | | protein |
| 1783 | DNA | NM_002072 | | Homo sapiens mRNA; cDNA |
| | | | | DKFZp686D0521 (from clone |
| | | | | DKFZp686D0521), mRNA |
| | | | | sequence |
| 1784 | Protein | NP_002063 | | Homo sapiens mRNA; cDNA |
| | | | | DKFZp686D0521 (from clone |
| | | | | DKFZp686D0521), mRNA |
| | | | | sequence |
| 1785 | DNA | NM_000578 | SLC11A1 | solute carrier family 11 |
| | | | | (proton-coupled divalent metal |
| | | | | ion transporters), member 1 |
| 1786 | Protein | NP_000569 | SLC11A1 | solute carrier family 11 |
| | | | | (proton-coupled divalent metal |
| | | | | ion transporters), member 1 |
| 1787 | DNA | NM_000421 | KRT10 | keratin 10 (epidermolytic |
| | | | | hyperkeratosis; keratosis |
| | | | | palmaris et plantaris) |
| 1788 | Protein | NP_000412 | KRT10 | keratin 10 (epidermolytic |
| | | | | hyperkeratosis; keratosis |
| | | | | palmaris et plantaris) |
| 1789 | DNA | NM_006349 | CG1I | putative cyclin G1 interacting |
| | | | | protein |
| 1790 | Protein | NP_006340 | CG1I | putative cyclin G1 interacting |
| | | | | protein |
| 1791 | DNA | AC002073 | | Cluster Incl. AC002073: Human |
| | | | | PAC clone DJ515N1 from |
| | | | | 22q11.2-q22 /cds = (0.2201) |
| | | | | /gb = AC002073 /gi = 2078469 |
| | | | | /ug = Hs.100623 /len = 2202 |
| 1792 | Protein | AAB54054 | | Cluster Incl. AC002073: Human |
| | | | | PAC clone DJ515N1 from |
| | | | | 22q11.2-q22 /cds = (0.2201) |
| | | | | /gb = AC002073 /gi = 2078469 |
| | | | | /ug = Hs.100623 /len = 2202 |
| 1793 | DNA | NM_002126 | HLF | hepatic leukemia factor |
| 1794 | Protein | NP_002117 | HLF | hepatic leukemia factor |
| 1795 | DNA | NM_006280 | SSR4 | signal sequence receptor, delta |
| | | | | (translocon-associated protein |
| | | | | delta) |
| 1796 | Protein | NP_006271 | SSR4 | signal sequence receptor, delta |
| | | | | (translocon-associated protein |
| | | | | delta) |
| 1797 | DNA | NM_007263 | COPE | coatomer protein complex, |
| | | | | subunit epsilon |
| 1798 | Protein | NP_009194 | COPE | coatomer protein complex, |
| | | | | subunit epsilon |
| 1799 | DNA | NM_133476 | ZNF384 | zinc finger protein 384 |
| 1800 | Protein | NP_597733 | ZNF384 | zinc finger protein 384 |
| 1801 | DNA | NM_024056 | MGC5576 | hypothetical protein MGC5576 |
| 1802 | Protein | NP_076961 | MGC5576 | hypothetical protein MGC5576 |
| 1803 | DNA | NM_007373 | SHOC2 | soc-2 suppressor of clear |
| | | | | homolog (C. elegans) |
| 1804 | Protein | NP_031399 | SHOC2 | soc-2 suppressor of clear |
| | | | | homolog (C. elegans) |
| 1805 | DNA | NM_004762 | PSCD1 | pleckstrin homology, Sec7 and |
| | | | | coiled/coil domains 1(cytohesin |
| | | | | 1) |
| 1806 | Protein | NP_004753 | PSCD1 | pleckstrin homology, Sec7 and |
| | | | | coiled/coil domains 1(cytohesin |
| | | | | 1) |
| 1807 | DNA | NM_017456 | PSCD1 | pleckstrin homology, Sec7 and |
| | | | | coiled/coil domains 1(cytohesin |
| | | | | 1) |
| 1808 | Protein | NP_059430 | PSCD1 | pleckstrin homology, Sec7 and |
| | | | | coiled/coil domains 1(cytohesin |
| | | | | 1) |
| 1809 | DNA | NM_018847 | KIAA1354 | KIAA1354 protein |
| 1810 | Protein | NP_061335 | KIAA1354 | KIAA1354 protein |
| 1811 | DNA | NM_003093 | SNRPC | small nuclear ribonucleoprotein |
| | | | | polypeptide C |
| 1812 | Protein | NP_003084 | SNRPC | small nuclear ribonucleoprotein |
| | | | | polypeptide C |
| 1813 | DNA | NM_006948 | STCH | stress 70 protein chaperone, |
| | | | | microsome-associated, 60 kDa |
| 1814 | Protein | NP_008879 | STCH | stress 70 protein chaperone, |
| | | | | microsome-associated, 60 kDa |
| 1815 | DNA | M21259 | | Cluster Incl. M21259: Human |
| | | | | Alu repeats in the region 5 to |
| | | | | the small nuclear |
| | | | | ribonucleoprotein E gene |
| | | | | /cds = (0.278) /gb = M21259 |
| | | | | /gi = 338258 /ug = Hs.1066 |
| | | | | /len = 446 |
| 1816 | DNA | NM_014306 | HSPC117 | hypothetical protein HSPC117 |
| 1817 | Protein | NP_055121 | HSPC117 | hypothetical protein HSPC117 |
| 1818 | DNA | NM_001261 | CDK9 | cyclin-dependent kinase 9 |
| | | | | (CDC2-related kinase) |
| 1819 | Protein | NP_001252 | CDK9 | cyclin-dependent kinase 9 |
| | | | | (CDC2-related kinase) |
| 1820 | DNA | NM_017443 | POLE3 | polymerase (DNA directed), |
| | | | | epsilon 3 (p17 subunit) |
| 1821 | Protein | NP_059139 | POLE3 | polymerase (DNA directed), |
| | | | | epsilon 3 (p17 subunit) |
| 1822 | DNA | AB014527 | CLASP2 | cytoplasmic linker associated |
| | | | | protein 2 |
| 1823 | Protein | AB014527 | CLASP2 | cytoplasmic linker associated |
| | | (Translation) | | protein 2 |
| 1824 | DNA | NM_004599 | | Homo sapiens sterol regulatory |
| | | | | element binding transcription |
| | | | | factor 2 (SREBF2), mRNA |
| 1825 | Protein | NP_004590 | | Sterol regulatory element- |
| | | | | binding transcription factor 2; |
| | | | | sterol regulatory element- |
| | | | | binding protein 2 [Homo |
| | | | | sapiens] |
| 1826 | DNA | NM_013318 | KIAA0515 | KIAA0515 protein |
| 1827 | Protein | NP_037450 | KIAA0515 | KIAA0515 protein |
| 1828 | DNA | D86978 | C7orf14 | chromosome 7 open reading |
| | | | | frame 14 |
| 1829 | Protein | D86978 (Translation) | C7orf14 | chromosome 7 open reading |
| | | | | frame 14 |
| 1830 | DNA | AB020671 | KIAA0864 | KIAA0864 protein |
| 1831 | Protein | AB020671 | KIAA0864 | KIAA0864 protein |
| | | (Translation) | | |
| 1832 | DNA | NM_144586 | MGC29643 | hypothetical protein |
| | | | | MGC29643 |
| 1833 | Protein | NP_653187 | MGC29643 | hypothetical protein |
| | | | | MGC29643 |
| 1834 | DNA | NM_007100 | ATP5I | ATP synthase, H+ transporting, |
| | | | | mitochondrial F0 complex, |
| | | | | subunit e |
| 1835 | Protein | NP_009031 | ATP5I | ATP synthase, H+ transporting, |
| | | | | mitochondrial F0 complex, |
| | | | | subunit e |
| 1836 | DNA | NM_003824 | FADD | Fas (TNFRSF6)-associated via |
| | | | | death domain |
| 1837 | Protein | NP_003815 | FADD | Fas (TNFRSF6)-associated via |
| | | | | death domain |
| 1838 | DNA | NM_014891 | PDAP1 | PDGFA associated protein 1 |
| 1839 | Protein | NP_055706 | PDAP1 | PDGFA associated protein 1 |
| 1840 | DNA | NM_007372 | RNAHP | RNA helicase-related protein |
| 1841 | Protein | NP_031398 | RNAHP | RNA helicase-related protein |
| 1842 | DNA | NM_014928 | | Cluster Incl. AB028969: Homo |
| | | | | sapiens mRNA for KIAA1046 |
| | | | | protein, complete cds |
| | | | | /cds = (577.1782) |
| | | | | /gb = AB028969 /gi = 5689428 |
| | | | | /ug = Hs.89519 /len = 5577 |
| 1843 | Protein | NP_055743 | | Cluster Incl. AB028969: Homo |
| | | | | sapiens mRNA for KIAA1046 |
| | | | | protein, complete cds |
| | | | | /cds = (577.1782) |
| | | | | /gb = AB028969 /gi = 5689428 |
| | | | | /ug = Hs.89519 /len = 5577 |
| 1844 | DNA | NM_005216 | DDOST | dolichyl- |
| | | | | diphosphooligosaccharide- |
| | | | | protein glycosyltransferase |
| 1845 | Protein | NP_005207 | DDOST | dolichyl- |
| | | | | diphosphooligosaccharide- |
| | | | | protein glycosyltransferase |
| 1846 | DNA | NM_014233 | UBTF | upstream binding transcription |
| | | | | factor, RNA polymerase I |
| 1847 | Protein | NP_055048 | UBTF | upstream binding transcription |
| | | | | factor, RNA polymerase I |
| 1848 | DNA | NM_003574 | VAPA | VAMP (vesicle-associated |
| | | | | membrane protein)-associated |
| | | | | protein A, 33 kDa |
| 1849 | Protein | NP_003565 | VAPA | VAMP (vesicle-associated |
| | | | | membrane protein)-associated |
| | | | | protein A, 33 kDa |
| 1850 | DNA | NM_006997 | TACC2 | transforming, acidic coiled-coil |
| | | | | containing protein 2 |
| 1851 | Protein | NP_008928 | TACC2 | transforming, acidic coiled-coil |
| | | | | containing protein 2 |
| 1852 | DNA | NM_018358 | FLJ11198 | hypothetical protein FLJ11198 |
| 1853 | Protein | NP_060828 | FLJ11198 | hypothetical protein FLJ11198 |
| 1854 | DNA | NM_005273 | | Homo sapiens guanine |
| | | | | nucleotide binding protein (G |
| | | | | protein), beta polypeptide 2 |
| | | | | (GNB2), mRNA |
| 1855 | Protein | NP_005264 | | guanine nucleotide-binding |
| | | | | protein, beta-2 subunit; G |
| | | | | protein, beta-2 subunit |
| 1856 | Protein | NP_005264 | GNB2 | guanine nucleotide binding |
| | | | | protein (G protein), beta |
| | | | | polypeptide 2 |
| 1857 | DNA | NM_007027 | TOPBP1 | topoisomerase (DNA) II |
| | | | | binding protein |
| 1858 | Protein | NP_008958 | TOPBP1 | topoisomerase (DNA) II |
| | | | | binding protein |
| 1859 | DNA | NM_005487 | HMG2L1 | high-mobility group protein 2- |
| | | | | like 1 |
| 1860 | Protein | NP_005478 | HMG2L1 | high-mobility group protein 2- |
| | | | | like 1 |
| 1861 | DNA | NM_014791 | MELK | maternal embryonic leucine |
| | | | | zipper kinase |
| 1862 | Protein | NP_055606 | MELK | maternal embryonic leucine |
| | | | | zipper kinase |
| 1863 | DNA | AB028992 | KIAA1069 | KIAA1069 protein |
| 1864 | Protein | AB028992 | KIAA1069 | KIAA1069 protein |
| | | (Translation) | | |
| 1865 | DNA | NM_003921 | BCL10 | B-cell CLL/lymphoma 10 |
| 1866 | Protein | NP_003912 | BCL10 | B-cell CLL/lymphoma 10 |
| 1867 | DNA | NM_004799 | MADHIP | MAD, mothers against |
| | | | | decapentaplegic homolog |
| | | | | (Drosophila) interacting |
| | | | | protein, receptor activation |
| | | | | anchor |
| 1868 | Protein | NP_004790 | MADHIP | MAD, mothers against |
| | | | | decapentaplegic homolog |
| | | | | (Drosophila) interacting |
| | | | | protein, receptor activation |
| | | | | anchor |
| 1869 | DNA | NM_007323 | MADHIP | MAD, mothers against |
| | | | | decapentaplegic homolog |
| | | | | (Drosophila) interacting |
| | | | | protein, receptor activation |
| | | | | anchor |
| 1870 | Protein | NP_015562 | MADHIP | MAD, mothers against |
| | | | | decapentaplegic homolog |
| | | | | (Drosophila) interacting |
| | | | | protein, receptor activation |
| | | | | anchor |
| 1871 | DNA | NM_002912 | REV3L | REV3-like, catalytic subunit of |
| | | | | DNA polymerase zeta (yeast) |
| 1872 | Protein | NP_002903 | REV3L | REV3-like, catalytic subunit of |
| | | | | DNA polymerase zeta (yeast) |
| 1873 | DNA | NM_005470 | SSH3BP1 | spectrin SH3 domain binding |
| | | | | protein 1 |
| 1874 | Protein | NP_005461 | SSH3BP1 | spectrin SH3 domain binding |
| | | | | protein 1 |
| 1875 | DNA | NM_005955 | MTF1 | metal-regulatory transcription |
| | | | | factor 1 |
| 1876 | Protein | NP_005946 | MTF1 | metal-regulatory transcription |
| | | | | factor 1 |
| 1877 | DNA | NM_004868 | GPSN2 | glycoprotein, synaptic 2 |
| 1878 | Protein | NP_004859 | GPSN2 | glycoprotein, synaptic 2 |
| 1879 | DNA | NM_138501 | GPSN2 | glycoprotein, synaptic 2 |
| 1880 | Protein | NP_612510 | GPSN2 | glycoprotein, synaptic 2 |
| 1881 | DNA | NM_007262 | DJ-1 | RNA-binding protein |
| | | | | regulatory subunit |
| 1882 | Protein | NP_009193 | DJ-1 | RNA-binding protein |
| | | | | regulatory subunit |
| 1883 | DNA | NM_006451 | PAIP1 | polyadenylate binding protein- |
| | | | | interacting protein 1 |
| 1884 | Protein | NP_006442 | PAIP1 | polyadenylate binding protein- |
| | | | | interacting protein 1 |
| 1885 | DNA | NM_002491 | NDUFB3 | NADH dehydrogenase |
| | | | | (ubiquinone) 1 beta |
| | | | | subcomplex, 3, 12 kDa |
| 1886 | Protein | NP_002482 | NDUFB3 | NADH dehydrogenase |
| | | | | (ubiquinone) 1 beta |
| | | | | subcomplex, 3, 12 kDa |
| 1887 | DNA | NM_007331 | WHSC1 | Wolf-Hirschhorn syndrome |
| | | | | candidate 1 |
| 1888 | Protein | NP_015627 | WHSC1 | Wolf-Hirschhorn syndrome |
| | | | | candidate 1 |
| 1889 | DNA | NM_014919 | WHSC1 | Wolf-Hirschhorn syndrome |
| | | | | candidate 1 |
| 1890 | Protein | NP_055734 | WHSC1 | Wolf-Hirschhorn syndrome |
| | | | | candidate 1 |
| 1891 | DNA | NM_133330 | WHSC1 | Wolf-Hirschhorn syndrome |
| | | | | candidate 1 |
| 1892 | Protein | NP_579877 | WHSC1 | Wolf-Hirschhorn syndrome |
| | | | | candidate 1 |
| 1893 | DNA | NM_133331 | WHSC1 | Wolf-Hirschhorn syndrome |
| | | | | candidate 1 |
| 1894 | DNA | U55980 | | Homo sapiens cDNA: |
| | | | | FLJ23482 fis, clone |
| | | | | KAIA03142, mRNA sequence |
| 1895 | DNA | AF037989 | | STAT-induced STAT inhibitor- |
| | | | | 2 [Homo sapiens], mRNA |
| | | | | sequence |
| 1896 | Protein | AF037989 | | STAT-induced STAT inhibitor- |
| | | (Translation) | | 2 [Homo sapiens], mRNA |
| | | | | sequence |
| 1897 | DNA | X96924 | | Cluster Incl. X96924: H. sapiens |
| | | | | gene encoding mitochondrial |
| | | | | citrate transport protein |
| | | | | /cds = (0.957) /gb = X96924 |
| | | | | /gi = 1770309 /ug = Hs.111024 |
| | | | | /len = 1522 |
| 1898 | Protein | CAA65633 | | Cluster Incl. X96924: H. sapiens |
| | | | | gene encoding mitochondrial |
| | | | | citrate transport protein |
| | | | | /cds = (0.957) /gb = X96924 |
| | | | | /gi = 1770309 /ug = Hs.111024 |
| | | | | /len = 1522 |
| 1899 | DNA | NM_021079 | NMT1 | N-myristoyltransferase 1 |
| 1900 | Protein | NP_066565 | NMT1 | N-myristoyltransferase 1 |
| 1901 | DNA | AB018257 | ZNF294 | zinc finger protein 294 |
| 1902 | Protein | AB018257 | ZNF294 | zinc finger protein 294 |
| | | (Translation) | | |
| 1903 | DNA | NM_014463 | LSM3 | Lsm3 protein |
| 1904 | Protein | NP_055278 | LSM3 | Lsm3 protein |
| 1905 | DNA | NM_004436 | ENSA | endosulfine alpha |
| 1906 | Protein | NP_004427 | ENSA | endosulfine alpha |
| 1907 | DNA | NM_004528 | MGST3 | microsomal glutathione S- |
| | | | | transferase 3 |
| 1908 | Protein | NP_004519 | MGST3 | microsomal glutathione S- |
| | | | | transferase 3 |
| 1909 | DNA | NM_005387 | NUP98 | nucleoporin 98 kDa |
| 1910 | Protein | NP_005378 | NUP98 | nucleoporin 98 kDa |
| 1911 | DNA | NM_016320 | NUP98 | nucleoporin 98 kDa |
| 1912 | Protein | NP_057404 | NUP98 | nucleoporin 98 kDa |
| 1913 | DNA | NM_139131 | NUP98 | nucleoporin 98 kDa |
| 1914 | Protein | NP_624357 | NUP98 | nucleoporin 98 kDa |
| 1915 | DNA | NM_139132 | NUP98 | nucleoporin 98 kDa |
| 1916 | Protein | NP_624358 | NUP98 | nucleoporin 98 kDa |
| 1917 | DNA | NM_019059 | TOM7 | homolog of Tom7 (S. cerevisiae) |
| 1918 | Protein | NP_061932 | TOM7 | homolog of Tom7 (S. cerevisiae) |
| 1919 | DNA | NM_006423 | RABAC1 | Rab acceptor 1 (prenylated) |
| 1920 | Protein | NP_006414 | RABAC1 | Rab acceptor 1 (prenylated) |
| 1921 | DNA | NM_006022 | TSC22 | transforming growth factor |
| | | | | beta-stimulated protein TSC-22 |
| 1922 | Protein | NP_006013 | TSC22 | transforming growth factor |
| | | | | beta-stimulated protein TSC-22 |
| 1923 | DNA | NM_015902 | DD5 | progestin induced protein |
| 1924 | Protein | NP_056986 | DD5 | progestin induced protein |
| 1925 | DNA | NM_005935 | MLLT2 | myeloid/lymphoid or mixed- |
| | | | | lineage leukemia (trithorax |
| | | | | homolog, Drosophila); |
| | | | | translocated to, 2 |
| 1926 | Protein | NP_005926 | MLLT2 | myeloid/lymphoid or mixed- |
| | | | | lineage leukemia (trithorax |
| | | | | homolog, Drosophila); |
| | | | | translocated to, 2 |
| 1927 | DNA | Y00978 | | PDC-E2 precursor (AA-54 to |
| | | | | 561) [Homo sapiens], mRNA |
| | | | | sequence |
| 1928 | Protein | Y00978 (Translation) | | PDC-E2 precursor (AA-54 to |
| | | | | 561) [Homo sapiens], mRNA |
| | | | | sequence |
| 1929 | DNA | NM_005720 | ARPC1B | actin related protein 2/3 |
| | | | | complex, subunit 1B, 41 kDa |
| 1930 | Protein | NP_005711 | ARPC1B | actin related protein 2/3 |
| | | | | complex, subunit 1B, 41 kDa |
| 1931 | DNA | NM_014706 | SART3 | squamous cell carcinoma |
| | | | | antigen recognised by T cells 3 |
| 1932 | Protein | NP_055521 | SART3 | squamous cell carcinoma |
| | | | | antigen recognised by T cells 3 |
| 1933 | DNA | NM_004698 | HPRP3P | U4/U6-associated RNA |
| | | | | splicing factor |
| 1934 | Protein | NP_004689 | HPRP3P | U4/U6-associated RNA |
| | | | | splicing factor |
| 1935 | DNA | NM_001360 | DHCR7 | 7-dehydrocholesterol reductase |
| 1936 | Protein | NP_001351 | DHCR7 | 7-dehydrocholesterol reductase |
| 1937 | DNA | NM_014623 | MEA | male-enhanced antigen |
| 1938 | Protein | NP_055438 | MEA | male-enhanced antigen |
| 1939 | DNA | U41843 | | Dr1-associated corepressor, |
| | | | | mRNA sequence |
| 1940 | Protein | U41843 (Translation) | | Dr1-associated corepressor, |
| | | | | mRNA sequence |
| 1941 | DNA | NM_014299 | BRD4 | bromodomain containing 4 |
| 1942 | Protein | NP_055114 | BRD4 | bromodomain containing 4 |
| 1943 | DNA | NM_058243 | BRD4 | bromodomain containing 4 |
| 1944 | Protein | NP_490597 | BRD4 | bromodomain containing 4 |
| 1945 | DNA | NM_003103 | SON | SON DNA binding protein |
| 1946 | Protein | NP_003094 | SON | SON DNA binding protein |
| 1947 | DNA | NM_032195 | SON | SON DNA binding protein |
| 1948 | Protein | NP_115571 | SON | SON DNA binding protein |
| 1949 | DNA | NM_058183 | SON | SON DNA binding protein |
| 1950 | Protein | NP_478063 | SON | SON DNA binding protein |
| 1951 | DNA | NM_138925 | SON | SON DNA binding protein |
| 1952 | Protein | NP_620303 | SON | SON DNA binding protein |
| 1953 | DNA | NM_138926 | SON | SON DNA binding protein |
| 1954 | Protein | NP_620304 | SON | SON DNA binding protein |
| 1955 | DNA | NM_005392 | PHF2 | PHD finger protein 2 |
| 1956 | Protein | NP_005383 | PHF2 | PHD finger protein 2 |
| 1957 | DNA | NM_024517 | PHF2 | PHD finger protein 2 |
| 1958 | Protein | NP_078793 | PHF2 | PHD finger protein 2 |
| 1959 | DNA | NM_000175 | GPI | glucose phosphate isomerase |
| 1960 | Protein | NP_000166 | GPI | glucose phosphate isomerase |
| 1961 | DNA | NM_017751 | FLJ20297 | hypothetical protein FLJ20297 |
| 1962 | Protein | NP_060221 | FLJ20297 | hypothetical protein FLJ20297 |
| 1963 | DNA | NM_017951 | FLJ20297 | hypothetical protein FLJ20297 |
| 1964 | Protein | NP_060421 | FLJ20297 | hypothetical protein FLJ20297 |
| 1965 | DNA | AB018310 | KIAA0767 | KIAA0767 protein |
| 1966 | Protein | AB018310 | KIAA0767 | KIAA0767 protein |
| | | (Translation) | | |
| 1967 | DNA | NM_006097 | MYL9 | myosin, light polypeptide 9, |
| | | | | regulatory |
| 1968 | Protein | NP_006088 | MYL9 | myosin, light polypeptide 9, |
| | | | | regulatory |
| 1969 | DNA | NM_005973 | PRCC | papillary renal cell carcinoma |
| | | | | (translocation-associated) |
| 1970 | Protein | NP_005964 | PRCC | papillary renal cell carcinoma |
| | | | | (translocation-associated) |
| 1971 | DNA | NM_014372 | RNF11 | ring finger protein 11 |
| 1972 | Protein | NP_055187 | RNF11 | ring finger protein 11 |
| 1973 | DNA | NM_004645 | COIL | coilin |
| 1974 | Protein | NP_004636 | COIL | coilin |
| 1975 | DNA | NM_001235 | SERPINH2 | serine (or cysteine) proteinase |
| | | | | inhibitor, clade H (heat shock |
| | | | | protein 47), member 2 |
| 1976 | Protein | NP_001226 | SERPINH2 | serine (or cysteine) proteinase |
| | | | | inhibitor, clade H (heat shock |
| | | | | protein 47), member 2 |
| 1977 | DNA | NM_004729 | ALTE | Ac-like transposable element |
| 1978 | Protein | NP_004720 | ALTE | Ac-like transposable element |
| 1979 | DNA | NM_006201 | PCTK1 | PCTAIRE protein kinase 1 |
| 1980 | Protein | NP_006192 | PCTK1 | PCTAIRE protein kinase 1 |
| 1981 | DNA | NM_033018 | PCTK1 | PCTAIRE protein kinase 1 |
| 1982 | DNA | NM_033019 | PCTK1 | PCTAIRE protein kinase 1 |
| 1983 | Protein | NP_148979 | PCTK1 | PCTAIRE protein kinase 1 |
| 1984 | DNA | NM_018074 | FLJ10374 | hypothetical protein FLJ10374 |
| 1985 | Protein | NP_060544 | FLJ10374 | hypothetical protein FLJ10374 |
| 1986 | DNA | NM_001270 | CHD1 | chromodomain helicase DNA |
| | | | | binding protein 1 |
| 1987 | Protein | NP_001261 | CHD1 | chromodomain helicase DNA |
| | | | | binding protein 1 |
| 1988 | DNA | NM_012191 | FUS2 | putative tumor suppressor |
| 1989 | Protein | NP_036323 | FUS2 | putative tumor suppressor |
| 1990 | DNA | NM_005862 | STAG1 | stromal antigen 1 |
| 1991 | Protein | NP_005853 | STAG1 | stromal antigen 1 |
| 1992 | Protein | NP_005393 | RALA | v-ral simian leukemia viral |
| | | | | oncogene homolog A (ras |
| | | | | related) |
| 1993 | DNA | NM_007249 | KLF12 | Kruppel-like factor 12 |
| 1994 | Protein | NP_009180 | KLF12 | Kruppel-like factor 12 |
| 1995 | DNA | NM_016285 | KLF12 | Kruppel-like factor 12 |
| 1996 | Protein | NP_057369 | KLF12 | Kruppel-like factor 12 |
| 1997 | DNA | NM_013299 | HSU79266 | protein predicted by clone |
| | | | | 23627 |
| 1998 | Protein | NP_037431 | HSU79266 | protein predicted by clone |
| | | | | 23627 |
| 1999 | DNA | NM_002915 | RFC3 | replication factor C (activator |
| | | | | 1) 3, 38 kDa |
| 2000 | Protein | NP_002906 | RFC3 | replication factor C (activator |
| | | | | 1) 3, 38 kDa |
| 2001 | DNA | NM_012346 | NUP62 | nucleoporin 62 kDa |
| 2002 | Protein | NP_036478 | NUP62 | nucleoporin 62 kDa |
| 2003 | DNA | NM_016553 | NUP62 | nucleoporin 62 kDa |
| 2004 | Protein | NP_057637 | NUP62 | nucleoporin 62 kDa |
| 2005 | DNA | NM_153718 | NUP62 | nucleoporin 62 kDa |
| 2006 | Protein | NP_714940 | NUP62 | nucleoporin 62 kDa |
| 2007 | DNA | NM_153719 | NUP62 | nucleoporin 62 kDa |
| 2008 | DNA | D64109 | TOB2 | transducer of ERBB2, 2 |
| 2009 | Protein | D64109 (Translation) | TOB2 | transducer of ERBB2, 2 |
| 2010 | DNA | NM_001834 | CLTB | clathrin, light polypeptide (Lcb) |
| 2011 | Protein | NP_001825 | CLTB | clathrin, light polypeptide (Lcb) |
| 2012 | DNA | NM_007097 | CLTB | clathrin, light polypeptide (Lcb) |
| 2013 | Protein | NP_009028 | CLTB | clathrin, light polypeptide (Lcb) |
| 2014 | DNA | NM_018979 | PRKWNK1 | protein kinase, lysine deficient 1 |
| 2015 | Protein | NP_061852 | PRKWNK1 | protein kinase, lysine deficient 1 |
| 2016 | DNA | NM_019892 | PPI5PIV | phosphatidylinositol (4,5) |
| | | | | bisphosphate 5-phosphatase |
| | | | | homolog; phosphatidylinositol |
| | | | | polyphosphate 5-phosphatase |
| | | | | type IV |
| 2017 | Protein | NP_063945 | PPI5PIV | phosphatidylinositol (4,5) |
| | | | | bisphosphate 5-phosphatase |
| | | | | homolog; phosphatidylinositol |
| | | | | polyphosphate 5-phosphatase |
| | | | | type IV |
| 2018 | DNA | NM_004069 | AP2S1 | adaptor-related protein complex |
| | | | | 2, sigma 1 subunit |
| 2019 | Protein | NP_004060 | AP2S1 | adaptor-related protein complex |
| | | | | 2, sigma 1 subunit |
| 2020 | DNA | NM_021575 | AP2S1 | adaptor-related protein complex |
| | | | | 2, sigma 1 subunit |
| 2021 | Protein | NP_067586 | AP2S1 | adaptor-related protein complex |
| | | | | 2, sigma 1 subunit |
| 2022 | DNA | NM_016426 | GTSE1 | G-2 and S-phase expressed 1 |
| 2023 | Protein | NP_057510 | GTSE1 | G-2 and S-phase expressed 1 |
| 2024 | DNA | NM_152696 | Nbak2 | homeodomain interacting |
| | | | | protein kinase 1-like protein |
| 2025 | Protein | NP_689909 | Nbak2 | homeodomain interacting |
| | | | | protein kinase 1-like protein |
| 2026 | DNA | NM_032217 | GTAR | gene trap ankyrin repeat |
| 2027 | Protein | NP_115593 | GTAR | gene trap ankyrin repeat |
| 2028 | DNA | NM_015271 | TRIM2 | tripartite motif-containing 2 |
| 2029 | Protein | NP_056086 | TRIM2 | tripartite motif-containing 2 |
| 2030 | DNA | NM_021005 | NR2F2 | nuclear receptor subfamily 2, |
| | | | | group F, member 2 |
| 2031 | Protein | NP_066285 | NR2F2 | nuclear receptor subfamily 2, |
| | | | | group F, member 2 |
| 2032 | DNA | NM_015079 | KIAA1055 | KIAA1055 protein |
| 2033 | Protein | NP_055894 | KIAA1055 | KIAA1055 protein |
| 2034 | DNA | W28264 | | Unknown (protein for |
| | | | | MGC: 17296) [Homo sapiens], |
| | | | | mRNA sequence |
| 2035 | DNA | NM_021645 | KIAA0266 | KIAA0266 gene product |
| 2036 | Protein | NP_067677 | KIAA0266 | KIAA0266 gene product |
| 2037 | DNA | AL080156 | DKFZP434J214 | DKFZP434J214 protein |
| 2038 | Protein | AL080156 | DKFZP434J214 | DKFZP434J214 protein |
| | | (Translation) | | |
| 2039 | DNA | NM_003449 | TRIM26 | tripartite motif-containing 26 |
| 2040 | Protein | NP_003440 | TRIM26 | tripartite motif-containing 26 |
| 2041 | DNA | NM_014604 | TIP-1 | Tax interaction protein 1 |
| 2042 | Protein | NP_055419 | TIP-1 | Tax interaction protein 1 |
| 2043 | DNA | NM_014570 | ARFGAP3 | ADP-ribosylation factor |
| | | | | GTPase activating protein 3 |
| 2044 | Protein | NP_055385 | ARFGAP3 | ADP-ribosylation factor |
| | | | | GTPase activating protein 3 |
| 2045 | DNA | NM_003605 | OGT | O-linked N-acetylglucosamine |
| | | | | (GlcNAc) transferase (UDP-N- |
| | | | | acetylglucosamine:polypeptide- |
| | | | | N-acetylglucosaminyl |
| | | | | transferase) |
| 2046 | Protein | NP_003596 | OGT | O-linked N-acetylglucosamine |
| | | | | (GlcNAc) transferase (UDP-N- |
| | | | | acetylglucosamine:polypeptide- |
| | | | | N-acetylglucosaminyl |
| | | | | transferase) |
| 2047 | DNA | NM_015898 | FBI1 | HIV-1 inducer of short |
| | | | | transcripts binding protein; |
| | | | | lymphoma related factor |
| 2048 | Protein | NP_056982 | FBI1 | HIV-1 inducer of short |
| | | | | transcripts binding protein; |
| | | | | lymphoma related factor |
| 2049 | DNA | NM_001564 | ING1L | inhibitor of growth family, |
| | | | | member 1-like |
| 2050 | Protein | NP_001555 | ING1L | inhibitor of growth family, |
| | | | | member 1-like |
| 2051 | DNA | NM_014292 | CBX6 | chromobox homolog 6 |
| 2052 | Protein | NP_055107 | CBX6 | chromobox homolog 6 |
| 2053 | DNA | NM_003663 | CGGBP1 | CGG triplet repeat binding |
| | | | | protein 1 |
| 2054 | Protein | NP_003654 | CGGBP1 | CGG triplet repeat binding |
| | | | | protein 1 |
| 2055 | DNA | NM_004329 | BMPR1A | bone morphogenetic protein |
| | | | | receptor, type IA |
| 2056 | Protein | NP_004320 | BMPR1A | bone morphogenetic protein |
| | | | | receptor, type IA |
| 2057 | DNA | NM_015464 | DKFZp564D206 | cystine-knot containing |
| | | | | secreted protein |
| 2058 | Protein | NP_056279 | DKFZp564D206 | cystine-knot containing |
| | | | | secreted protein |
| 2059 | DNA | AI557322 | | Homo sapiens cDNA: |
| | | | | FLJ22256 fis, clone |
| | | | | HRC02860, mRNA sequence |
| 2060 | DNA | AB007928 | KIAA0459 | KIAA0459 protein |
| 2061 | Protein | AB007928 | KIAA0459 | KIAA0459 protein |
| | | (Translation) | | |
| 2062 | DNA | NM_004251 | RAB9A | RAB9A, member RAS |
| | | | | oncogene family |
| 2063 | Protein | NP_004242 | RAB9A | RAB9A, member RAS |
| | | | | oncogene family |
| 2064 | DNA | NM_003223 | TFAP4 | transcription factor AP-4 |
| | | | | (activating enhancer binding |
| | | | | protein 4) |
| 2065 | Protein | NP_003214 | TFAP4 | transcription factor AP-4 |
| | | | | (activating enhancer binding |
| | | | | protein 4) |
| 2066 | DNA | NM_007215 | POLG2 | polymerase (DNA directed), |
| | | | | gamma 2, accessory subunit |
| 2067 | Protein | NP_009146 | POLG2 | polymerase (DNA directed), |
| | | | | gamma 2, accessory subunit |
| 2068 | DNA | NM_004312 | ARR3 | arrestin 3, retinal (X-arrestin) |
| 2069 | Protein | NP_004303 | ARR3 | arrestin 3, retinal (X-arrestin) |
| 2070 | DNA | NM_015569 | KIAA0820 | KIAA0820 protein |
| 2071 | Protein | NP_056384 | KIAA0820 | KIAA0820 protein |
| 2072 | DNA | NM_021140 | UTX | ubiquitously transcribed |
| | | | | tetratricopeptide repeat gene, X |
| | | | | chromosome |
| 2073 | Protein | NP_066963 | UTX | ubiquitously transcribed |
| | | | | tetratricopeptide repeat gene, X |
| | | | | chromosome |
| 2074 | DNA | NM_002131 | HMGA1 | high mobility group AT-hook 1 |
| 2075 | Protein | NP_002122 | HMGA1 | high mobility group AT-hook 1 |
| 2076 | DNA | NM_145899 | HMGA1 | high mobility group AT-hook 1 |
| 2077 | Protein | NP_665906 | HMGA1 | high mobility group AT-hook 1 |
| 2078 | DNA | NM_145901 | HMGA1 | high mobility group AT-hook 1 |
| 2079 | DNA | NM_145902 | HMGA1 | high mobility group AT-hook 1 |
| 2080 | DNA | NM_003009 | SEPW1 | selenoprotein W, 1 |
| 2081 | Protein | NP_003000 | SEPW1 | selenoprotein W, 1 |
| 2082 | DNA | NM_005979 | S100A13 | S100 calcium binding protein |
| | | | | A13 |
| 2083 | Protein | NP_005970 | S100A13 | S100 calcium binding protein |
| | | | | A13 |
| 2084 | DNA | NM_006618 | PLU-1 | putative DNA/chromatin |
| | | | | binding motif |
| 2085 | Protein | NP_006609 | PLU-1 | putative DNA/chromatin |
| | | | | binding motif |
| 2086 | DNA | NM_003592 | CUL1 | cullin 1 |
| 2087 | Protein | NP_003583 | CUL1 | cullin 1 |
| 2088 | DNA | NM_004902 | RNPC2 | RNA-binding region (RNP1, |
| | | | | RRM) containing 2 |
| 2089 | Protein | NP_004893 | RNPC2 | RNA-binding region (RNP1, |
| | | | | RRM) containing 2 |
| 2090 | DNA | NM_003584 | DUSP11 | dual specificity phosphatase 11 |
| | | | | (RNA/RNP complex 1- |
| | | | | interacting) |
| 2091 | Protein | NP_003575 | DUSP11 | dual specificity phosphatase 11 |
| | | | | (RNA/RNP complex 1- |
| | | | | interacting) |
| 2092 | DNA | NM_005809 | PRDX2 | peroxiredoxin 2 |
| 2093 | Protein | NP_005800 | PRDX2 | peroxiredoxin 2 |
| 2094 | DNA | NM_005157 | ABL1 | v-abl Abelson murine leukemia |
| | | | | viral oncogene homolog 1 |
| 2095 | Protein | NP_005148 | ABL1 | v-abl Abelson murine leukemia |
| | | | | viral oncogene homolog 1 |
| 2096 | DNA | NM_007313 | ABL1 | v-abl Abelson murine leukemia |
| | | | | viral oncogene homolog 1 |
| 2097 | Protein | NP_009297 | ABL1 | v-abl Abelson murine leukemia |
| | | | | viral oncogene homolog 1 |
| 2098 | DNA | NM_001356 | DDX3 | DEAD/H (Asp-Glu-Ala- |
| | | | | Asp/His) box polypeptide 3 |
| 2099 | Protein | NP_001347 | DDX3 | DEAD/H (Asp-Glu-Ala- |
| | | | | Asp/His) box polypeptide 3 |
| 2100 | DNA | NM_024005 | DDX3 | DEAD/H (Asp-Glu-Ala- |
| | | | | Asp/His) box polypeptide 3 |
| 2101 | DNA | NM_000938 | POLR2B | polymerase (RNA) II (DNA |
| | | | | directed) polypeptide B, |
| | | | | 140 kDa |
| 2102 | Protein | NP_000929 | POLR2B | polymerase (RNA) II (DNA |
| | | | | directed) polypeptide B, |
| | | | | 140 kDa |
| 2103 | DNA | NM_005080 | XBP1 | X-box binding protein 1 |
| 2104 | Protein | NP_005071 | XBP1 | X-box binding protein 1 |
| 2105 | DNA | AL031781 | QKI | homolog of mouse quaking |
| | | | | QKI (KH domain RNA binding |
| | | | | protein) |
| 2106 | DNA | NM_005095 | ZNF262 | zinc finger protein 262 |
| 2107 | Protein | NP_005086 | ZNF262 | zinc finger protein 262 |
| 2108 | DNA | NM_014837 | C1orf16 | chromosome 1 open reading |
| | | | | frame 16 |
| 2109 | Protein | NP_055652 | C1orf16 | chromosome 1 open reading |
| | | | | frame 16 |
| 2110 | DNA | NM_015057 | KIAA0916 | KIAA0916 protein |
| 2111 | Protein | NP_055872 | KIAA0916 | KIAA0916 protein |
| 2112 | DNA | NM_004094 | EIF2S1 | eukaryotic translation initiation |
| | | | | factor 2, subunit 1 alpha, 35 kDa |
| 2113 | Protein | NP_004085 | EIF2S1 | eukaryotic translation initiation |
| | | | | factor 2, subunit 1 alpha, 35 kDa |
| 2114 | DNA | NM_001681 | ATP2A2 | ATPase, Ca++ transporting, |
| | | | | cardiac muscle, slow twitch 2 |
| 2115 | Protein | NP_001672 | ATP2A2 | ATPase, Ca++ transporting |
| | | | | cardiac muscle, slow twitch 2 |
| 2116 | DNA | NM_170665 | ATP2A2 | ATPase, Ca++ transporting, |
| | | | | cardiac muscle, slow twitch 2 |
| 2117 | Protein | NP_733765 | ATP2A2 | ATPase, Ca++ transporting, |
| | | | | cardiac muscle, slow twitch 2 |
| 2118 | DNA | NM_015255 | KIAA0349 | KIAA0349 protein |
| 2119 | Protein | NP_056070 | KIAA0349 | KIAA0349 protein |
| 2120 | DNA | NM_001031 | RPS28 | ribosomal protein S28 |
| 2121 | Protein | NP_001022 | RPS28 | ribosomal protein S28 |
| 2122 | DNA | NM_006443 | RCL | putative c-Myc-responsive |
| 2123 | Protein | NP_006434 | RCL | putative c-Myc-responsive |
| 2124 | DNA | NM_000988 | RPL27 | ribosomal protein L27 |
| 2125 | Protein | NP_000979 | RPL27 | ribosomal protein L27 |
| 2126 | DNA | U93181 | SBF1 | SET binding factor 1 |
| 2127 | Protein | U93181 (Translation) | SBF1 | SET binding factor 1 |
| 2128 | DNA | AC004877 | | Cluster Incl. AC004877: Homo |
| | | | | sapiens PAC clone DJ0751H13 |
| | | | | from 7q35-qter /cds = (0.1514) |
| | | | | /gb = AC004877 /gi = 3638954 |
| | | | | /ug = Hs.112158 /len = 1515 |
| 2129 | Protein | AC004877 | | Cluster Incl. AC004877: Homo |
| | | (Translation) | | sapiens PAC clone DJ0751H13 |
| | | | | from 7q35-qter /cds = (0.1514) |
| | | | | /gb = AC004877 /gi = 3638954 |
| | | | | /ug = Hs.112158 /len = 1515 |
| 2130 | DNA | NM_003651 | CSDA | cold shock domain protein A |
| 2131 | Protein | NP_003642 | CSDA | cold shock domain protein A |
| 2132 | DNA | NM_004694 | SLC16A6 | solute carrier family 16 |
| | | | | (monocarboxylic acid |
| | | | | transporters), member 6 |
| 2133 | Protein | NP_004685 | SLC16A6 | solute carrier family 16 |
| | | | | (monocarboxylic acid |
| | | | | transporters), member 6 |
| 2134 | DNA | AB028986 | USP22 | ubiquitin specific protease 22 |
| 2135 | Protein | AB028986 | USP22 | ubiquitin specific protease 22 |
| | | (Translation) | | |
| 2136 | DNA | NM_003321 | TUFM | Tu translation elongation |
| | | | | factor, mitochondrial |
| 2137 | Protein | NP_003312 | TUFM | Tu translation elongation |
| | | | | factor, mitochondrial |
| 2138 | DNA | NM_014473 | HSA9761 | putative dimethyladenosine |
| | | | | transferase |
| 2139 | Protein | NP_055288 | HSA9761 | putative dimethyladenosine |
| | | | | transferase |
| 2140 | DNA | NM_014577 | | Cluster Incl. Z98885: Human |
| | | | | DNA sequence from clone |
| | | | | 522J7 on chromosome 22q13.3. |
| | | | | Contains part of a 60S |
| | | | | Ribosomal protein L5 |
| | | | | pseudogene and a Peregrin |
| | | | | (BR140) LIKE gene |
| | | | | downstream of a putative CpG |
| | | | | island. Contains ESTs, STSs |
| | | | | and GSSs /cds = (185.3361) |
| | | | | /gb = Z |
| 2141 | Protein | NP_055392 | | Cluster Incl. Z98885: Human |
| | | | | DNA sequence from clone |
| | | | | 522J7 on chromosome 22q13.3. |
| | | | | Contains part of a 60S |
| | | | | Ribosomal protein L5 |
| | | | | pseudogene and a Peregrin |
| | | | | (BR140) LIKE gene |
| | | | | downstream of a putative CpG |
| | | | | island. Contains ESTs, STSs |
| | | | | and GSSs /cds = (185.3361) |
| | | | | /gb = Z |
| 2142 | DNA | NM_133370 | KIAA1966 | KIAA1966 protein |
| 2143 | Protein | NP_588611 | KIAA1966 | KIAA1966 protein |
| 2144 | DNA | NM_015196 | KIAA0922 | KIAA0922 protein |
| 2145 | Protein | NP_056011 | KIAA0922 | KIAA0922 protein |
| 2146 | DNA | AI655015 | | Homo sapiens mRNA; cDNA |
| | | | | DKFZp586F2224 (from clone |
| | | | | DKFZp586F2224), mRNA |
| | | | | sequence |
| 2147 | DNA | NM_006190 | ORC2L | origin recognition complex, |
| | | | | subunit 2-like (yeast) |
| 2148 | Protein | NP_006181 | ORC2L | origin recognition complex, |
| | | | | subunit 2-like (yeast) |
| 2149 | DNA | NM_005227 | EFNA4 | ephrin-A4 |
| 2150 | Protein | NP_005218 | EFNA4 | ephrin-A4 |
| 2151 | DNA | NM_006714 | ASM3A | acid sphingomyelinase-like |
| | | | | phosphodiesterase |
| 2152 | Protein | NP_006705 | ASM3A | acid sphingomyelinase-like |
| | | | | phosphodiesterase |
| 2153 | DNA | AF150247 | | HSPC060 [Homo sapiens], |
| | | | | mRNA sequence |
| 2154 | DNA | NM_003542 | H4FG | H4 histone family, member G |
| 2155 | Protein | NP_003533 | H4FG | H4 histone family, member G |
| 2156 | DNA | NM_006020 | ALKBH | alkB, alkylation repair homolog |
| | | | | (E. coli) |
| 2157 | Protein | NP_006011 | ALKBH | alkB, alkylation repair homolog |
| | | | | (E. coli) |
| 2158 | DNA | NM_014777 | KIAA0133 | KIAA0133 gene product |
| 2159 | Protein | NP_055592 | KIAA0133 | KIAA0133 gene product |
| 2160 | DNA | NM_006101 | HEC | highly expressed in cancer, rich |
| | | | | in leucine heptad repeats |
| 2161 | Protein | NP_006092 | HEC | highly expressed in cancer, rich |
| | | | | in leucine heptad repeats |
| 2162 | DNA | NM_005785 | SBB103 | hypothetical SBBI03 protein |
| 2163 | Protein | NP_005776 | SBB103 | hypothetical SBBI03 protein |
| 2164 | DNA | NM_014676 | PUM1 | pumilio homolog 1 |
| | | | | (Drosophila) |
| 2165 | Protein | NP_055491 | PUM1 | pumilio homolog 1 |
| | | | | (Drosophila) |
| 2166 | DNA | NM_002657 | PLAGL2 | pleiomorphic adenoma gene- |
| | | | | like 2 |
| 2167 | Protein | NP_002648 | PLAGL2 | pleiomorphic adenoma gene- |
| | | | | like 2 |
| 2168 | DNA | NM_005831 | NDP52 | nuclear domain 10 protein |
| 2169 | Protein | NP_005822 | NDP52 | nuclear domain 10 protein |
| 2170 | DNA | NM_003174 | SVIL | supervillin |
| 2171 | Protein | NP_003165 | SVIL | supeivillin |
| 2172 | DNA | NM_021738 | SVIL | supervillin |
| 2173 | Protein | NP_068506 | SVIL | supervillin |
| 2174 | DNA | NM_005676 | RBM10 | RNA binding motif protein 10 |
| 2175 | Protein | NP_005667 | RBM10 | RNA binding motif protein 10 |
| 2176 | DNA | NM_152856 | RBM10 | RNA binding motif protein 10 |
| 2177 | Protein | NP_690595 | RBM10 | RNA binding motif protein 10 |
| 2178 | DNA | NM_015046 | KIAA0625 | KIAA0625 protein |
| 2179 | Protein | NP_055861 | KIAA0625 | KIAA0625 protein |
| 2180 | DNA | D87450 | KIAA0261 | KIAA0261 protein |
| 2181 | Protein | D87450 (Translation) | KIAA0261 | KIAA0261 protein |
| 2182 | DNA | NM_003489 | NRIP1 | nuclear receptor interacting |
| | | | | protein 1 |
| 2183 | Protein | NP_003480 | NRIP1 | nuclear receptor interacting |
| | | | | protein 1 |
| 2184 | DNA | NM_017528 | WBSCR22 | Williams Beuren syndrome |
| | | | | chromosome region 22 |
| 2185 | Protein | NP_059998 | WBSCR22 | Williams Beuren syndrome |
| | | | | chromosome region 22 |
| 2186 | DNA | NM_006795 | EHD1 | EH-domain containing 1 |
| 2187 | Protein | NP_006786 | EHD1 | EH-domain containing 1 |
| 2188 | DNA | NM_006374 | STK25 | serine/threonine kinase 25 |
| | | | | (STE20 homolog, yeast) |
| 2189 | Protein | NP_006365 | STK25 | serine/threonine kinase 25 |
| | | | | (STE20 homolog, yeast) |
| 2190 | DNA | NM_007040 | E1B-AP5 | E1B-55 kDa-associated protein 5 |
| 2191 | Protein | NP_008971 | E1B-AP5 | E1B-55 kDa-associated protein 5 |
| 2192 | DNA | NM_144732 | E1B-AP5 | E1B-55 kDa-associated protein 5 |
| 2193 | Protein | NP_653333 | E1B-AP5 | E1B-55 kDa-associated protein 5 |
| 2194 | DNA | NM_144733 | E1B-AP5 | E1B-55 kDa-associated protein 5 |
| 2195 | Protein | NP_653334 | E1B-AP5 | E1B-55 kDa-associated protein 5 |
| 2196 | DNA | NM_144734 | E1B-AP5 | E1B-55 kDa-associated protein 5 |
| 2197 | Protein | NP_653335 | E1B-AP5 | E1B-55 kDa-associated protein 5 |
| 2198 | DNA | NM_017715 | ZNF3 | zinc finger protein 3 (A8-51) |
| 2199 | Protein | NP_060185 | ZNF3 | zinc finger protein 3 (A8-51) |
| 2200 | DNA | NM_032924 | ZNF3 | zinc finger protein 3 (A8-51) |
| 2201 | Protein | NP_116313 | ZNF3 | zinc finger protein 3 (A8-51) |
| 2202 | DNA | NM_006371 | CRTAP | cartilage associated protein |
| 2203 | Protein | NP_006362 | CRTAP | cartilage associated protein |
| 2204 | DNA | NM_006372 | NSAP1 | NS1-associated protein 1 |
| 2205 | Protein | NP_006363 | NSAP1 | NS1-associated protein 1 |
| 2206 | DNA | NM_014666 | ENTH | enthoprotin |
| 2207 | Protein | NP_055481 | ENTH | enthoprotin |
| 2208 | DNA | NM_004889 | ATP5J2 | ATP synthase, H+ transporting, |
| | | | | mitochondrial F0 complex, |
| | | | | subunit f, isoform 2 |
| 2209 | Protein | NP_004880 | ATP5J2 | ATP synthase, H+ transporting, |
| | | | | mitochondrial F0 complex, |
| | | | | subunit f, isoform 2 |
| 2210 | DNA | NM_005667 | ZFP103 | zinc finger protein 103 |
| | | | | homolog (mouse) |
| 2211 | Protein | NP_005658 | ZFP103 | zinc finger protein 103 |
| | | | | homolog (mouse) |
| 2212 | DNA | NM_014661 | KIAA0140 | KIAA0140 gene product |
| 2213 | Protein | NP_055476 | KIAA0140 | KIAA0140 gene product |
| 2214 | DNA | NM_015646 | RAP1B | RAP1B, member of RAS |
| | | | | oncogene family |
| 2215 | Protein | NP_056461 | RAP1B | RAP1B, member of RAS |
| | | | | oncogene family |
| 2216 | DNA | NM_172020 | POM121 | POM121 membrane |
| | | | | glycoprotein (rat) |
| 2217 | Protein | NP_742017 | POM121 | POM121 membrane |
| | | | | glycoprotein (rat) |
| 2218 | DNA | NM_012083 | FRAT2 | frequently rearranged in |
| | | | | advanced T-cell lymphomas 2 |
| 2219 | Protein | NP_036215 | FRAT2 | frequently rearranged in |
| | | | | advanced T-cell lymphomas 2 |
| 2220 | DNA | NM_144635 | MGC21688 | hypothetical protein |
| | | | | MGC21688 |
| 2221 | Protein | NP_653236 | MGC21688 | hypothetical protein |
| | | | | MGC21688 |
| 2222 | DNA | NM_006510 | RFP | ret finger protein |
| 2223 | Protein | NP_006501 | RFP | ret finger protein |
| 2224 | DNA | NM_030950 | RFP | ret finger protein |
| 2225 | Protein | NP_112212 | RFP | ret finger protein |
| 2226 | DNA | AI761647 | | Homo sapiens cDNA FLJ36527 |
| | | | | fis, clone TRACH2003941, |
| | | | | mRNA sequence |
| 2227 | DNA | NM_002105 | H2AFX | H2A histone family, member X |
| 2228 | Protein | NP_002096 | H2AFX | H2A histone family, member X |
| 2229 | DNA | NM_005801 | SUI1 | putative translation initiation |
| | | | | factor |
| 2230 | Protein | NP_005792 | SUI1 | putative translation initiation |
| | | | | factor |
| 2231 | DNA | R37702 | | ESTs |
| 2232 | DNA | NM_003358 | UGCG | UDP-glucose ceramide |
| | | | | glucosyltransferase |
| 2233 | Protein | NP_003349 | UGCG | UDP-glucose ceramide |
| | | | | glucosyltransferase |
| 2234 | DNA | NM_006460 | HIS1 | HMBA-inducible |
| 2235 | Protein | NP_006451 | HIS1 | HMBA-inducible |
| 2236 | DNA | NM_018380 | DDX28 | DEAD/H (Asp-Glu-Ala- |
| | | | | Asp/His) box polypeptide 28 |
| 2237 | Protein | NP_060850 | DDX28 | DEAD/H (Asp-Glu-Ala- |
| | | | | Asp/His) box polypeptide 28 |
| 2238 | DNA | NM_001895 | CSNK2A1 | casein kinase 2, alpha 1 |
| | | | | polypeptide |
| 2239 | Protein | NP_001886 | CSNK2A1 | casein kinase 2, alpha 1 |
| | | | | polypeptide |
| 2240 | DNA | NM_003675 | PRPF18 | PRP18 pre-mRNA processing |
| | | | | factor 18 homolog (yeast) |
| 2241 | Protein | NP_003666 | PRPF18 | PRP18 pre-mRNA processing |
| | | | | factor 18 homolog (yeast) |
| 2242 | DNA | NM_001352 | DBP | D site of albumin promoter |
| | | | | (albumin D-box) binding |
| | | | | protein |
| 2243 | Protein | NP_001343 | DBP | D site of albumin promoter |
| | | | | (albumin D-box) binding |
| | | | | protein |
| 2244 | DNA | NM_020126 | DBP | D site of albumin promoter |
| | | | | (albumin D-box) binding |
| | | | | protein |
| 2245 | Protein | NP_064511 | DBP | D site of albumin promoter |
| | | | | (albumin D-box) binding |
| | | | | protein |
| 2246 | DNA | NM_004404 | NEDD5 | neural precursor cell expressed, |
| | | | | developmentally down- |
| | | | | regulated 5 |
| 2247 | Protein | NP_004395 | NEDD5 | neural precursor cell expressed, |
| | | | | developmentally down- |
| | | | | regulated 5 |
| 2248 | DNA | NM_002533 | NVL | nuclear VCP-like |
| 2249 | Protein | NP_002524 | NVL | nuclear VCP-like |
| 2250 | DNA | AI830496 | KIAA1240 | KIAA1240 protein |
| 2251 | DNA | NM_000474 | TWIST | twist homolog |
| | | | | (acrocephalosyndactyly 3; |
| | | | | Saethre-Chotzen syndrome) |
| | | | | (Drosophila) |
| 2252 | Protein | NP_000465 | TWIST | twist homolog |
| | | | | (acrocephalosyndactyly 3; |
| | | | | Saethre-Chotzen syndrome) |
| | | | | (Drosophila) |
| 2253 | DNA | NM_007346 | OGFR | opioid growth factor receptor |
| 2254 | Protein | NP_031372 | OGFR | opioid growth factor receptor |
| 2255 | DNA | NM_001202 | BMP4 | bone morphogenetic protein 4 |
| 2256 | Protein | NP_001193 | BMP4 | bone morphogenetic protein 4 |
| 2257 | DNA | NM_130850 | BMP4 | bone morphogenetic protein 4 |
| 2258 | DNA | NM_130851 | BMP4 | bone morphogenetic protein 4 |
| 2259 | DNA | NM_015421 | DKFZP564K2062 | DKFZP564K2062 protein |
| 2260 | Protein | NP_056236 | DKFZP564K2062 | DKFZP564K2062 protein |
| 2261 | DNA | NM_005924 | MEOX2 | mesenchyme homeo box 2 |
| | | | | (growth arrest-specific homeo |
| | | | | box) |
| 2262 | Protein | NP_005915 | MEOX2 | mesenchyme homeo box 2 |
| | | | | (growth arrest-specific homeo |
| | | | | box) |
| 2263 | DNA | NM_014071 | NCOA6 | nuclear receptor coactivator 6 |
| 2264 | Protein | NP_054790 | NCOA6 | nuclear receptor coactivator 6 |
| 2265 | DNA | NM_015252 | KIAA0903 | KIAA0903 protein |
| 2266 | Protein | NP_056067 | KIAA0903 | KIAA0903 protein |
| 2267 | DNA | NM_001707 | BCL7B | B-cell CLL/lymphoma 7B |
| 2268 | Protein | NP_001698 | BCL7B | B-cell CLL/lymphoma 7B |
| 2269 | DNA | NM_138707 | BCL7B | B-cell CLL/lymphoma 7B |
| 2270 | Protein | NP_619713 | BCL7B | B-cell CLL/lymphoma 7B |
| 2271 | DNA | NM_015251 | KIAA0431 | KIAA0431 protein |
| 2272 | Protein | NP_056066 | KIAA0431 | KIAA0431 protein |
| 2273 | DNA | NM_015497 | DKFZP564G2022 | DKFZP564G2022 protein |
| 2274 | Protein | NP_056312 | DKFZP564G2022 | DKFZP564G2022 protein |
| 2275 | DNA | NM_002480 | PPP1R12A | protein phosphatase 1, |
| | | | | regulatory (inhibitor) subunit |
| | | | | 12A |
| 2276 | Protein | NP_002471 | PPP1R12A | protein phosphatase 1, |
| | | | | regulatory (inhibitor) subunit |
| | | | | 12A |
| 2277 | DNA | NM_004514 | ILF1 | interleukin enhancer binding |
| | | | | factor 1 |
| 2278 | Protein | NP_004505 | ILF1 | interleukin enhancer binding |
| | | | | factor 1 |
| 2279 | DNA | AB020633 | KIAA0826 | KIAA0826 protein |
| 2280 | Protein | AB020633 | KIAA0826 | KIAA0826 protein |
| | | (Translation) | | |
| 2281 | DNA | NM_020465 | NDRG4 | NDRG family member 4 |
| 2282 | Protein | NP_065198 | NDRG4 | NDRG family member 4 |
| 2283 | DNA | NM_022910 | NDRG4 | NDRG family member 4 |
| 2284 | DNA | NM_015966 | SDBCAG84 | serologically defined breast |
| | | | | cancer antigen 84 |
| 2285 | Protein | NP_057050 | SDBCAG84 | serologically defined breast |
| | | | | cancer antigen 84 |
| 2286 | DNA | NM_007198 | PROSC | proline synthetase co- |
| | | | | transcribed homolog (bacterial) |
| 2287 | Protein | NP_009129 | PROSC | proline synthetase co- |
| | | | | transcribed homolog (bacterial) |
| 2288 | DNA | NM_004935 | CDK5 | cyclin-dependent kinase 5 |
| 2289 | Protein | NP_004926 | CDK5 | cyclin-dependent kinase 5 |
| 2290 | DNA | AL049987 | | Homo sapiens mRNA; cDNA |
| | | | | DKFZp564F112 (from clone |
| | | | | DKFZp564F112), mRNA |
| | | | | sequence |
| 2291 | DNA | NM_005994 | TBX2 | T-box 2 |
| 2292 | Protein | NP_005985 | TBX2 | T-box 2 |
| 2293 | DNA | AL050007 | DKFZP564A043 | DKFZP564A043 protein |
| 2294 | Protein | AL050007 | DKFZP564A043 | DKFZP564A043 protein |
| | | (Translation) | | |
| 2295 | DNA | NM_007172 | NUP50 | nucleoporin 50 kDa |
| 2296 | Protein | NP_009103 | NUP50 | nucleoporin 50 kDa |
| 2297 | DNA | NM_153645 | NUP50 | nucleoporin 50 kDa |
| 2298 | Protein | NP_705931 | NUP50 | nucleoporin 50 kDa |
| 2299 | DNA | NM_153684 | NUP50 | nucleoporin 50 kDa |
| 2300 | DNA | NM_002824 | PTMS | parathymosin |
| 2301 | Protein | NP_002815 | PTMS | parathymosin |
| 2302 | DNA | AF052178 | | Homo sapiens clone 24523 |
| | | | | mRNA sequence |
| 2303 | DNA | NM_003583 | DYRK2 | dual-specificity tyrosine-(Y)- |
| | | | | phosphorylation regulated |
| | | | | kinase 2 |
| 2304 | Protein | NP_003574 | DYRK2 | dual-specificity tyrosine-(Y)- |
| | | | | phosphorylation regulated |
| | | | | kinase 2 |
| 2305 | DNA | NM_006482 | DYRK2 | dual-specificity tyrosine-(Y)- |
| | | | | phosphorylation regulated |
| | | | | kinase 2 |
| 2306 | Protein | NP_006473 | DYRK2 | dual-specificity tyrosine-(Y)- |
| | | | | phosphorylation regulated |
| | | | | kinase 2 |
| 2307 | DNA | AI475497 | HELSNF1 | helicase with SNF2 domain 1 |
| 2308 | DNA | NM_016107 | ZFR | zinc finger RNA binding |
| | | | | protein |
| 2309 | Protein | NP_057191 | ZFR | zinc finger RNA binding |
| | | | | protein |
| 2310 | DNA | NM_025137 | FLJ21439 | hypothetical protein FLJ21439 |
| 2311 | Protein | NP_079413 | FLJ21439 | hypothetical protein FLJ21439 |
| 2312 | DNA | NM_017736 | FLJ20274 | hypothetical protein FLJ20274 |
| 2313 | Protein | NP_060206 | FLJ20274 | hypothetical protein FLJ20274 |
| 2314 | DNA | NM_017548 | H41 | hypothetical protein H41 |
| 2315 | Protein | NP_060018 | H41 | hypothetical protein H41 |
| 2316 | DNA | NM_005749 | TOB1 | transducer of ERBB2, 1 |
| 2317 | Protein | NP_005740 | TOB1 | transducer of ERBB2, 1 |
| 2318 | DNA | NM_005803 | FLOT1 | flotillin 1 |
| 2319 | Protein | NP_005794 | FLOT1 | flotillin 1 |
| 2320 | DNA | NM_005138 | SCO2 | SCO cytochrome oxidase |
| | | | | deficient homolog 2 (yeast) |
| 2321 | Protein | NP_005129 | SCO2 | SCO cytochrome oxidase |
| | | | | deficient homolog 2 (yeast) |
| 2322 | DNA | AI312646 | | Homo sapiens mRNA; cDNA |
| | | | | DKFZp564H1916 (from clone |
| | | | | DKFZp564H1916), mRNA |
| | | | | sequence |
| 2323 | DNA | NM_003937 | KYNU | kynureninase (L-kynurenine |
| | | | | hydrolase) |
| 2324 | Protein | NP_003928 | KYNU | kynureninase (L-kynurenine |
| | | | | hydrolase) |
| 2325 | DNA | NM_001827 | CKS2 | CDC28 protein kinase |
| | | | | regulatory subunit 2 |
| 2326 | Protein | NP_001818 | CKS2 | CDC28 protein kinase |
| | | | | regulatory subunit 2 |
| 2327 | DNA | NM_016324 | ZNF274 | zinc finger protein 274 |
| 2328 | Protein | NP_057408 | ZNF274 | zinc finger protein 274 |
| 2329 | DNA | NM_016325 | ZNF274 | zinc finger protein 274 |
| 2330 | Protein | NP_057409 | ZNF274 | zinc finger protein 274 |
| 2331 | DNA | NM_133502 | ZNF274 | zinc finger protein 274 |
| 2332 | Protein | NP_598009 | ZNF274 | zinc finger protein 274 |
| 2333 | DNA | NM_004523 | KNSL1 | kinesin-like 1 |
| 2334 | Protein | NP_004514 | KNSL1 | kinesin-like 1 |
| 2335 | DNA | NM_014885 | APC10 | anaphase-promoting complex |
| | | | | subunit 10 |
| 2336 | Protein | NP_055700 | APC10 | anaphase-promoting complex |
| | | | | subunit 10 |
| 2337 | DNA | NM_002519 | NPAT | nuclear protein, ataxia- |
| | | | | telangiectasia locus |
| 2338 | Protein | NP_002510 | NPAT | nuclear protein, ataxia- |
| | | | | telangiectasia locus |
| 2339 | DNA | NM_002449 | MSX2 | msh homeo box homolog 2 |
| | | | | (Drosophila) |
| 2340 | Protein | NP_002440 | MSX2 | msh homeo box homolog 2 |
| | | | | (Drosophila) |
| 2341 | DNA | NM_002398 | MEIS1 | Meis1, myeloid ecotropic viral |
| | | | | integration site 1 homolog |
| | | | | (mouse) |
| 2342 | Protein | NP_002389 | MEIS1 | Meis1, myeloid ecotropic viral |
| | | | | integration site 1 homolog |
| | | | | (mouse) |
| 2343 | DNA | NM_005085 | NUP214 | nucleoporin 214 kDa |
| 2344 | Protein | NP_005076 | NUP214 | nucleoporin 214 kDa |
| 2345 | DNA | NM_153642 | NUP214 | nucleoporin 214 kDa |
| 2346 | Protein | NP_705906 | NUP214 | nucleoporin 214 kDa |
| 2347 | DNA | NM_004493 | HADH2 | hydroxyacyl-Coenzyme A |
| | | | | dehydrogenase, type II |
| 2348 | Protein | NP_004484 | HADH2 | hydroxyacyl-Coenzyme A |
| | | | | dehydrogenase, type II |
| 2349 | DNA | NM_001329 | CTBP2 | C-terminal binding protein 2 |
| 2350 | Protein | NP_001320 | CTBP2 | C-terminal binding protein 2 |
| 2351 | DNA | NM_022802 | CTBP2 | C-terminal binding protein 2 |
| 2352 | Protein | NP_073713 | CTBP2 | C-terminal binding protein 2 |
| 2353 | DNA | NM_133264 | WIRE | WIRE protein |
| 2354 | Protein | NP_573571 | WIRE | WIRE protein |
| 2355 | DNA | NM_000937 | POLR2A | polymerase (RNA) II (DNA |
| | | | | directed) polypeptide A, |
| | | | | 220 kDa |
| 2356 | Protein | NP_000928 | POLR2A | polymerase (RNA) II (DNA |
| | | | | directed) polypeptide A, |
| | | | | 220 kDa |
| 2357 | DNA | AA643063 | DKFZP434C212 | DKFZP434C212 protein |
| 2358 | DNA | NM_001275 | CHGA | chromogranin A (parathyroid |
| | | | | secretory protein 1) |
| 2359 | Protein | NP_001266 | CHGA | chromogranin A (parathyroid |
| | | | | secretory protein 1) |
| 2360 | DNA | NM_015555 | COASTER | coactivator for steroid receptors |
| 2361 | Protein | NP_056370 | COASTER | coactivator for steroid receptors |
| 2362 | DNA | NM_015874 | KBF2 | H-2K binding factor-2 |
| 2363 | Protein | NP_056958 | KBF2 | H-2K binding factor-2 |
| 2364 | DNA | NM_000687 | AHCY | S-adenosylhomocysteine |
| | | | | hydrolase |
| 2365 | Protein | NP_000678 | AHCY | S-adenosylhomocysteine |
| | | | | hydrolase |
| 2366 | DNA | NM_002376 | MARK3 | MAP/microtubule affinity- |
| | | | | regulating kinase 3 |
| 2367 | Protein | NP_002367 | MARK3 | MAP/microtubule affinity- |
| | | | | regulating kinase 3 |
| 2368 | DNA | NM_003899 | ARHGEF7 | Rho guanine nucleotide |
| | | | | exchange factor (GEF) 7 |
| 2369 | Protein | NP_003890 | ARHGEF7 | Rho guanine nucleotide |
| | | | | exchange factor (GEF) 7 |
| 2370 | DNA | NM_145735 | ARHGEF7 | Rho guanine nucleotide |
| | | | | exchange factor (GEF) 7 |
| 2371 | Protein | NP_663788 | ARHGEF7 | Rho guanine nucleotide |
| | | | | exchange factor (GEF) 7 |
| 2372 | DNA | NM_015634 | DKFZP586B0923 | DKFZP586B0923 protein |
| 2373 | Protein | NP_056449 | DKFZP586B0923 | DKFZP586B0923 protein |
| 2374 | DNA | AB011102 | ZNF292 | zinc finger protein 292 |
| 2375 | Protein | AB011102 | ZNF292 | zinc finger protein 292 |
| | | (Translation) | | |
| 2376 | DNA | NM_024824 | FLJ11806 | hypothetical protein FLJ11806 |
| 2377 | Protein | NP_079100 | FLJ11806 | hypothetical protein FLJ11806 |
| 2378 | DNA | NM_001823 | CKB | creatine kinase, brain |
| 2379 | Protein | NP_001814 | CKB | creatine kinase, brain |
| 2380 | DNA | NM_003211 | TDG | thymine-DNA glycosylase |
| 2381 | Protein | NP_003202 | TDG | thymine-DNA glycosylase |
| 2382 | DNA | NM_003634 | NIPSNAP1 | nipsnap homolog 1 (C. elegans) |
| 2383 | Protein | NP_003625 | NIPSNAP1 | nipsnap homolog 1 (C. elegans) |
| 2384 | DNA | NM_014225 | PPP2R1A | protein phosphatase 2 (formerly |
| | | | | 2A), regulatory subunit A (PR |
| | | | | 65), alpha isoform |
| 2385 | Protein | NP_055040 | PPP2R1A | protein phosphatase 2 (formerly |
| | | | | 2A), regulatory subunit A (PR |
| | | | | 65), alpha isoform |
| 2386 | DNA | T57872 | | EST, Moderately similar to |
| | | | | COXG_HUMAN Cytochrome |
| | | | | c oxidase polypeptide VIb |
| | | | | (AED) [H. sapiens] |
| 2387 | DNA | NM_003792 | EDF1 | endothelial differentiation- |
| | | | | related factor 1 |
| 2388 | Protein | NP_003783 | EDF1 | endothelial differentiation- |
| | | | | related factor 1 |
| 2389 | DNA | NM_153200 | EDF1 | endothelial differentiation- |
| | | | | related factor 1 |
| 2390 | Protein | NP_694880 | EDF1 | endothelial differentiation- |
| | | | | related factor 1 |
| 2391 | DNA | NM_004332 | BPHL | biphenyl hydrolase-like (serine |
| | | | | hydrolase; breast epithelial |
| | | | | mucin-associated antigen) |
| 2392 | Protein | NP_004323 | BPHL | biphenyl hydrolase-like (serine |
| | | | | hydrolase; breast epithelial |
| | | | | mucin-associated antigen) |
| 2393 | DNA | AA290994 | | Homo sapiens cDNA FLJ20722 |
| | | | | fis, clone HEP15411, mRNA |
| | | | | sequence |
| 2394 | DNA | AA554945 | | ESTs, Weakly similar to |
| | | | | hypothetical protein FLJ20378 |
| | | | | [Homo sapiens] [H. sapiens] |
| 2395 | DNA | NM_015626 | WSB1 | SOCS box-containing WD |
| | | | | protein SWiP-1 |
| 2396 | Protein | NP_056441 | WSB1 | SOCS box-containing WD |
| | | | | protein SWiP-1 |
| 2397 | DNA | NM_134264 | WSB1 | SOCS box-containing WD |
| | | | | protein SWiP-1 |
| 2398 | Protein | NP_599026 | WSB1 | SOCS box-containing WD |
| | | | | protein SWiP-1 |
| 2399 | DNA | NM_134265 | WSB1 | SOCS box-containing WD |
| | | | | protein SWiP-1 |
| 2400 | Protein | NP_599027 | WSB1 | SOCS box-containing WD |
| | | | | protein SWiP-1 |
| 2401 | DNA | NM_030980 | FLJ12671 | hypothetical protein FLJ12671 |
| 2402 | Protein | NP_112242 | FLJ12671 | hypothetical protein FLJ12671 |
| 2403 | DNA | NM_017432 | PTOV1 | prostate tumor over expressed |
| | | | | gene 1 |
| 2404 | Protein | NP_059128 | PTOV1 | prostate tumor over expressed |
| | | | | gene 1 |
| 2405 | DNA | W26477 | HELSNF1 | helicase with SNF2 domain 1 |
| 2406 | DNA | NM_003864 | SAP30 | sin3-associated polypeptide, |
| | | | | 30 kDa |
| 2407 | Protein | NP_003855 | SAP30 | sin3-associated polypeptide, |
| | | | | 30 kDa |
| 2408 | DNA | L36531 | ITGA8 | integrin alpha 8 |
| 2409 | Protein | L36531 (Translation) | ITGA8 | integrin, alpha 8 |
| 2410 | DNA | NM_004272 | SYN47 | Homer, neuronal immediate |
| | | | | early gene, 1B |
| 2411 | Protein | NP_004263 | SYN47 | Homer, neuronal immediate |
| | | | | early gene, 1B |
| 2412 | DNA | NM_003213 | TEAD4 | TEA domain family member 4 |
| 2413 | Protein | NP_003204 | TEAD4 | TEA domain family member 4 |
| 2414 | DNA | NM_024112 | C9orf16 | chromosome 9 open reading |
| | | | | frame 16 |
| 2415 | Protein | NP_077017 | C9orf16 | chromosome 9 open reading |
| | | | | frame 16 |
| 2416 | DNA | NM_005544 | IRS1 | insulin receptor substrate 1 |
| 2417 | Protein | NP_005535 | IRS1 | insulin receptor substrate 1 |
| 2418 | DNA | NM_006951 | TAF5 | TAF5 RNA polymerase II, |
| | | | | TATA box binding protein |
| | | | | (TBP)-associated factor, |
| | | | | 100 kDa |
| 2419 | Protein | NP_008882 | TAF5 | TAF5 RNA polymerase II, |
| | | | | TATA box binding protein |
| | | | | (TBP)-associated factor, |
| | | | | 100 kDa |
| 2420 | DNA | NM_139052 | TAF5 | TAF5 RNA polymerase II, |
| | | | | TATA box binding protein |
| | | | | (TBP)-associated factor, |
| | | | | 100 kDa |
| 2421 | Protein | NP_620640 | TAF5 | TAF5 RNA polymerase II, |
| | | | | TATA box binding protein |
| | | | | (TBP)-associated factor, |
| | | | | 100 kDa |
| 2422 | DNA | NM_002692 | POLE2 | polymerase (DNA directed), |
| | | | | epsilon 2 (p59 subunit) |
| 2423 | Protein | NP_002683 | POLE2 | polymerase (DNA directed), |
| | | | | epsilon 2 (p59 subunit) |
| 2424 | DNA | NM_004459 | FALZ | fetal Alzheimer antigen |
| 2425 | Protein | NP_004450 | FALZ | fetal Alzheimer antigen |
| 2426 | DNA | NM_004634 | BRPF1 | bromodomain and PHD finger |
| | | | | containing, 1 |
| 2427 | Protein | NP_004625 | BRPF1 | bromodomain and PHD finger |
| | | | | containing, 1 |
| 2428 | DNA | NM_003624 | RANBP3 | RAN binding protein 3 |
| 2429 | Protein | NP_003615 | RANBP3 | RAN binding protein 3 |
| 2430 | DNA | NM_007320 | RANBP3 | RAN binding protein 3 |
| 2431 | Protein | NP_015559 | RANBP3 | RAN binding protein 3 |
| 2432 | DNA | NM_007321 | RANBP3 | RAN binding protein 3 |
| 2433 | Protein | NP_015560 | RANBP3 | RAN binding protein 3 |
| 2434 | DNA | NM_007322 | RANBP3 | RAN binding protein 3 |
| 2435 | Protein | NP_015561 | RANBP3 | RAN binding protein 3 |
| 2436 | DNA | NM_014902 | KIAA0964 | KIAA0964 protein |
| 2437 | Protein | NP_055717 | KIAA0964 | KIAA0964 protein |
| 2438 | DNA | NM_002414 | MIC2 | antigen identified by |
| | | | | monoclonal antibodies 12E7, |
| | | | | F21 and O13 |
| 2439 | Protein | NP_002405 | MIC2 | antigen identified by |
| | | | | monoclonal antibodies 12E7, |
| | | | | F21 and O13 |
| 2440 | DNA | NM_005534 | IFNGR2 | interferon gamma receptor 2 |
| | | | | (interferon gamma transducer |
| | | | | 1) |
| 2441 | Protein | NP_005525 | IFNGR2 | interferon gamma receptor 2 |
| | | | | (interferon gamma transducer |
| | | | | 1) |
| 2442 | DNA | NM_014827 | KIAA0663 | KIAA0663 gene product |
| 2443 | Protein | NP_055642 | KIAA0663 | KIAA0663 gene product |
| 2444 | DNA | NM_005054 | RANBP2L1 | RAN binding protein 2-like 1 |
| 2445 | Protein | NP_005045 | RANBP2L1 | RAN binding protein 2-like 1 |
| 2446 | DNA | NM_032260 | RANBP2L1 | RAN binding protein 2-like 1 |
| 2447 | Protein | NP_115636 | RANBP2L1 | RAN binding protein 2-like 1 |
| 2448 | DNA | NM_000975 | RPL11 | ribosomal protein L11 |
| 2449 | Protein | NP_000966 | RPL11 | ribosomal protein L11 |
| 2450 | DNA | NM_005730 | OS4 | conserved gene amplified in |
| | | | | osteosarcoma |
| 2451 | Protein | NP_005721 | OS4 | conserved gene amplified in |
| | | | | osteosarcoma |
| 2452 | DNA | NM_000462 | UBE3A | ubiquitin protein ligase E3A |
| | | | | (human papilloma virus E6- |
| | | | | associated protein, Angelman |
| | | | | syndrome) |
| 2453 | Protein | NP_000453 | UBE3A | ubiquitin protein ligase E3A |
| | | | | (human papilloma virus E6- |
| | | | | associated protein, Angelman |
| | | | | syndrome) |
| 2454 | DNA | NM_130838 | UBE3A | ubiquitin protein ligase E3A |
| | | | | (human papilloma virus E6- |
| | | | | associated protein, Angelman |
| | | | | syndrome) |
| 2455 | Protein | NP_570853 | UBE3A | ubiquitin protein ligase E3A |
| | | | | (human papilloma virus E6- |
| | | | | associated protein, Angelman |
| | | | | syndrome) |
| 2456 | DNA | NM_130839 | UBE3A | ubiquitin protein ligase E3A |
| | | | | (human papilloma virus E6- |
| | | | | associated protein, Angelman |
| | | | | syndrome) |
| 2457 | Protein | NP_570854 | UBE3A | ubiquitin protein ligase E3A |
| | | | | (human papilloma virus E6- |
| | | | | associated protein, Angelman |
| | | | | syndrome) |
| 2458 | DNA | NM_004373 | COX6A1 | cytochrome c oxidase subunit |
| | | | | VIa polypeptide 1 |
| 2459 | Protein | NP_004364 | COX6A1 | cytochrome c oxidase subunit |
| | | | | VIa polypeptide 1 |
| 2460 | DNA | NM_022170 | WBSCR1 | Williams-Beuren syndrome |
| | | | | chromosome region 1 |
| 2461 | Protein | NP_071496 | WBSCR1 | Williams-Beuren syndrome |
| | | | | chromosome region 1 |
| 2462 | DNA | NM_031992 | WBSCR1 | Williams-Beuren syndrome |
| | | | | chromosome region 1 |
| 2463 | Protein | NP_114381 | WBSCR1 | Williams-Beuren syndrome |
| | | | | chromosome region 1 |
| 2464 | DNA | NM_002574 | PRDX1 | peroxiredoxin 1 |
| 2465 | Protein | NP_002565 | PRDX1 | peroxiredoxin 1 |
| 2466 | DNA | NM_002166 | ID2 | inhibitor of DNA binding 2, |
| | | | | dominant negative helix-loop- |
| | | | | helix protein |
| 2467 | Protein | NP_002157 | ID2 | inhibitor of DNA binding 2, |
| | | | | dominant negative helix-loop- |
| | | | | helix protein |
| 2468 | DNA | NM_002629 | PGAM1 | phosphoglycerate mutase 1 |
| | | | | (brain) |
| 2469 | Protein | NP_002620 | PGAM1 | phosphoglycerate mutase 1 |
| | | | | (brain) |
| 2470 | DNA | NM_004090 | DUSP3 | dual specificity phosphatase 3 |
| | | | | (vaccinia virus phosphatase |
| | | | | VH1-related) |
| 2471 | Protein | NP_004081 | DUSP3 | dual specificity phosphatase 3 |
| | | | | (vaccinia virus phosphatase |
| | | | | VH1-related) |
| 2472 | DNA | AI222594 | | Homo sapiens mRNA; cDNA |
| | | | | DKFZp564H1916 (from clone |
| | | | | DKFZp564H1916), mRNA |
| | | | | sequence |
| 2473 | DNA | NM_013298 | HSU79252 | hypothetical protein HSU79252 |
| 2474 | Protein | NP_037430 | HSU79252 | hypothetical protein HSU79252 |
| 2475 | DNA | AB007916 | KIAA0447 | KIAA0447 gene product |
| 2476 | Protein | AB007916 | KIAA0447 | KIAA0447 gene product |
| | | (Translation) | | |
| 2477 | DNA | NM_006303 | JTV1 | JTV1 gene |
| 2478 | Protein | NP_006294 | JTV1 | JTV1 gene |
| 2479 | DNA | NM_004773 | TRIP3 | thyroid hormone receptor |
| | | | | interactor 3 |
| 2480 | Protein | NP_004764 | TRIP3 | thyroid hormone receptor |
| | | | | interactor 3 |
| 2481 | DNA | NM_016391 | HSPC111 | hypothetical protein HSPC111 |
| 2482 | Protein | NP_057475 | HSPC111 | hypothetical protein HSPC111 |
| 2483 | DNA | AL046940 | | ESTs, Weakly similar to |
| | | | | hypothetical protein FLJ22184 |
| | | | | [Homo sapiens] [H. sapiens] |
| 2484 | DNA | NM_020151 | STARD7 | START domain containing 7 |
| 2485 | Protein | NP_064536 | STARD7 | START domain containing 7 |
| 2486 | DNA | NM_139267 | STARD7 | START domain containing 7 |
| 2487 | DNA | NM_005234 | NR2F6 | nuclear receptor subfamily 2, |
| | | | | group F, member 6 |
| 2488 | Protein | NP_005225 | NR2F6 | nuclear receptor subfamily 2, |
| | | | | group F, member 6 |
| 2489 | DNA | NM_002967 | SAFB | scaffold attachment factor B |
| 2490 | Protein | NP_002958 | SAFB | scaffold attachment factor B |
| 2491 | DNA | NM_018186 | PACE-1 | ezrin-binding partner PACE-1 |
| 2492 | Protein | NP_060656 | PACE-1 | ezrin-binding partner PACE-1 |
| 2493 | DNA | NM_020423 | PACE-1 | ezrin-binding partner PACE-1 |
| 2494 | Protein | NP_065156 | PACE-1 | ezrin-binding partner PACE-1 |
| 2495 | DNA | NM_001130 | AES | amino-terminal enhancer of |
| | | | | split |
| 2496 | Protein | NP_001121 | AES | amino-terminal enhancer of |
| | | | | split |
| 2497 | DNA | NM_005859 | PURA | purine-rich element binding |
| | | | | protein A |
| 2498 | Protein | NP_005850 | PURA | purine-rich element binding |
| | | | | protein A |
| 2499 | DNA | NM_003032 | SIAT1 | sialyltransferase 1 (beta- |
| | | | | galactoside alpha-2,6- |
| | | | | sialytransferase) |
| 2500 | Protein | NP_003023 | SIAT1 | sialyltransferase 1 (beta- |
| | | | | galactoside alpha-2,6- |
| | | | | sialytransferase) |
| 2501 | DNA | NM_173216 | SIAT1 | sialyltransferase 1 (beta- |
| | | | | galactoside alpha-2,6- |
| | | | | sialytransferase) |
| 2502 | DNA | NM_173217 | SIAT1 | sialyltransferase 1 (beta- |
| | | | | galactoside alpha-2,6- |
| | | | | sialytransferase) |
| 2503 | Protein | NP_775324 | SIAT1 | sialyltransferase 1 (beta- |
| | | | | galactoside alpha-2,6- |
| | | | | sialytransferase) |
| 2504 | DNA | NM_003952 | RPS6KB2 | ribosomal protein S6 kinase, |
| | | | | 70 kDa, polypeptide 2 |
| 2505 | Protein | NP_003943 | RPS6KB2 | ribosomal protein S6 kinase, |
| | | | | 70 kDa, polypeptide 2 |
| 2506 | DNA | NM_015110 | SMC5 | SMC5 protein |
| 2507 | Protein | NP_055925 | SMC5 | SMC5 protein |
| 2508 | DNA | NM_007152 | ZNF195 | zinc finger protein 195 |
| 2509 | Protein | NP_009083 | ZNF195 | zinc finger protein 195 |
| 2510 | DNA | NM_003171 | SUPV3L1 | suppressor of var1, 3-like 1 (S. cerevisiae) |
| 2511 | Protein | NP_003162 | SUPV3L1 | suppressor of var1, 3-like 1 (S. cerevisiae) |
| 2512 | DNA | NM_012265 | C22orf3 | chromosome 22 open reading |
| | | | | frame 3 |
| 2513 | Protein | NP_036397 | C22orf3 | chromosome 22 open reading |
| | | | | frame 3 |
| 2514 | DNA | NM_004053 | BYSL | bystin-like |
| 2515 | Protein | NP_004044 | BYSL | bystin-like |
| 2516 | DNA | NM_014921 | LEC2 | lectomedin-2 |
| 2517 | Protein | NP_055736 | LEC2 | lectomedin-2 |
| 2518 | DNA | NM_015285 | WDR7 | WD repeat domain 7 |
| 2519 | Protein | NP_056100 | WDR7 | WD repeat domain 7 |
| 2520 | DNA | NM_052834 | WDR7 | WD repeat domain 7 |
| 2521 | Protein | NP_443066 | WDR7 | WD repeat domain 7 |
| 2522 | DNA | AB014554 | PPFIA3 | protein tyrosine phosphatase, |
| | | | | receptor type, f polypeptide |
| | | | | (PTPRF), interacting protein |
| | | | | (liprin), alpha 3 |
| 2523 | Protein | AB014554 | PPFIA3 | protein tyrosine phosphatase, |
| | | (Translation) | | receptor type, f polypeptide |
| | | | | (PTPRF), interacting protein |
| | | | | (liprin), alpha 3 |
| 2524 | DNA | NM_003453 | ZNF198 | zinc finger protein 198 |
| 2525 | Protein | NP_003444 | ZNF198 | zinc finger protein 198 |
| 2526 | DNA | NM_005043 | MAP2K7 | mitogen-activated protein |
| | | | | kinase kinase 7 |
| 2527 | Protein | NP_005034 | MAP2K7 | mitogen-activated protein |
| | | | | kinase kinase 7 |
| 2528 | DNA | NM_145185 | MAP2K7 | mitogen-activated protein |
| | | | | kinase kinase 7 |
| 2529 | Protein | NP_660186 | MAP2K7 | mitogen-activated protein |
| | | | | kinase kinase 7 |
| 2530 | DNA | NM_145329 | MAP2K7 | mitogen-activated protein |
| | | | | kinase kinase 7 |
| 2531 | Protein | NP_663302 | MAP2K7 | mitogen-activated protein |
| | | | | kinase kinase 7 |
| 2532 | DNA | NM_014918 | CHSY1 | carbohydrate (chondroitin) |
| | | | | synthase 1 |
| 2533 | Protein | NP_055733 | CHSY1 | carbohydrate (chondroitin) |
| | | | | synthase 1 |
| 2534 | DNA | AB007883 | KIAA0423 | KIAA0423 protein |
| 2535 | Protein | AB007883 | KIAA0423 | KIAA0423 protein |
| | | (Translation) | | |
| 2536 | DNA | NM_004520 | KIF2 | kinesin heavy chain member 2 |
| 2537 | Protein | NP_004511 | KIF2 | kinesin heavy chain member 2 |
| 2538 | DNA | NM_021212 | ZF | HCF-binding transcription |
| | | | | factor Zhangfei |
| 2539 | Protein | NP_067035 | ZF | HCF-binding transcription |
| | | | | factor Zhangfei |
| 2540 | DNA | NM_005360 | MAF | v-maf musculoaponeurotic |
| | | | | fibrosarcoma oncogene |
| | | | | homolog (avian) |
| 2541 | Protein | NP_005351 | MAF | v-maf musculoaponeurotic |
| | | | | fibrosarcoma oncogene |
| | | | | homolog (avian) |
| 2542 | DNA | NM_003668 | MAPKAPK5 | mitogen-activated protein |
| | | | | kinase-activated protein kinase 5 |
| 2543 | Protein | NP_003659 | MAPKAPK5 | mitogen-activated protein |
| | | | | kinase-activated protein kinase 5 |
| 2544 | DNA | NM_139078 | MAPKAPK5 | mitogen-activated protein |
| | | | | kinase-activated protein kinase 5 |
| 2545 | Protein | NP_620777 | MAPKAPK5 | mitogen-activated protein |
| | | | | kinase-activated protein kinase 5 |
| 2546 | DNA | NM_002405 | MFNG | manic fringe homolog |
| | | | | (Drosophila) |
| 2547 | Protein | NP_002396 | MFNG | manic fringe homolog |
| | | | | (Drosophila) |
| 2548 | DNA | NM_006339 | HMG20B | high-mobility group 20B |
| 2549 | Protein | NP_006330 | HMG20B | high-mobility group 20B |
| 2550 | DNA | W72239 | | Homo sapiens mRNA; cDNA |
| | | | | DKFZp434M162 (from clone |
| | | | | DKFZp434M162), mRNA |
| | | | | sequence |
| 2551 | DNA | NM_000835 | GRIN2C | glutamate receptor, ionotropic, |
| | | | | N-methyl D-asparate 2C |
| 2552 | Protein | NP_000826 | GRIN2C | glutamate receptor, ionotropic, |
| | | | | N-methyl D-asparate 2C |
| 2553 | DNA | NM_006007 | ZNF216 | zinc finger protein 216 |
| 2554 | Protein | NP_005998 | ZNF216 | zinc finger protein 216 |
| 2555 | DNA | NM_004725 | BUB3 | BUB3 budding uninhibited by |
| | | | | benzimidazoles 3 homolog |
| | | | | (yeast) |
| 2556 | Protein | NP_004716 | BUB3 | BUB3 budding uninhibited by |
| | | | | benzimidazoles 3 homolog |
| | | | | (yeast) |
| 2557 | DNA | NM_015360 | KIAA0052 | KIAA0052 protein |
| 2558 | Protein | NP_056175 | KIAA0052 | KIAA0052 protein |
| 2559 | DNA | NM_005180 | BMI1 | B lymphoma Mo-MLV |
| | | | | insertion region (mouse) |
| 2560 | Protein | NP_005171 | BMI1 | B lymphoma Mo-MLV |
| | | | | insertion region (mouse) |
| 2561 | DNA | NM_015190 | DNAJC9 | DnaJ (Hsp40) homolog, |
| | | | | subfamily C, member 9 |
| 2562 | Protein | NP_056005 | DNAJC9 | DnaJ (Hsp40) homolog, |
| | | | | subfamily C, member 9 |
| 2563 | DNA | X68560 | SP3 | Sp3 transcription factor |
| 2564 | Protein | X68560 (Translation) | SP3 | Sp3 transcription factor |
| 2565 | DNA | NM_004111 | FEN1 | flap structure-specific |
| | | | | endonuclease 1 |
| 2566 | Protein | NP_004102 | FEN1 | flap structure-specific |
| | | | | endonuclease 1 |
| 2567 | DNA | NM_016030 | CGI-87 | CGI-87 protein |
| 2568 | Protein | NP_057114 | CGI-87 | CGI-87 protein |
| 2569 | DNA | AB023164 | KIAA0947 | KIAA0947 protein |
| 2570 | Protein | AB023164 | KIAA0947 | KIAA0947 protein |
| | | (Translation) | | |
| 2571 | DNA | NM_001949 | E2F3 | E2F transcription factor 3 |
| 2572 | Protein | NP_001940 | E2F3 | E2F transcription factor 3 |
| 2573 | DNA | D87445 | KIAA0256 | KIAA0256 gene product |
| 2574 | Protein | D87445 (Translation) | KIAA0256 | KIAA0256 gene product |
| 2575 | DNA | NM_015342 | KIAA0073 | KIAA0073 protein |
| 2576 | Protein | NP_056157 | KIAA0073 | KIAA0073 protein |
| 2577 | DNA | NM_018416 | FHX | FOXJ2 forkhead factor |
| 2578 | Protein | NP_060886 | FHX | FOXJ2 forkhead factor |
| 2579 | DNA | AB028956 | KIAA1033 | KIAA1033 protein |
| 2580 | Protein | AB028956 | KIAA1033 | KIAA1033 protein |
| | | (Translation) | | |
| 2581 | DNA | NM_004808 | NMT2 | N-myristoyltransferase 2 |
| 2582 | Protein | NP_004799 | NMT2 | N-myristoyltransferase 2 |
| 2583 | DNA | NM_000455 | STK11 | serine/threonine kinase 11 |
| | | | | (Peutz-Jeghers syndrome) |
| 2584 | Protein | NP_000446 | STK11 | serine/threonine kinase 11 |
| | | | | (Peutz-Jeghers syndrome) |
| 2585 | DNA | D83776 | KIAA0191 | KIAA0191 protein |
| 2586 | Protein | D83776 (Translation) | KIAA0191 | KIAA0191 protein |
| 2587 | DNA | AF007128 | | Homo sapiens clone 23870 |
| | | | | mRNA sequence |
| 2588 | DNA | AB018337 | KIAA0794 | KIAA0794 protein |
| 2589 | Protein | AB018337 | KIAA0794 | KIAA0794 protein |
| | | (Translation) | | |
| 2590 | DNA | NM_024051 | MGC3077 | hypothetical protein MGC3077 |
| 2591 | Protein | NP_076956 | MGC3077 | hypothetical protein MGC3077 |
| 2592 | DNA | NM_002646 | PIK3C2B | phosphoinositide-3-kinase, |
| | | | | class 2, beta polypeptide |
| 2593 | Protein | NP_002637 | PIK3C2B | phosphoinositide-3-kinase, |
| | | | | class 2, beta polypeptide |
| 2594 | DNA | NM_005745 | BCAP31 | accessory protein BAP31 |
| 2595 | Protein | NP_005736 | BCAP31 | accessory protein BAP31 |
| 2596 | DNA | NM_001319 | CSNK1G2 | casein kinase 1, gamma 2 |
| 2597 | Protein | NP_001310 | CSNK1G2 | casein kinase 1, gamma 2 |
| 2598 | DNA | NM_005744 | ARIH1 | ariadne homolog, ubiquitin- |
| | | | | conjugating enzyme E2 binding |
| | | | | protein, 1 (Drosophila) |
| 2599 | Protein | NP_005735 | ARIH1 | ariadne homolog, ubiquitin- |
| | | | | conjugating enzyme E2 binding |
| | | | | protein, 1 (Drosophila) |
| 2600 | DNA | NM_005839 | SRRM1 | serine/arginine repetitive matrix 1 |
| 2601 | Protein | NP_005830 | SRRM1 | serine/arginine repetitive matrix 1 |
| 2602 | DNA | NM_004342 | CALD1 | caldesmon 1 |
| 2603 | Protein | NP_004333 | CALD1 | caldesmon 1 |
| 2604 | DNA | NM_033138 | CALD1 | caldesmon 1 |
| 2605 | Protein | NP_149129 | CALD1 | caldesmon 1 |
| 2606 | DNA | NM_033139 | CALD1 | caldesmon 1 |
| 2607 | Protein | NP_149130 | CALD1 | caldesmon 1 |
| 2608 | DNA | NM_033140 | CALD1 | caldesmon 1 |
| 2609 | Protein | NP_149131 | CALD1 | caldesmon 1 |
| 2610 | DNA | NM_033157 | CALD1 | caldesmon 1 |
| 2611 | Protein | NP_149347 | CALD1 | caldesmon 1 |
| 2612 | DNA | NM_021034 | IFITM3 | interferon induced |
| | | | | transmembrane protein 3 (1-8 U) |
| 2613 | Protein | NP_066362 | IFITM3 | interferon induced |
| | | | | transmembrane protein 3 (1-8 U) |
| 2614 | DNA | NM_014900 | KIAA0977 | KIAA0977 protein |
| 2615 | Protein | NP_055715 | KIAA0977 | KIAA0977 protein |
| 2616 | DNA | NM_001865 | | Cluster Incl. |
| | | | | AA978033: oq55e04.s1 Homo |
| | | | | sapiens cDNA, 3′ end |
| | | | | /clone = IMAGE-1590270 |
| | | | | /clone_end = 3′ /gb = AA978033 |
| | | | | /gi = 3155479 /ug = Hs.182684 |
| | | | | /len = 524 |
| 2617 | Protein | NP_001856 | | Cluster Incl. |
| | | | | AA978033: oq55e04.s1 Homo |
| | | | | sapiens cDNA, 3′ end |
| | | | | /clone = IMAGE-1590270 |
| | | | | /clone_end = 3′ /gb = AA978033 |
| | | | | /gi = 3155479 /ug = Hs.182684 |
| | | | | /len = 524 |
| 2618 | DNA | NM_003252 | TIAL1 | TIA1 cytotoxic granule- |
| | | | | associated RNA binding |
| | | | | protein-like 1 |
| 2619 | Protein | NP_003243 | TIAL1 | TIA1 cytotoxic granule- |
| | | | | associated RNA binding |
| | | | | protein-like 1 |
| 2620 | DNA | NM_022333 | TIAL1 | TIA1 cytotoxic granule- |
| | | | | associated RNA binding |
| | | | | protein-like 1 |
| 2621 | Protein | NP_071728 | TIAL1 | TIA1 cytotoxic granule- |
| | | | | associated RNA binding |
| | | | | protein-like 1 |
| 2622 | DNA | NM_007209 | RPL35 | ribosomal protein L35 |
| 2623 | Protein | NP_009140 | RPL35 | ribosomal protein L35 |
| 2624 | DNA | NM_004045 | ATOX1 | ATX1 antioxidant protein 1 |
| | | | | homolog (yeast) |
| 2625 | Protein | NP_004036 | ATOX1 | ATX1 antioxidant protein 1 |
| | | | | homolog (yeast) |
| 2626 | DNA | NM_001418 | EIF4G2 | eukaryotic translation initiation |
| | | | | factor 4 gamma, 2 |
| 2627 | Protein | NP_001409 | EIF4G2 | eukaryotic translation initiation |
| | | | | factor 4 gamma, 2 |
| 2628 | DNA | NM_000352 | ABCC8 | ATP-binding cassette, sub- |
| | | | | family C (CFTR/MRP), |
| | | | | member 8 |
| 2629 | Protein | NP_000343 | ABCC8 | ATP-binding cassette, sub- |
| | | | | family C (CFTR/MRP), |
| | | | | member 8 |
| 2630 | DNA | NM_006153 | NCK1 | NCK adaptor protein 1 |
| 2631 | Protein | NP_006144 | NCK1 | NCK adaptor protein 1 |
| 2632 | DNA | NM_002417 | MKI67 | antigen identified by |
| | | | | monoclonal antibody Ki-67 |
| 2633 | Protein | NP_002408 | MKI67 | antigen identified by |
| | | | | monoclonal antibody Ki-67 |
| 2634 | DNA | AL040137 | | ESTs |
| 2635 | DNA | NM_021145 | DMTF1 | cyclin D binding myb-like |
| | | | | transcription factor 1 |
| 2636 | Protein | NP_066968 | DMTF1 | cyclin D binding myb-like |
| | | | | transcription factor 1 |
| 2637 | DNA | NM_004602 | STAU | staufen, RNA binding protein |
| | | | | (Drosophila) |
| 2638 | Protein | NP_004593 | STAU | staufen, RNA binding protein |
| | | | | (Drosophila) |
| 2639 | DNA | NM_017452 | STAU | staufen, RNA binding protein |
| | | | | (Drosophila) |
| 2640 | DNA | NM_017453 | STAU | staufen, RNA binding protein |
| | | | | (Drosophila) |
| 2641 | Protein | NP_059347 | STAU | staufen, RNA binding protein |
| | | | | (Drosophila) |
| 2642 | DNA | NM_017454 | STAU | staufen, RNA binding protein |
| | | | | (Drosophila) |
| 2643 | DNA | NM_016001 | CGI-48 | CGI-48 protein |
| 2644 | Protein | NP_057085 | CGI-48 | CGI-48 protein |
| 2645 | DNA | AF052138 | | Homo sapiens clone 23718 |
| | | | | mRNA sequence |
| 2646 | DNA | NM_002767 | PRPSAP2 | phosphoribosyl pyrophosphate |
| | | | | synthetase-associated protein 2 |
| 2647 | Protein | NP_002758 | PRPSAP2 | phosphoribosyl pyrophosphate |
| | | | | synthetase-associated protein 2 |
| 2648 | DNA | NM_015658 | DKFZP564C186 | DKFZP564C186 protein |
| 2649 | Protein | NP_056473 | DKFZP564C186 | DKFZP564C186 protein |
| 2650 | DNA | D29954 | KIAA0056 | KIAA0056 protein |
| 2651 | Protein | D29954 (Translation) | KIAA0056 | KIAA0056 protein |
| 2652 | DNA | NM_000529 | MC2R | melanocortin 2 receptor |
| | | | | (adrenocorticotropic hormone) |
| 2653 | Protein | NP_000520 | MC2R | melanocortin 2 receptor |
| | | | | (adrenocorticotropic hormone) |
| 2654 | DNA | NM_002382 | MAX | MAX protein |
| 2655 | Protein | NP_002373 | MAX | MAX protein |
| 2656 | DNA | NM_145112 | MAX | MAX protein |
| 2657 | Protein | NP_660087 | MAX | MAX protein |
| 2658 | DNA | NM_145113 | MAX | MAX protein |
| 2659 | DNA | NM_145114 | MAX | MAX protein |
| 2660 | Protein | NP_660089 | MAX | MAX protein |
| 2661 | DNA | NM_145116 | MAX | MAX protein |
| 2662 | Protein | NP_660092 | MAX | MAX protein |
| 2663 | DNA | NM_005532 | IFI27 | interferon, alpha-inducible |
| | | | | protein 27 |
| 2664 | Protein | NP_005523 | IFI27 | interferon, alpha-inducible |
| | | | | protein 27 |
| 2665 | DNA | NM_000244 | MEN1 | multiple endocrine neoplasia I |
| 2666 | Protein | NP_000235 | MEN1 | multiple endocrine neoplasia I |
| 2667 | DNA | NM_130799 | MEN1 | multiple endocrine neoplasia I |
| 2668 | Protein | NP_570711 | MEN1 | multiple endocrine neoplasia I |
| 2669 | DNA | NM_130800 | MEN1 | multiple endocrine neoplasia I |
| 2670 | DNA | NM_130801 | MEN1 | multiple endocrine neoplasia I |
| 2671 | DNA | NM_130802 | MEN1 | multiple endocrine neoplasia I |
| 2672 | DNA | NM_130803 | MEN1 | multiple endocrine neoplasia I |
| 2673 | DNA | NM_130804 | MEN1 | multiple endocrine neoplasia I |
| 2674 | DNA | NM_004964 | | Histone deacetylase HD1, |
| | | | | mRNA sequence |
| 2675 | Protein | NP_004955 | | Histone deacetylase HD1, |
| | | | | mRNA sequence |
| 2676 | DNA | BA-13885 | | Histone deacetylase HD1, |
| | | | | mRNA sequence |
| 2677 | DNA | NM_003743 | NCOA1 | nuclear receptor coactivator 1 |
| 2678 | Protein | NP_003734 | NCOA1 | nuclear receptor coactivator 1 |
| 2679 | DNA | NM_147223 | NCOA1 | nuclear receptor coactivator 1 |
| 2680 | Protein | NP_671756 | NCOA1 | nuclear receptor coactivator 1 |
| 2681 | DNA | NM_147233 | NCOA1 | nuclear receptor coactivator 1 |
| 2682 | Protein | NP_671766 | NCOA1 | nuclear receptor coactivator 1 |
| 2683 | DNA | NM_001893 | | Casein kinase I delta, mRNA |
| | | | | sequence |
| 2684 | Protein | NP_001884 | | Casein kinase I delta, mRNA |
| | | | | sequence |
| 2685 | DNA | NM_007065 | CDC37 | CDC37 cell division cycle 37 |
| | | | | homolog (S. cerevisiae) |
| 2686 | Protein | NP_008996 | CDC37 | CDC37 cell division cycle 37 |
| | | | | homolog (S. cerevisiae) |
| 2687 | DNA | NM_000534 | PMS1 | PMS1 postmeiotic segregation |
| | | | | increased 1 (S. cerevisiae) |
| 2688 | Protein | NP_000525 | PMS1 | PMS1 postmeiotic segregation |
| | | | | increased 1 (S. cerevisiae) |
| 2689 | DNA | NM_000535 | PMS2 | PMS2 postmeiotic segregation |
| | | | | increased 2 (S. cerevisiae) |
| 2690 | Protein | NP_000526 | PMS2 | PMS2 postmeiotic segregation |
| | | | | increased 2 (S. cerevisiae) |
| 2691 | DNA | NM_001809 | CENPA | centromere protein A, 17 kDa |
| 2692 | Protein | NP_001800 | CENPA | centromere protein A, 17 kDa |
| 2693 | DNA | NM_004419 | DUSP5 | dual specificity phosphatase 5 |
| 2694 | Protein | NP_004410 | DUSP5 | dual specificity phosphatase 5 |
| 2695 | DNA | NM_002887 | RARS | arginyl-tRNA synthetase |
| 2696 | Protein | NP_002878 | RARS | arginyl-tRNA synthetase |
| 2697 | DNA | NM_005521 | TLX1 | T-cell leukemia, homeobox 1 |
| 2698 | Protein | NP_005512 | TLX1 | T-cell leukemia, homeobox 1 |
| 2699 | DNA | NM_003318 | TTK | TTK protein kinase |
| 2700 | Protein | NP_003309 | TTK | TTK protein kinase |
| 2701 | DNA | NM_001291 | CLK2 | CDC-like kinase 2 |
| 2702 | Protein | NP_001282 | CLK2 | CDC-like kinase 2 |
| 2703 | DNA | NM_003993 | CLK2 | CDC-like kinase 2 |
| 2704 | Protein | NP_003984 | CLK2 | CDC-like kinase 2 |
| 2705 | DNA | HG3635-HT3845 | | Zinc Finger Protein, Kruppel- |
| | | | | Like |
| 2706 | DNA | HG1322-HT5143 | | Small Nuclear |
| | | | | Ribonucleoprotein, Polypeptide |
| | | | | C, Alt. Splice 2 |
| 2707 | DNA | HG1751-HT1768 | | Chorionic |
| | | | | Somatomammotropin Hormone |
| | | | | Cs-5 |
| 2708 | DNA | NM_004341 | CAD | carbamoyl-phosphate |
| | | | | synthetase 2, aspartate |
| | | | | transcarbamylase, and |
| | | | | dihydroorotase |
| 2709 | Protein | NP_004332 | CAD | carbamoyl-phosphate |
| | | | | synthetase 2, aspartate |
| | | | | transcarbamylase, and |
| | | | | dihydroorotase |
| 2710 | DNA | NM_006145 | DNAJB1 | DnaJ (Hsp40) homolog, |
| | | | | subfmaily B, member 1 |
| 2711 | Protein | NP_006136 | DNAJB1 | DnaJ (Hsp40) homolog, |
| | | | | subfmaily B, member 1 |
| 2712 | DNA | NM_004039 | ANXA2 | annexin A2 |
| 2713 | Protein | NP_004030 | ANXA2 | annexin A2 |
| 2714 | DNA | NM_002643 | PIGF | phosphatidylinositol glycan, |
| | | | | class F |
| 2715 | Protein | NP_002634 | PIGF | phosphatidylinositol glycan, |
| | | | | class F |
| 2716 | DNA | NM_173074 | PIGF | phosphatidylinositol glycan, |
| | | | | class F |
| 2717 | Protein | NP_775097 | PIGF | phosphatidylinositol glycan, |
| | | | | class F |
| 2718 | DNA | NM_006468 | RPC62 | polymerase (RNA) III (DNA |
| | | | | directed) (62 kD) |
| 2719 | Protein | NP_006459 | RPC62 | polymerase (RNA) III (DNA |
| | | | | directed) (62 kD) |
| 2720 | DNA | NM_003220 | TFAP2A | transcription factor AP-2 alpha |
| | | | | (activating enhancer binding |
| | | | | protein 2 alpha) |
| 2721 | Protein | NP_003211 | TFAP2A | transcription factor AP-2 alpha |
| | | | | (activating enhancer binding |
| | | | | protein 2 alpha) |
| 2722 | DNA | NM_000946 | PRIM1 | primase, polypeptide 1, 49 kDa |
| 2723 | Protein | NP_000937 | PRIM1 | primase, polypeptide 1, 49 kDa |
| 2724 | DNA | NM_003913 | PRPF4B | PRP4 pre-mRNA processing |
| | | | | factor 4 homolog B (yeast) |
| 2725 | Protein | NP_003904 | PRPF4B | PRP4 pre-mRNA processing |
| | | | | factor 4 homolog B (yeast) |
| 2726 | DNA | NM_000956 | PTGER2 | prostaglandin E receptor 2 |
| | | | | (subtype EP2), 53 kDa |
| 2727 | Protein | NP_000947 | PTGER2 | prostaglandin E receptor 2 |
| | | | | (subtype EP2), 53 kDa |
| 2728 | DNA | NM_004398 | DDX10 | DEAD/H (Asp-Glu-Ala- |
| | | | | Asp/His) box polypeptide 10 |
| | | | | (RNA helicase) |
| 2729 | Protein | NP_004389 | DDX10 | DEAD/H (Asp-Glu-Ala- |
| | | | | Asp/His) box polypeptide 10 |
| | | | | (RNA helicase) |
| 2730 | DNA | NM_003345 | UBE2I | ubiquitin-conjugating enzyme |
| | | | | E2I (UBC9 homolog, yeast) |
| 2731 | Protein | NP_003336 | UBE2I | ubiquitin-conjugating enzyme |
| | | | | E2I (UBC9 homolog, yeast) |
| 2732 | DNA | NM_003463 | PTP4A1 | protein tyrosine phosphatase |
| | | | | type IVA, member 1 |
| 2733 | Protein | NP_003454 | PTP4A1 | protein tyrosine phosphatase |
| | | | | type IVA, member 1 |
| 2734 | DNA | NM_006164 | NFE2L2 | nuclear factor (erythroid- |
| | | | | derived 2)-like 2 |
| 2735 | Protein | NP_006155 | NFE2L2 | nuclear factor (erythroid- |
| | | | | derived 2)-like 2 |
| 2736 | DNA | NM_006284 | TAF10 | TAF10 RNA polymerase II, |
| | | | | TATA box binding protein |
| | | | | (TBP)-associated factor, 30 kDa |
| 2737 | Protein | NP_006275 | TAF10 | TAF10 RNA polymerase II, |
| | | | | TATA box binding protein |
| | | | | (TBP)-associated factor, 30 kDa |
| 2738 | DNA | NM_000801 | FKBP1A | FK506 binding protein 1A, |
| | | | | 12 kDa |
| 2739 | Protein | NP_000792 | FKBP1A | FK506 binding protein 1A, |
| | | | | 12 kDa |
| 2740 | DNA | NM_054014 | FKBP1A | FK506 binding protein 1A, |
| | | | | 12 kDa |
| 2741 | DNA | NM_003403 | YY1 | YY1 transcription factor |
| 2742 | Protein | NP_003394 | YY1 | YY1 transcription factor |
| 2743 | DNA | NM_002415 | MIF | macrophage migration |
| | | | | inhibitory factor (glycosylation- |
| | | | | inhibiting factor) |
| 2744 | Protein | NP_002406 | MIF | macrophage migration |
| | | | | inhibitory factor (glycosylation- |
| | | | | inhibiting factor) |
| 2745 | DNA | NM_000296 | PKD1 | polycystic kidney disease 1 |
| | | | | (autosomal dominant) |
| 2746 | Protein | NP_000287 | PKD1 | polycystic kidney disease 1 |
| | | | | (autosomal dominant) |
| 2747 | DNA | NM_006243 | PPP2R5A | protein phosphatase 2, |
| | | | | regulatory subunit B (B56), |
| | | | | alpha isoform |
| 2748 | Protein | NP_006234 | PPP2R5A | protein phosphatase 2, |
| | | | | regulatory subunit B (B56), |
| | | | | alpha isoform |
| 2749 | DNA | NM_014235 | UBL4 | ubiquitin-like 4 |
| 2750 | Protein | NP_055050 | UBL4 | ubiquitin-like 4 |
| 2751 | DNA | NM_004156 | PPP2CB | protein phosphatase 2 (formerly |
| | | | | 2A), catalytic subunit, beta |
| | | | | isoform |
| 2752 | Protein | NP_004147 | PPP2CB | protein phosphatase 2 (formerly |
| | | | | 2A), catalytic subunit, beta |
| | | | | isoform |
| 2753 | DNA | NM_006332 | IFI30 | interferon, gamma-inducible |
| | | | | protein 30 |
| 2754 | Protein | NP_006323 | IFI30 | interferon, gamma-inducible |
| | | | | protein 30 |
| 2755 | DNA | NM_002811 | PSMD7 | proteasome (prosome, |
| | | | | macropain) 26S subunit, non- |
| | | | | ATPase, 7 (Mov34 homolog) |
| 2756 | Protein | NP_002802 | PSMD7 | proteasome (prosome, |
| | | | | macropain) 26S subunit, non- |
| | | | | ATPase, 7 (Mov34 homolog) |
| 2757 | DNA | NM_002806 | PSMC6 | proteasome (prosome, |
| | | | | macropain) 26S subunit, |
| | | | | ATPase, 6 |
| 2758 | Protein | NP_002797 | PSMC6 | proteasome (prosome, |
| | | | | macropain) 26S subunit, |
| | | | | ATPase, 6 |
| 2759 | DNA | NM_003262 | TLOC1 | translocation protein 1 |
| 2760 | Protein | NP_003253 | TLOC1 | translocation protein 1 |
| 2761 | DNA | NM_004954 | MARK2 | MAP/microtubule affinity- |
| | | | | regulating kinase 2 |
| 2762 | Protein | NP_004945 | MARK2 | MAP/microtubule affinity- |
| | | | | regulating kinase 2 |
| 2763 | DNA | NM_017490 | MARK2 | MAP/microtubule affinity- |
| | | | | regulating kinase 2 |
| 2764 | Protein | NP_059672 | MARK2 | MAP/microtubule affinity- |
| | | | | regulating kinase 2 |
| 2765 | DNA | NM_014264 | STK18 | serine/threonine kinase 18 |
| 2766 | Protein | NP_055079 | STK18 | serine/threonine kinase 18 |
| 2767 | DNA | NM_002969 | MAPK12 | mitogen-activated protein |
| | | | | kinase 12 |
| 2768 | Protein | NP_002960 | MAPK12 | mitogen-activated protein |
| | | | | kinase 12 |
| 2769 | DNA | K03022 | U2 small | U2 small nuclear RNA gene |
| | | | nuclear RNA | |
| 2770 | DNA | AK027091 | FLJ23438 fis, | FLJ23438 fis, clone HRC13275 |
| | | | clone | |
| | | | HRC13275 | |
| 2771 | DNA | AL833005 | cDNA | cDNA DKFZp666D074 |
| | | | DKFZp666D074 | |
| 2772 | DNA | BC003629 | clone | clone MGC: 2854 |
| | | | MGC: 2854 | IMAGE: 2987935 |
| | | | IMAGE: 2987935 | |
| 2773 | DNA | L37793 | small nuclear | small nuclear RNA (U2) gene |
| | | | RNA (U2) | |
| | | | gene | |
| 2774 | DNA | U57614 | U2 snRNA | U2 snRNA (RNU2) gene |
| | | | (RNU2) gene | |

[0063] Analogs of the biomarkers provided in Table 1 are also within the scope of the invention. Analogs can differ from the naturally occurring biomarker in nucleotide or amino acid sequence or in ways that do not involve sequence, or both. Non-sequence modifications include in vivo or in vitro chemical derivitization. Non-sequence modifications also include changes in acetylation, methylation, phosphorylation, carboxylation, or glycosylation.

[0064] Preferred analogs of the biomarkers provided in Table 1 (or biologically active fragments thereof) include those whose sequences differ from the wild-type sequences by one or more conservative amino acid substitutions or by one or more non-conservative amino acid substitutions, deletions, or insertions which do not abolish biological activity. Conservative substitutions typically include, for example, the substitution of one amino acid for another with similar characteristics, e.g., substitutions within the following groups: valine, glycine; glycine, alanine; valine, isoleucine, leucine; aspartic acid, glutamic acid; asparagine, glutamine; serine, threonine; lysine, arginine; and phenylalanine, tyrosine.

[0065] The biomarkers of the invention include any biological molecule that can be detected and quantified in a biological sample using standard biochemical assay methods, where the presence and/or quantity of the biomarker in the biological sample: (i) can be used to select an appropriate treatment; or (ii) can be used to monitor the efficacy and progress of treatment with a cdk modulating agent.

[0066] In one aspect, the invention includes the biomarker provided in SEQ ID NO:1246 and assigned GenBank Accession No. W28729. It has been discovered that this biomarker has an expression pattern that correlates with inhibition of cdk in cells upon treatment with a cdk modulating agent. The biomarker of SEQ ID NO:1246 was discovered to have the most consistent and robust regulation in response to cdk inhibition.

[0067] The invention also includes specialized microarrays, e.g., oligonucleotide microarrays or cDNA microarrays, comprising one or more biomarkers.

[0068] The invention also includes kits comprising a suitable container that comprises: one or more microarrays that comprise one or more biomarkers; one or more cdk modulating agents for use in testing cells from patient tissue specimens or patient samples; and instructions for use. In addition, kits contemplated by the invention can further include, for example, reagents or materials for monitoring the expression of biomarkers of the invention at the level of mRNA or protein, using other techniques and systems practiced in the art such as, for example, RT-PCR assays, which employ primers designed on the basis of one or more of the biomarkers described herein, immunoassays, such as enzyme linked immunosorbent assays (ELISAs), immunoblotting, e.g., Western blots, or in situ hybridization, and the like, as further described herein.

[0069] The invention also includes antibodies, including polyclonal or monoclonal, directed against one or more of the biomarker polypeptides. Such antibodies can be used in a variety of ways, for example, to purify, detect, and target the biomarker polypeptides of the invention, including both in vitro and in vivo diagnostic, detection, screening, and/or therapeutic methods.

[0070] In carrying out any of the methods of the invention, the levels of either a single biomarker or a set of two or more different biomarkers can be assayed. Assay of more than one biomarker may serve to increase the accuracy of monitoring the response of the patient to treatment with the cdk modulating agent, such as the extent of cdk2 inhibition. Measurement of a plurality of biomarkers can be carried out by assaying the different biomarkers in either the same biological sample or in different biological samples taken from the same patient.

[0071] In one aspect, the invention provides a method to monitor the response of a patient being treated for a disorder by administration of a cdk modulating agent, comprising: (a) determining the amount of at least one biomarker in a first biological sample taken from the patient prior to an initial treatment with the agent; (b) determining the amount of the biomarker in at least a second biological sample from the patient subsequent to the initial treatment with the agent; and (c) comparing the amount of the biomarker present in the second biological sample with the amount of the biomarker present in the first biological sample; such that a detectable change in the amount of the biomarker in the second biological sample, and/or in any subsequent biological samples, compared to the amount of biomarker present in the first biological sample indicates that the patient is responding positively to the treatment with the agent The detectable change can be a decrease or an increase in the amount of the biomarker in the second biological sample, and/or in any subsequent biological samples.

[0072] This method requires that at least two biological samples are taken from the patient at different time points. The first sample is typically obtained prior to an initial treatment with the cdk modulating agent. A second sample is then obtained, and any subsequent samples are also then obtained, after treatment with the cdk modulating agent has begun. In this method, the biomarker is monitored to determine: (i) if the amount of the biomarker is decreasing, (ii) if the rate of decrease in the amount of the biomarker is increasing, (iii) if the amount of the biomarker is increasing, (iv) if the rate of increase in the amount of the biomarker is increasing, or (v) if the amount of biomarker is stabilizing, any one of which may indicate that the patient is responding positively to the treatment depending upon the specific circumstances.

[0073] The biomarkers described herein may be upregulated or down-regulated following treatment with one or more cdk modulating agents.

[0074] When the biomarker is an upregulated biomarker, it is expected that the amount of the biomarker will increase following treatment with the cdk modulating agent, i.e., that there will be a detectable increase in the amount of the biomarker in the second biological sample (post administration of the cdk modulating agent) compared to the amount of biomarker in the first biological sample (prior to administration of the cdk modulating agent). If the biomarker is an upregulated biomarker and the level of the biomarker has not increased a predetermined or detectable amount, or if the rate of increase of the biomarker level is not sufficiently high, the treatment can be modified, such as by increasing the dosage or the number of treatments, or by changing the cdk modulating agent being administered to a more effective agent, or by combining the cdk modulating agent being used in the treatment with one or more other cdk modulating agents or therapies, or some combination thereof.

[0075] When the biomarker is a downregulated biomarker, it is expected that the amount of the biomarker will decrease following treatment with the cdk modulating agent, i.e., that there will be a detectable decrease in the amount of the biomarker in the second biological sample (post administration of the cdk modulating agent) compared to the amount of biomarker in the first biological sample (prior to administration of the cdk modulating agent). If the biomarker is a down-regulated biomarker and the level of the biomarker has not decreased a predetermined or detectable amount, or if the rate of decrease of the biomarker level is not sufficiently high, the treatment can be modified, such as by increasing the dosage or the number of treatments, or by changing the cdk modulating agent being administered to a more effective agent, or by combining the cdk modulating agent being used in the treatment with one or more other cdk modulating agents or therapies, or some combination thereof.

[0076] The invention further provides an improvement to a method for treating a patient suffering from a disorder by administration of a cdk modulating agent, wherein the improvement comprises monitoring the level of at least one biomarker in a biological sample taken from the patient at one or more time points during treatment with the agent so as to determine whether an effective amount of the agent is being administered to the patient. An effective amount of the agent is being administered to the patient if the level of a downregulated biomarker in the biological sample detectably decreases, or if a previously observed rate of decrease in the level of the biomarker increases, in response to administration of the agent. In addition, an effective amount of the agent is being administered to the patient if the level of an upregulated biomarker in the biological sample detectably increases, or if a previously observed rate of increase in the level of the biomarker increases, in response to administration of the agent.

[0077] The invention further provides an improvement to a method for treating a patient suffering from a disorder by administration of a cdk modulating agent, wherein the improvement comprises monitoring the level of at least one biomarker in a biological sample taken from the patient at one or more time points during treatment with the agent so as to determine when a sufficient time course of treatment with the agent has been completed. In one embodiment, a sufficient time course of treatment with the agent has been completed when the level of a downregulated biomarker detectably decreases below a predetermined level. In another embodiment, a sufficient time course of treatment with the agent has been completed when the level of an upregulated biomarker detectably increases above a predetermined level.

[0078] The type of biological sample from which the amount of biomarker is determined will depend on a variety of factors such as the particular biomarker, where and when it is synthesized, where the biomarker may be stored in the tissues, and into what biological tissue or fluid it may be released or otherwise accumulate. Generally, the biological sample will be selected from the group consisting of blood, a blood component such as serum or plasma, cerebrospinal fluid (CSF), saliva, and urine. In one aspect, the biological sample will be blood, serum, plasma, or CSF, and most preferably blood, serum, or plasma. Where more than one biomarker is analyzed, the analysis can be conducted on the same or different biological samples obtained from the patient.

[0079] The amount of the biomarker in a biological sample can be determined using standard techniques known in the art. For example, each biomarker can be assayed using biomarker-specific antibodies and immunological methods known in the art. Any appropriate immunoassay method can be used, including radioimmiunoassays, sandwich enzyme-linked immunoassays, competitive binding assays, homogeneous assays, and heterogeneous assays. Alternatively, the amount of biomarker can be determined using other techniques such as magnetic resonance spectroscopy, HPLC, or mass spectrometry. In any case, the assay method selected should be sensitive enough to be able to measure the particular biomarker in a concentration range from normal values found in healthy patients to elevated levels indicating neurological damage. The assay can be carried out in various formats including, e.g., in a microtiter plate format, using automated immunoassay analyzers known in the art.

[0080] As used herein, the predetermined level of the biomarker in the biological sample refers to that amount or concentration of the particular biomarker in a biological sample wherein the amount of the biomarker is higher (upregulated biomarkers) or lower (downregulated biomarkers) statistically than that determined to be present in a biological sample obtained from the patient absent the treatment with the cdk modulating agent. The predetermined level depends upon the particular biomarker.

[0081] The expression level of the biomarker provides information about the patient's likely response to treatment with a cdk modulating agent. For this purpose, it is often desirable to correct for (normalize away) both differences in the amount of RNA assayed and variability in the quality of the RNA used. Therefore, the assay typically measures and incorporates the expression of certain normalizing genes, including well known housekeeping genes, such as GAPDH and CYPL. Alternatively, or in addition, normalization can be based on the mean or median signal (Ct in the case of RT-PCR) of all of the assayed genes or a large subset thereof (global normalization approach). On a gene-by-gene basis, measured normalized amount of a patient tumor mRNA is compared to the amount found in a reference set of cancer tissue of the same type. The number (N) of cancer tissues in this reference set should be sufficiently high to ensure that different reference sets (as a whole) behave essentially the same way. If this condition is met, the identity of the individual cancer tissues present in a particular set will have no significant impact on the relative amounts of the genes assayed. The cancer tissue reference set can, in one aspect, consist of at least about 30 different cancer tissue specimens.

[0082] While the data described herein were generated in cell lines that are routinely used to screen and identify compounds that have potential utility for cancer therapy, the biomarkers may have both diagnostic and prognostic value in other diseases areas in which cdk or pathways in which cdk is involved is of importance, e.g., in immunology, or in cancers or tumors in which cell signaling and/or proliferation controls have gone awry.

[0083] Those having skill in the pertinent art will appreciate that cdk and pathways in which cdk is involved are used and functional in cell types other than cell lines of ovarian carcinoma cells and peripheral blood mononuclear cells. Therefore, the biomarkers and biomarker sets of the invention may show utility in cells from other tissues or organs associated with a disease state, or cancers or tumors derived from other tissue types. Non-limiting examples of such cells, tissues and organs include breast, colon, lung, prostate, testes, ovaries, cervix, esophagus, pancreas, spleen, liver, kidney, stomach, lymphocytic and brain, thereby providing a broad and advantageous applicability to the biomarkers described herein Cells for analysis can be obtained by conventional procedures as known in the art, for example, tissue biopsy, aspiration, sloughed cells, e.g., colonocytes, clinical or medical tissue or cell sampling procedures.

### EXAMPLES

[0084] As described below, transcription profiling was used to identify the biomarkers provided above in Table 1. Specifically, transcription profiling of the effect of a certain cdk2 inhibitor on peripheral blood mononuclear cells (PBMCs) was first performed. Next, profiling of a cdk2 inhibitor-treated tumor cell line A2780 at multiple doses and time points was performed to establish a correlation of tumor site response with peripheral blood biomarkers. In order to establish the molecular target-specificity of the potential biomarkers, tumor cell line A2780 treated with anti-cdk2 oligonucleotides was also profiled. Overlapping gene expression changes, as shown in FIG. 1, were selected for further evaluation in human ovarian carcinoma xenograft A2780 that were treated with the cdk2 inhibitor (Example 2). The selected biomarkers were subjected to real-time PCR analysis in order to verify the observed changes from the gene chip analysis. These biomarkers are provided above in Table 1.

[0085] In the examples below, the following conditions were employed.

[0086] Cdk2 Inhibitor: The cdk2 inhibitor of the examples is N-5-[[5-(1,1-Dimethylethyl)-2-oxazolyl]methyl]thio]-2-thiazolyl-4-piperidinecarboxamide, 0.5-L-tartaric acid salt: [chemical structure]
This cdk2 inhibitor was solubilized in 100% DMSO at a concentration of 10 mM. Compound dilutions were made into respective growth media

[0087] Cell Culture: The cell lines were maintained in RPMI-1640 plus 10% fetal bovine serum.

[0088] Clonogenic Growth Assay: The colony growth inhibition was measured for the A2780 ovarian carcinoma cells using a standard clonogenic assay. In this assay, 200 cells/well were seeded into 6-well tissue culture plates (Falcon™) (Becton, Dickinson and Company, Franklin Lakes, N.J., USA) and allowed to attach for 18 hours. Assay medium consisted of RPMI-1640 plus 10% fetal bovine serum. Cells were then treated in duplicate with a six concentration dose-response curve. The maximum concentration of DMSO never exceeded 0.25%. Cells were exposed to the cdk2 inhibitor for 4, 8, or 24 hours. The cdk2 inhibitor was then removed and the cells were washed with 2 volumes of PBS. The normal growth medium was then replaced. Colonies were fed with fresh media every third day. Colony number was scored on day 10-14 using a Optimax imaging station. The cdk2 inhibitor concentration required to inhibit 50% or 90% of colony formation (IC₅₀ or IC₉₀, respectively) was determined by non-linear regression analysis. The coefficient of variance (standard deviation/mean, n=3)=30%.

[0089] Real-Time Quantitative PCR Assays: A Taqman® real-time-PCR fluorogenic assay (Applied Biosystems, Foster City, Calif., USA) was used to quantitate the levels of specific mRNA. The cdk2 inhibitor treated A2780s cells were harvested at approximately 70% confluence and total RNA was prepared using the Qiagen RNeasy 96 Kit.

[0090] Taqman® reactions were prepared as follows: 100 ng total RNA; 25 nM-750 nM Forward Primer; 25 nM-750 nM Reverse Primer; 200 nM-400 nM Taqman® Probe (fluorescent dye labeled oligonucleotide primer); 1X Buffer A (Applied Biosystems, Foster City, Calif., USA); 5.5 mM MgCl₂; 300 μM DATP, dGTP, dTTP, dCTP; 1 U Amplitaq Gold; 20 U Superscript 2; 1 U RNase Inhibitor. Real-time PCR was performed using an Applied Biosystems 7700 Sequence Detection System. Conditions were as follows: 48° C. for 20 minutes (reverse transcription), 95° C. for 10 minutes (denaturation and activation of Amplitaq Gold), 40 cycles of PCR (95° C. for 15 seconds, 60° C. for 1 minutes).

[0091] The Sequence Detection System generates a Ct (threshold cycle) value that is used to calculate a concentration for each input messenger RNA template. Messenger RNA levels for each gene or fragment thereof of interest were normalized to GAPDH message levels to compensate for variations in total RNA quantity in the input sample. This was done by generating GAPDH Ct values for each cell line. Ct values for the gene or fragments thereof of interest and GAPDH were inserted into the δδCt equation:
Relative Quantity of Nucleic Acid Template=2^{δδCt}=2^{(δCta-δCtb)}(δCta=Ct target−Ct GAPDH, δCtb=Ct reference−Ct GAPDH)
which was used to calculate a normalized relative message level.

[0092] Gene Chip Analysis: Gene chips were used to quantitate the levels of gene expression on a large-scale with Affymetrix human gene chips HG-U95A, B, and C (Affymetrix, Inc., Santa Clara, Calif., USA). Gene chip hybridization was performed using an Affymetrix gene chip system including hybridization oven, washing station, scanner, and a computer workstation. Manufacturer's standard protocol was followed. Raw data were generated using Affymetrix Microarray Suite 4.0 software. A threshold of 20 units was assigned to any gene with a calculated expression level below 20, because discrimination of expression below this level could not be performed with confidence.

[0093] In Vitro Treatment of PBMC: PBMCs were isolated and incubated with the cdk2 inhibitor in vitro. Specifically, approximately 40 ml of blood were collected for the pilot study and then from 10 volunteers. The 40 ml of blood were then put into five Vacutainer™ CPT™ Mononuclear Cell Preparation Tubes (Product Number: 362753) (Becton, Dickinson and Company, Franklin Lakes, N.J., USA) with Sodium Heparin Anticoagulant 60/cs. Lymphocytes were then removed from the five Vacutainers™ pool and re-suspended in 20 ml of culture medium (RPMI, 10% serum, and glu/Pen/strep). Cells were counted at this step, and then centrifuged gently and then suspended with 4.0 ml of culture medium. Cells were then plated into 6 well plates (0.5 ml/well). Culture medium containing the cdk2 inhibitor or vehicle (3.5 ml) was then added to each well to give a final concentration of 100 nM cdk2 inhibitor in experimental wells, and also a final concentration of 1000 nM cdk2 inhibitor in experimental wells for the 10 subjects.

[0094] RNA and protein samples were harvested at 4 and 24 hours after addition of the cdk2 inhibitor. RNA was prepared using the RNeasy-mini RNA kit according to the manufacturer's specifications (Qiagen, Valencia, Calif., USA). For protein samples, cells were washed once with PBS before extracting with 0.5-1.0 ml of modified RIPA buffer [50 mM Tris (pH 8), 150 mM NaCl, 1% NP-40, 0.5% Na-deoxycholate, 0.1% SDS, 0.1% Na3VO4, 0.1 mM NaF, 10 mM β-glycerophosphate, plus Complete® protease inhibitors (Boehringer Mannhiem GmbH, Germany)]. Lysates were frozen at −80° C. Viability of cells at different time points following the cdk2 inhibitor treatment was determined by trypan blue exclusion.

[0095] Western Blot Analysis: The cdk2 inhibitor treated A2780s cells were harvested at approximately 70% confluence and total protein was prepared by lysing the cells in RIPA [50 mM Tris (pH 8), 150 mM NaCl, 1% NP-40, 0.5% Na-deoxycholate, 0.1% SDS, 0.1% Na3VO4, 0.1 mM NaF, 10 mM β-glycerophosphate, plus Complete® protease inhibitors (Boehringer Mannhiem GmbH, Germany)] buffer. Cell pellets were resuspended at a density of <2× 10⁷ cells/ml and incubated for 20 minutes on ice followed by a high speed 14,000 rpm centrifugation. The protein supernatant was then removed from the debris and protein content was quantitated using the Micro-BCA assay (Pierce Biotechnology, Inc., Rockford, Ill., USA). Treated extracts (25 μg/lane) were then separated using a 10% SDS-polyacrylamide gel (10.5× 14 cm). Proteins were then transferred from the gel to PVDF-membrane (Millipore Corporation, Billerica, Mass., USA) by exposure to 0.8 Amp/cm² in a semi-dry blotting apparatus (Hoefer Scientific Instruments, San Francisco, Calif., USA). PVDF protein blots were then blocked with 5% non-fat milk in TTBS (0.1% Tween 20 in Tris-buffered saline). Blots were then probed with primary antibody (mouse anti-cdk2 clone D-12, Santa Cruz Biotechnology, Santa Cruz, Calif., USA) in 5% non-fat milk in TTBS for 1-2 hours, followed by three washes with TTBS. An HRP-conjugated secondary antibody (HRP conjugated goat anti-mouse IgG, Promega Corp., Madison, Wis., USA) was then incubated with the blots in TTBS for 30 minutes. The blots were then washed three times with TTBS and developed with ECL-plus western blotting detection system (Amersham Biosciences, Piscataway, N.J., USA).

[0096] Cdk2 Antisense Treatment: A mixture of five antisense oligonucleotides targeted against cdk2 mRNA having the following sequences was used:

[0097] GCAGUAUACCUCUCGCUCUUGUCAA (SEQ ID NO:2775); UUUGGAAGUUCUCCAUGAAGCGCCA (SEQ ID NO:2776); GUCCAAAGUCUGCUAGCUUGAUGGC (SEQ ID NO:2777); CCCAGGAGGAUUUCAGGAGCUCGGU (SEQ ID NO:2778); UAGAAGUAACUCCUGGCCACACCAC (SEQ ID NO:2779). All gene modulations were based on relative levels of RNA in antisense treated cells versus reverse control oligonucleotide treated cells.

[0098] A2780s cells were plated in 6-well tissue culture plates at a density of 1-2×10⁵ cells/well. After an overnight incubation, cells were transfected with the antisense oligonucleotide mixture using Lipofectamine 2000 (Invitrogen Life Technologies, Carlsbad, Calif., USA). Briefly, a 10× lipid solution (10 ug/ml in OptiMEM) and a 10× oligonucleotide mixture (0.5 uM in OptiMEM) were prepared. A 5× solution of lipid/oligonucleotide complex was then prepared by mixing equal volumes of 10× lipid solution and 10× oligonucleotide mixture. The 5× solution of lipid/oligonucleotide complex was allowed to incubate at room temperature for 15 minutes to allow complexes to form. After incubation, the 5× lipid/oligonucleotide complex was diluted in RPMI containing 10% Fetal Bovine Serum to produce a 1× transfection reagent Cells in 6-well culture plates were transfected by replacing the overnight growth media with 1× transfection reagent. Cells were then incubated at various times (0, 12, 16, 20, and 24 hours) prior to harvesting RNA for analysis by Taqman® real-time-PCR fluorogenic assay. In every experiment, an extra well was transfected with a fluoresceinated random oligonucleotide to determine the transfection efficiency using flow cytometry. For all experiments, between 85% and 95% of A2780s cells were transfected.

### Example 1

### Transcription Profiling of Peripheral Blood Mononuclear Cells (PBMCs) Following Treatment with Cdk2 inhibitor, and A2780S Ovarian Carcinoma Cells Following Treatment with Cdk2 inhibitor or Anti-cdk2 Antisense Oligonucleotides

[0099] To identify biomarkers, transcriptional profiling was obtained for (i) PBMCs following treatment with cdk2 inhibitor, (ii) A2780S ovarian carcinoma cells following treatment with cdk2 inhibitor, and (iii) A2780S ovarian carcinoma cells following treatment with anti-cdk2 antisense oligonucleotides.

[0100] Table 2 lists the doses and time course used for treatment of the A2780 and PBMC cell types.

TABLE 2
Experimental design

| | | Drug Dose | Time course |
|---|---|---|---|
| Cell Type | Treatment | (nM) | (hours) |
| A2780 | cdk2 inhibitor | 0, 20, 100, 200 | 0, 1, 2, 4, 6, 24 |
| PBMC | cdk2 inhibitor | 0, 100 | 0, 4, 24 |
| (pooled 10 | | | |
| subjects) | | | |
| PBMC | cdk2 inhibitor | 0, 100, 1000 | 0, 4, 24 |
| (pilot) | | | |
| A2780 | Anti-cdk2 | Antisense oligo and | 0, 12, 16, 20, 24 |
| | oligonucleotide | control | |

[0101] Treatment of A2780 and PBMC was carried out as described above. The doses of the cdk2 inhibitor were derived from an understanding of the kinetics of tumor cell growth inhibition by the cdk2 inhibitor as assessed by proliferation and clonogenic assays (Table 3). This study clearly demonstrated that growth inhibition by the cdk2 inhibitor was time dependent. A minimal exposure of 8 hours was required for effective inhibition of colony formation. The values obtained from the 24 hour clonogenic assay were in good agreement with the 72 hour proliferation assay.

TABLE 3
Inhibition of colony formation by cdk2 inhibitor

| | IC₅₀ (nM) | IC₉₀ (nM) |
|---|---|---|
| A2780s Clonogenic assay, 4 hr. exposure | 302 | >1000 |
| A2780s Clonogenic assay, 8 hr. exposure | 154 | 303 |
| A2780s Clonogenic assay, 24 hr. | 166 | 208 |
| exposure | | |
| A2780s, 72 hr. XTT assay | 95 | 170 |

[0102] A pilot experiment of ex vivo treatment of PBMC from one healthy volunteer with the cdk2 inhibitor was first performed. Subsequently, PBMCs from ten healthy human subjects were collected and treated ex vivo with the cdk2 inhibitor. Total RNA was isolated and hybridized to gene chips.

[0103] Antisense inhibition of cdk2 expression was optimized for A2780 cells and carried out as described above. Under these conditions, cdk2 protein levels decreased 90% after 24 hours exposure. As shown in FIG. 2A, consistent reduction of cdk2 protein was observed in all three antisense treated wells (AS) relative to the controls wells (C). This resulted in a block in cell cycle progression and apoptosis that is similar to the cdk2 inhibitor treated A2780s cells. The decrease in cdk2 protein in relation to time of exposure was also determined. As shown in FIG. 2B, cdk2 levels were maximally inhibited at 12 hours and protein levels remained reduced through 24 hours.

### Example 2

### Selection of Biomarkers

[0104] In order to identify biomarkers for the cdk2 inhibitor that can be used as surrogate endpoints in PBMC and have molecular target-specific response, the expression profiles of the three sets of experiments in Example 1 were compared. Overlapping gene expression changes were selected as shown in FIG. 1.

[0105] To allow for the identification of cdk2 specific responses as well as compound specific changes at gene expression level, a statistical method was used to select genes that have gene expression changes associated with dose and time of treatment in the cdk2 inhibitor treated A2780s sample set. The data were analyzed using an analysis of variance (ANOVA) model to study the compound's dose effect and time effect on each gene. First, the data were rescaled to eliminate the chip effects by a linear regression technique. Then, an ANOVA model was fitted for each gene based on two factors—dose and time. The F-test was used to determine if there was significant dose or time effect in terms of the changes in the expression level of a particular gene. Genes with the p-value less than 0.05 in both dose effect test and time effect test were identified. The genes identified with a p-value of less than 0.05 in both dose effect and time effect are provided Table 1.

[0106] Overlapping gene expression changes from the three sets of Example 1 were selected for further evaluation in human ovarian carcinoma xenograft A2780 treated with the cdk2 inhibitor.

[0107] The human ovarian carcinoma xenograft A2780s were maintained in Balb/c nu/nu nude mice. Tumors were propagated as subcutaneous (sc) transplants using tumor fragments obtained from donor mice. For the cdk2 inhibitor treatment, tumors were allowed to grow to the pre-determined size window of approximately 100-200 mg (tumors outside the range were excluded) and animals were evenly distributed to various treatment and control groups (n=6). Treatment of each animal was based on individual body weight.

[0108] The cdk2 inhibitor was first dissolved in a mixture of Cremophor®/ethanol (50:50). One hour prior to administration, the cdk2 inhibitor was diluted with water so that the dosing solutions contained the specified excipient composition, i.e., Cremophor®/ethanol/water (1:1:8, v/v). The volume of all compounds injected was 0.01 ml/gm of mice. The cdk2 inhibitor was administered as a bolus injection intraperitoneal at doses of 36 and 18 mg/kg. Tumor and plasma were sampled at the time points of 4, 7, and 24 hour post treatment. Plasma sample was frozen immediately at −80° C. for pharmacokinetic analysis, and tumor sample was preserved in RNAase free buffer for pharmacogenomic analysis.

[0109] Once certain genes were selected as potential biomarkers, real-time PCR assays using fluorescent MGB Taq-man probes were developed as described above.

[0110] The selected genes were subjected for real-time PCR analysis as described above in order to verify the observed changes from gene chip analysis.

[0111] The biomarker W28729 (SEQ ID NO: 1246) was selected as a preferred marker. A same-well multiplex real-time quantitative PCR assay on this biomarker with normalization control, house-keeping gene GAPDH, was developed using Taq-man MGB probes. Gene expression changes for W28729 were measured with real-time quantitative PCR assays in the following sample sets: A2780 human tumor cell line treated with 20 nM of cdk2 inhibitor for different durations (FIG. 3A), PBMC treated with 10n-M cdk2 inhibitor at 4 hours (FIG. 3B); and human ovarian carcinoma xenograft A2780 treated with cdk2 inhibitor at doses of 36 and 18 mg/kg for different durations (FIG. 3C). In cultured A2780 tumor cells, induction of W28729 occurred upon treatment with 20 nM of cdk2 inhibitor, and was detected 1 h after treatment. Upregulation of W28729 expression was also observed upon treatment of human PBMC in vitro with the cdk2 inhibitor. Treatment of nude mice bearing A2780 xenografts with efficacious doses of the cdk2 inhibitor also resulted in induction of W28729, and there was a dose-dependent prolongation of the duration of gene induction.

### Example 3

### W28729 Upregulation

[0112] The following experimental methods were used to further study W28729 upregulation.

[0113] Patient inclusion criteria: The patient inclusion criteria included: primary solid malignancy refractory to current therapy and adequate bone marrow, hepatic, and renal function.

[0114] Treatments: Two different treatments were undertaken: (i) 174-001 Study: 1 hr infusion of BMS-387032 q 3 wks; and (ii) 174-002 Study: 24 hr infusion of BMS-387032 q 3 wks. The sampling times were pre-dose, and 2, 6, 24 hour post-dose.

[0115] W28729 Expression Analysis: RT-PCR. Patient blood samples were collected in PAXgene™ Blood Collection Tubes (Qiagen, catalog #762155). Total RNA was isolated following the manufacturer's instructions using a PAXgene™ blood RNA Kit (Qiagen, catalog #762134). W28729 and GAPDH (housekeeping gene) RNA abundance was measured by Taqman assays, using an ABI PRISM 7900 HT Sequence Detection System. W28729 abundance was normalized relative to GAPDH. Primer and probe sequences are as shown below.

| | | |
|---|---|---|
| W28729: | | |
| (5+) | AGTACCGTGAGGTTCCTGATGTG | (SEQ ID NO:2780) |
| (3+) | TGGCAAGCTGAGATCCTAAGG | (SEQ ID NO:2781) |
| Probe | TTATGCGGCAGCCTT | (SEQ ID NO:2782) |
| GAPDH: | | |
| (5+) | CGACAGTCAGCCGCATCTT | (SEQ ID NO:2783) |
| (3+) | AAATCCGTTGACTCCGACCTT | (SEQ ID NO:2784) |
| Probe | CATCGCTCAGACACCA | (SEQ ID NO:2785) |

Results

[0116] Preclinical Xenografts: In A2780 xenografts given bolus i.p. treatments with BMS-387032, the induction of W28729 in the tumors occurred in a transient, dose-dependent manner (FIG. 4A). At the minimum efficacious dose (MED) of 18 mg/kg/day, the induction was sustained for more than 6 hours. In an infusion regimen using the minimum efficacious dose of 40 mg/kg, gene induction was sustained for at least 16 hours. The gene induction in tumors was accompanied by a strikingly similar pattern of induction of the mouse ortholog sequence (SEQ ID NO:2786; a fragment of mouse genomic DNA sequence locus AL590994), as detected in PBMC isolated from the tumor mice (FIG. 4B). Treatment with an efficacious regimen results in >2 fold induction of the sequence for 6 hours or longer. These data support the use of W28729 gene induction in tumor as a pharmacodynamic biomarker. In addition, these observations support the use of PBMC as a surrogate tissue for monitoring changes in gene expression, that result from treatment with the cdk2 inhibitor.

[0117] Clinical Trials: In the CA174001 study (1 hour infusion), transient induction of W28729 was detected in PBMC at 2 hours and returned to baseline levels by 6 hours (FIG. 5A). In the CA174-002 study (24 hour infusion), there was modest induction of W28729 expression, which was sustained for 6 hours following end of infusion (FIG. 5B). Each line in FIGS. 5A and 5B represents the extent of gene induction for an individual patient at the specified times after dosing. There was an inverse relationship between baseline expression and the level of maximal gene induction in the CA174-001 study (FIG. 6A). There was no clear relationship between baseline expression and induction magnitude in the CA174-002 study (FIG. 6B). Interpretation of the data from the 24 hour infusion study is difficult because expression data were collected more than 24 hours after the beginning of dosing.

[0118] FIGS. 7A and 7B illustrate W28729 induction as a function of dose (FIG. 7A) and AUC (FIG. 7B) from the CA174-001. As shown in FIGS. 7A and 7B, there was a linear relationship between W28729 gene induction and dose or exposure of the cdk2 inhibitor. FIG. 8 provides a prediction of W28729 changes by baseline expression of W28729 and the cdk inhibitor exposure in the CA174-001 study. W28729 gene expression changes can be predicted by the formula: Δ(W28729 expression)=A*AUC*(Baseline expression)^{B}, wherein A=0.000619 and B=−0.537. Induction of W28729 gene can be reliably predicted from drug exposure and baseline W28729 expression.

[0119] Since the pre-clinical data suggest that the extent and duration of W28729 gene induction correlate with anti-tumor efficacy, the disease outcome of patients who showed different W28729 induction in the CA174-001 study was examined. Interestingly, those patients with high induction appeared to have the most favorable outcome (FIG. 9). These results suggest that W28729 induction is a surrogate marker for prediction of clinical outcome of agents that modulate cdk.

What is claimed is:

1. A method for testing or predicting whether a mammal will respond therapeutically to a method of treating cancer comprising administering an agent that modulates cdk activity, wherein the method comprises:
(a) measuring in the mammal the level of the nucleotide sequence of SEQ ID NO:1246;
(b) exposing the mammal to the agent that modulates cdk activity; and
(c) following the exposing of step (b), measuring in the mammal the level of the nucleotide sequence of SEQ ID NO:1246,
wherein a difference in the level of the nucleotide sequence of SEQ. ID NO:1246 measured in step (c) compared to the level of the nucleotide sequence of SEQ ID NO:1246 measured in step (a) indicates that the mammal will respond therapeutically to said method of treating cancer.

2. The method of claim 1 wherein said agent is N-5-[[5-(1,1-Dimethylethyl)-2-oxazolyl]methyl]thio]-2-thiazolyl-4-piperidinecarboxamide, 0.5-L-tartaric acid salt.

3. A method for determining whether a mammal is responding to an agent that modulates cdk activity, comprising:
(a) obtaining a biological sample from the mammal;
(b) measuring in said biological sample the level of the nucleotide sequence of SEQ ID NO:1246;
(c) correlating said level of the nucleotide sequence of SEQ ID NO:1246 with a baseline level; and
(d) determining whether the mammal is responding to an agent that modulates cdk activity based on said correlation.

4. The method of claim 3 wherein said agent is N-5-[[5-(1,1-Dimethylethyl)-2-oxazolyl]methyl]thio]-2-thiazolyl-4-piperidinecarboxamide, 0.5-L-tartaric acid salt.

5. A method for testing or predicting whether a mammal will respond therapeutically to a method of treating cancer comprising administering an agent that modulates cdk activity, wherein the method comprises:
(a) measuring in the mammal the level of at least one biomarker selected from the biomarkers of Table 1;
(b) exposing the mammal to the agent that modulates cdk activity;
(c) following the exposing of step (b), measuring in the mammal the level of the at least one biomarker,
wherein a difference in the level of the at least one biomarker measured in step (c) compared to the level of the at least one biomarker measured in step (a) indicates that the mammal will respond therapeutically to said method of treating cancer.

6. The method of claim 5 wherein said agent is N-5-[[5-(1,1-Dimethylethyl)-2-oxazolyl]methyl]thio]-2-thiazolyl-4-piperidinecarboxamide, 0.5-L-tartaric acid salt.

7. The method of claim 5 wherein the at least one biomarker is a protein.

8. The method of claim 5 wherein the at least one biomarker is an mRNA transcript.

9. A method for determining whether a mammal is responding to an agent that modulates cdk activity, comprising:
(a) obtaining a biological sample from the mammal;
(b) measuring in said biological sample the level of at least one biomarker selected from the biomarkers of Table 1;
(c) correlating said level of at least one biomarker with a baseline level; and
(d) determining whether the mammal is responding to an agent that modulates cdk activity based on said correlation.

10. A method for determining whether a mammal is responding to an agent that modulates cdk activity, comprising:
(a) exposing the mammal to the agent; and
(b) following the exposing of step (a), measuring in the mammal the level of at least one biomarker selected from the biomarkers of Table 1,
wherein a difference in the level of the at least one biomarker measured in step (b), compared to the level of the at least one biomarker in a mammal that has not been exposed to said agent, indicates that the mammal is responding to the agent that modulates cdk activity.

The application's sequence listing, which the Patent Office published only in electronic form, follows.

SEQUENCE LISTING (2786 sequences)

SEQ ID NO: 1 - DNA, 666 bp, Homo sapiens
gcaggcttggctgcgccctctcgcgccgcacgctctgcgggttcctcccttcttccgagcctctcctctggccgccgcgcgggagagaggccgagatggcagatgagattgccaaggctcaggtcgctcggcctggtggcgacacgatctttgggaagatcatccgcaaggaaataccagccaaaatcatttttgaggatgaccggtgccttgctttccatgacatttcccctcaagcaccaacacattttctggtgatacccaagaaacatatatcccagatttctgtggcagaagatgatgatgaaagtcttcttggacacttaatgattgttggcaagaaatgtgctgctgatctgggcctgaataagggttatcgaatggtggtgaatgaaggttcagatggtggacagtctgtctatcacgttcatctccatgttcttggaggtcggcaaatgcattggcctcctggttaagcacgttttggggataattttctcttctttaggcaatgattaagttaggcaatttccagtatgttaagtaacacacttatttttgcctgtgtatggagagattcaagaaataattttaaaaccgcatacataataaaagacattgttgcatggcttgtaaaaaaaaaaaaaaaaaaaaaaaaaaaaaaaa

SEQ ID NO: 2 - protein, 126 aa, Homo sapiens
MADEIAKAQVARPGGDTIFGKIIRKEIPAKIIFEDDRCLAFHDISPQAPTHFLVIPKKHISQISVAEDDDESLLGHLMIVGKKCAADLGLNKGYRMVVNEGSDGGQSVYHVHLHVLGGRQMHWPPG

SEQ ID NO: 3 - DNA, 4244 bp, Homo sapiens
ggtctcaccatggagcggaaagtgcttgcgctccaggcccgaaagaaaaggaccaaggccaagaaggacaaagcccaaaggaaatctgaaactcagcaccgaggctctgctccccactctgagagtgatctaccagagcaggaagaggagattctgggatctgatgatgatgagcaagaagatcctaatgattattgtaaaggaggttatcatcttgtgaaaattggagatctattcaatgggagataccatgtgatccgaaagttaggctggggacacttttcaacagtatggttatcatgggatattcaggggaagaaatttgtggcaatgaaagtagttaaaagtgctgaacattacactgaaacagcactagatgaaatccggttgctgaagtcagttcgcaattcagaccctaatgatccaaatagagaaatggttgttcaactactagatgactttaaaatatcaggagttaatggaacacatatctgcatggtatttgaagttttggggcatcatctgctcaagtggatcatcaaatccaattatcaggggcttccactgccttgtgtcaaaaaaattattcagcaagtgttacagggtcttgattatttacataccaagtgccgtatcatccacactgacattaaaccagagaacatcttattgtcagtgaatgagcagtacattcggaggctggctgcagaagcaacagaatggcagcgatctggagctcctccgccttccggatctgcagtcagtactgctccccagcctaaaccagctgacaaaatgtcaaagaataagaagaagaaattgaagaagaagcagaagcgccaggcagaattactagagaagcgaatgcaggaaattgaggaaatggagaaagagtcgggccctgggcaaaaaagaccaaacaagcaagaagaatcagagagtcctgttgaaagacccttgaaagagaacccacctaataaaatgacccaagaaaaacttgaagagtcaagtaccattggccaggatcaaacgcttatggaacgtgatacagagggtggtgcagcagaaattaattgcaatggagtgattgaagtcattaattatactcagaacagtaataatgaaacattgagacataaagaggatctacataatgctaatgactgtgatgtccaaaatttgaatcaggaatctagtttcctaagctcccaaaatggagacagcagcacatctcaagaaacagactcttgtacacctataacatctgaggtgtcagacaccatggtgtgccagtcttcctcaactgtaggtcagtcattcagtgaacaacacattagccaacttcaagaaagcattcgggcagagataccctgtgaagatgaacaagagcaagaacataacggaccactggacaacaaaggaaaatccacggctggaaattttcttgttaatccccttgagccaaaaaatgcagaaaagctcaaggtgaagattgctgaccttggaaatgcttgttggcacaaacatttcactgaagatattcaaacaaggcaatatcgttccttggaagttctaatcggatctggctataatacccctgctgacatttggagcacggcatgcatggcctttgaactggccacaggtgactatttgtttgaacctcattcaggggaagagtacactcgagatgaagatcacattgcattgatcatagaacttctggggaaggtgcctcgcaagctcattgtggcaggaaaatattccaaggaatttttcaccaaaaaaggtgacctgaaacatatcacgaagctgaaaccttggggcctttttgaggttctagtggagaagtatgagtggtcgcaggaagaggcagctggcttcacagatttcttactgcccatgttggagctgatccctgagaagagagccactgccgccgagtgtctccggcacccttggcttaactcctaagcccctgcccagcaccacagcagagatcacacactgaccctccgcccttccccttcaagcattttcctcttcccttttcagggtgaagctcttccttcaagagtttctagatcttgttttttttttaatccaacatgttcatttgggtttgcttacttgaccctgtggagatccccacagccattgggcatcctaggtgaatttggccttggttgggctctgccaaagactaatggactaaaatgtgaaacagcctcttgccctgtacctttccttcccattaggacatcctttaaattataagcatcctttttgaaaagagctatgaaggtgtatgagcccatccttttattcattgactctaagagtcaaattttctagtgcatatcctattgccagcataaggatgaggagggggaaagggtcttaattctatgtacagcagagacattaaacttgctgtgtccgggctgcatcatcttcctggactgtttctgttgttctctgtgttcacattttttcctgcaacttttaagctactgtcttttttaaatagctatatgaacaccaaatttgggtaccattttatcactgttcaaagcactgtcaaattcctttcatcctttaatagttaagatctttgaatcttcagtctgatttttaatgtaagcaaaaacagaaccattgaatagtaatttcttgagaacctcaggtgttctataaacagtcctttcctgtatgtcttctattaccctaagaccagagttattttggttggttgttttgttttattttttgtttttgtatccatggctggcactttactcattgcacttgagtttattgccccataactaaaggatcaggatgatggtagaacggagatctgggtttcagagctttcccatttaagaaaaatagatcttgagattctgattcttttccaaacagtcccctgctttcatgtacagctttttctttaccttacccaaaattctggccttgaagcagttttcctctatggctttgcctttctgattttctcagaggctcgagtctttaatataaccccaaatgaaagaaccaaggggaggggtgggatggcacttttttttgttggtcttgttttgttttgttttttggttggttggttcgttattttttaagattagccattctctgctgctatttccctacataatgtcaatttttaaccataattttgacatgattgagatgtacttgaggcttttttgttttaattgagaaaagactttgcaattttttttttaggatgagcctctcctagacttgacctagaatattacatattcctccagtaagtaatactgaagagcaaaagagaggcaggattggggtcacagccgcttcttcagcatggaccaagtgggccttggggattgcagcgttctcgaagtggctgtaggactcgaatttacagaaagccacagaggtgcaacttgaggctctgctagcaagccaccagtgaggctattgggtaaccacctttctatacaggagattggaatctactttgtcatttatccaccacagtgacaaaggaaaagtggtgccgttatgcaatccatttaactcataaacatattactctgagtaactggccagccattcatcggatccttcattgggtactcctgaaatcagacatgttcctgtagaaagaattttaagttaggctttctatgcacctatcaagaatcaagagaatagattgtatcaaacaacggcagggaaatccttcagcaattctaatccactttgggttttcagctgtttttacatctaaagcaatagactagaactgaattatcttctacatagtaaaatcacaattgtggaattacaggaattctggtgatattaaggtgaaataacaaaacacaaaaggccctattttaacagttgatgtgacagtaagttttaatagaacctgtaacttcattttggaaatgcttctccaccaaataagggctttttcccctatttaaggagccagatggattgaaagatgtggaaataggcagctgtagatcttgatcttccaggtaccccatgtacctttattgagcttaattataatactgtcaaattgccacgatctcactaaaggatttctatttgctgtcagttaaaaataaagccctaaatacatttttattctttctactgagggcattgtctgttttctttgtaaatgccgtacaataaacaaattatttaataaccta

SEQ ID NO: 4 - protein, 654 aa, Homo sapiens
MERKVLALQARKKRTKAKKDKAQRKSETQHRGSAPHSESDLPEQEEEILGSDDDEQEDPNDYCKGGYHLVKIGDLFNGRYHVIRKLGWGHFSTVWLSWDIQGKKFVAMKVVKSAEHYTETALDEIRLLKSVRNSDPNDPNREMVVQLLDDFKISGVNGTHICMVFEVLGHHLLKWIIKSNYQGLPLPCVKKIIQQVLQGLDYLHTKCRIIHTDIKPENILLSVNEQYIRRLAAEATEWQRSGAPPPSGSAVSTAPQPKPADKMSKNKKKKLKKKQKRQAELLEKRMQEIEEMEKESGPGQKRPNKQEESESPVERPLKENPPNKMTQEKLEESSTIGQDQTLMERDTEGGAAEINCNGVIEVINYTQNSNNETLRHKEDLHNANDCDVQNLNQESSFLSSQNGDSSTSQETDSCTPITSEVSDTMVCQSSSTVGQSFSEQHISQLQESIRAEIPCEDEQEQEHNGPLDNKGKSTAGNFLVNPLEPKNAEKLKVKIADLGNACWHKHFTEDIQTRQYRSLEVLIGSGYNTPADIWSTACMAFELATGDYLFEPHSGEEYTRDEDHIALIIELLGKVPRKLIVAGKYSKEFFTKKGDLKHITKLKPWGLFEVLVEKYEWSQEEAAGFTDFLLPMLELIPEKRATAAECLRHPWLNS

SEQ ID NO: 5 - DNA, 1752 bp, Homo sapiens
cgggggggcccgaccaccgcggggccgggacgcgatggcggcggcagagcccgcgagctcgggccagcaggcgccggcagggcaggggcagggccagcggccgccgccgcagcctccgcaggcgcaagccccgcagccgcccccgccgccgcagctcgggggcgcggggggcggcagcagcaggcacgagaagagcctggggctgctcactaccaagttcgtgtcgctgctgcaggaggccaaggacggcgttctggatctcaaagcggctgctgatactttggctgtgaggcaaaaaaggagaatttatgatatcaccaatgtcttagagggaattgacttgattgaaaaaaagtcaaaaaacagtatccagtggaaaggtgtaggtgctggctgtaatactaaagaagtcatagatagattaagatatcttaaagctgaaattgaagatctagaactgaaggaaagagaacttgatcagcagaagttgttgctacagcaaagcatcaaaaatgtgatggacgattccattaataatagattttcctatgtaactcatgaagacatctgtaattgctttaatggtgatacacttttggccattcaggcaccttctggtacacaactggaggtacccattccagaaatgggtcagaatggacaaaagaaataccagatcaatctaaagagtcattcaggacctatccatgtgctgcttataaataaagagtcgagttcatctaagcccgtggtttttcctgttcccccacctgatgacctcacacagccttcctcccagtccttgactccagtgactccacagaaatccagcatggcaactcaaaatctgcctgagcaacatgtctctgaaagaagccaggctctgcagcagacatcagctacagatatatcttcagcaggatctattagtggagatatcattgatgagttaatgtcttctgacgtgtttcctctcttaaggctttctcctaccccggcagatgactacaactttaatttagatgataacgaaggagtttgtgatctgtttgatgtccagatactaaattattagattccatggaaacttgggactgttatctacctctaactgtgtaacattttagacttcttaataacctaaatatttaaaataatgaatgtaacaccttttttagttcactgattctgaagtgttcttccctaatactttctttacttcacaaaacttcaaccataaaaacaaagggctctgattgctttaggggataagtgatttaatattcacaaacgtccccactcccaaaagtaactatattctggatttcaacttttcttctaattgtgaatccttccgttttttcttcttaaggaggaaagttaaaggacactacaggtcatcaaaaacaagttggccaaggactcattacttgtcttatatttttactgccactaaactgcctgtatttctgtatgtccttctatccaaacagacgttcactgccacttgtaaagtgaaggatgtaaacgaggatatataactgtttcagtgaacagattttgtgaagtgccttctgttttagcactttaagtttatcacattttgttgacttctgacattccactttcctaggttataggaaagatctgtttatgtagtttgtttttaaaatgtgccaatgcctgtacattaacagatttttaaaaataaaattgtataaaacattaaaaaaaaaaaaaaaaaaaaaaaaa

SEQ ID NO: 6 - protein, 346 aa, Homo sapiens
MAAAEPASSGQQAPAGQGQGQRPPPQPPQAQAPQPPPPPQLGGAGGGSSRHEKSLGLLTTKFVSLLQEAKDGVLDLKAAADTLAVRQKRRIYDITNVLEGIDLIEKKSKNSIQWKGVGAGCNTKEVIDRLRYLKAEIEDLELKERELDQQKLLLQQSIKNVMDDSINNRFSYVTHEDICNCFNGDTLLAIQAPSGTQLEVPIPEMGQNGQKKYQINLKSHSGPIHVLLINKESSSSKPVVFPVPPPDDLTQPSSQSLTPVTPQKSSMATQNLPEQHVSERSQALQQTSATDISSAGSISGDIIDELMSSDVFPLLRLSPTPADDYNFNLDDNEGVCDLFDVQILNY

SEQ ID NO: 7 - DNA, 215 bp, Homo sapiens
tccaggtgacagtgcgggacccatcaggcaggcccctccgcctgccgcctgtccttcctcatcccatctttgacaatcacgatcgtcaccggattgaggagaaacgtaaaaggacatatgagaccttcaagagcatcatgaagaagagtcctttcagcggacccaccgacccccggcctccacctcgacgcattgctgtgccttcccgcagctca

SEQ ID NO: 8 - protein, 71 aa, Homo sapiens
QVTVRDPSGRPLRLPPVLPHPIFDNHDRHRIEEKRKRTYETFKSIMKKSPFSGPTDPRPPPRRIAVPSRSS

SEQ ID NO: 9 - DNA, 1295 bp, Homo sapiens
cacgtcagccggggctagaaaaggcggcggggctgggcccagcgaggtgacagcctcgcttggacgcagagcccggcccgacgccgccatgagcgccgcgctcttcagcctggacggcccggcgcgcggcgcgccctggcctgcggagcctgcgcccttctacgaaccgggccgggcgggcaagccgggccgcggggccgagccaggggccctaggcgagccaggcgccgccgcccccgccatgtacgacgacgagagcgccatcgacttcagcgcctacatcgactccatggccgccgtgcccaccctggagctgtgccacgacgagctcttcgccgacctcttcaacagcaatcacaaggcgggcggcgcggggcccctggagcttcttcccggcggccccgcgcgccccttgggcccgggccctgccgctccccgcctgctcaagcgcgagcccgactggggcgacggcgacgcgcccggctcgctgttgcccgcgcaggtggccgcgtgcgcacagaccgtggtgagcttggcggccgcagggcagcccaccccgcccacgtcgccggagccgccgcgcagcagccccaggcagacccccgcgcccggccccgcccgggagaagagcgccggcaagaggggcccggaccgcggcagccccgagtaccggcagcggcgcgagcgcaacaacatcgccgtgcgcaagagccgcgacaaggccaagcggcgcaaccaggagatgcagcagaagttggtggagctgtcggctgagaacgagaagctgcaccagcgcgtggagcagctcacgcgggacctggccggcctccggcagttcttcaagcagctgcccagcccgcccttcctgccggccgccgggacagcagactgccggtaacgcgcggccggggcgggagagactcagcaacgacccatacctcagacccgacggcccggagcggagcgcgccctgccctggcgcagccagagccgccgggtgcccgctgcagtttcttgggacataggagcgcaaagaagctacagcctggacttaccaccactaaactgcgagagaagctaaacgtgtttattttcccttaaattatttttgtaatggtagctttttctacatcttactcctgttgatgcagctaaggtacatttgtaaaaagaaaaaaaaccagacttttcagacaaaccctttgtattgtagataagaggaaaagactgagcatgctcacttttttatattaatttttacagtatttgtaagaataaagcagcatttgaaatcg

SEQ ID NO: 10 - protein, 269 aa, Homo sapiens [sequence omitted]

SEQ ID NO: 11 - DNA, 1427 bp, Homo sapiens
accggcgtattcccgccctgcttttcgcccgccgttccgtggcgggaactgaggcgactgtggggacatcagtgatcgtaagtctcctgggcccgttattctcagattaggtgacggagctaagacttcgagaccatctcgtcctttttgtatcgcggaaacctgaggaacgagccggcggcggtgacctgcacgagaagccaggctaactgggtgaagtaccatgcaagcatttcttaaaggtacatccatcagtactaaacccccgctgaccaaggatcgaggagtagctgccagtgcgggaagtagcggagagaacaagaaagccaaacccgttccctgggtggaaaaatatcgcccaaaatgtgtggatgaagttgctttccaggaagaagtggttgcagtgctgaaaaaatctttagaaggagcagatcttcctaatctcttgttttacggaccacctggaactggaaaaacatccactattttggcagcagctagagaactctttgggcctgaacttttccgattaagagttcttgagttaaatgcatctgatgaacgtggaatacaagtagttcgagagaaagtgaaaaattttgctcaattaactgtgtcaggaagtcgctcagatgggaagccgtgtccgccttttaagattgtgattctggatgaagcagattctatgacctcagctgctcaggcagctttaagacgtaccatggagaaggagtcgaaaaccacccgattctgtcttatctgtaactatgtcagtcgaataattgaacccctgacctctagatgttcaaaattccgcttcaagcctctgtcagataaaattcaacagcagcgattactagacattgccaagaaggaaaatgtcaaaattagtgatgagggaatagcttatcttgttaaagtgtcagaaggagacttaagaaaagccattacatttcttcaaagcgctactcgattaacaggtggaaaggagatcacagagaaagtgattacagacattgccggggtaataccagctgagaaaattgatggagtatttgctgcctgtcagagtggctcttttgacaaactagaagctgtggtcaaggatttaatagatgagggtcatgcagcaactcagctcgtcaatcaactccatgatgtggttgtagaaaataacttatctgataaacagaagtctattatcacagaaaaacttgccgaagttgacaaatgcctagcagatggtgctgatgaacatttgcaactcatcagcctttgtgcaactgtgatgcagcagttatctcagaattgttaacgtgaatatatctggatggggggttttgtaaataatgaagttgtaataaaaataaaatgaccaaaagcacctttaaaaaaaaaaaaaaaaaaaaaaaaaaaaaaaaaaaaaa

SEQ ID NO: 12 - protein, 363 aa, Homo sapiens
MQAFLKGTSISTKPPLTKDRGVAASAGSSGENKKAKPVPWVEKYRPKCVDEVAFQEEVVAVLKKSLEGADLPNLLFYGPPGTGKTSTILAAARELFGPELFRLRVLELNASDERGIQVVREKVKNFAQLTVSGSRSDGKPCPPFKIVILDEADSMTSAAQAALRRTMEKESKTTRFCLICNYVSRIIEPLTSRCSKFRFKPLSDKIQQQRLLDIAKKENVKISDEGIAYLVKVSEGDLRKAITFLQSATRLTGGKEITEKVITDIAGVIPAEKIDGVFAACQSGSFDKLEAVVKDLIDEGHAATQLVNQLHDVVVENNLSDKQKSIITEKLAEVDKCLADGADEHLQLISLCATVMQQLSQNC

SEQ ID NO: 13 - DNA, 2729 bp, Homo sapiens
tcgagatccattgtgctctaaagggagtcggcagctggcgccagggcggccggaggatgccgaggggccggagccgggcgggcccgagcgcgaggcgcactctacccccagctcctaccctgtaagccccgccagcctccggacgtgctgtccctgggcccgtcgccctcggggctcccgccggaactccttcactctcagaggccgagtccctcccctccccacggctgcgtgtggccgttgccgtctgcacccagaccctgagccgcccgcgccggccatggaggtggcgccggagcagcccggctggatggcgcacccggccgtgctgaatgcgcacgaccccgactcacaccacccgggcctggcgcacaactacatggaacccgcgcacgtgctgcctccagacgaggtggacgtcttcttcaatcacctcgactcgcagggcaacccctactatgccaaccccgctcacgcgcgggcggccgtctcctacagccccgcgcacgcccgcctgaccgggagccagatgtgccgcccacacttgttgcacagcccgggtttgccctggctggacgggggcaaagcagccctctctgccgctgcggcccaccaccacaacccctggaccgtgagccccttctccaagacgccactgcacccctcagctgctggaggccctggaggcccactctctgtgtacccaggggctgggggtgggagcgggggaggcagcgggagctcagtggcctccctcacccctacagcagcccactctggctcccaccttttcggcttcccacccacgccacccaaagaagtgtctcctgaccctagcaccacgggggctgcgtctccagcctcatcttccgcggggggtagtgcagcccgaggagaggacaaggacggcgtcaagtaccaggtgtcactgacggagagcatgaagatggaaagtggcagtcccctgcgcccaggcctagctactatgggcacccagcctgctacacaccaccccatccccacctacccctcctatgtgccggcggctgcccacgactacagcagcggactcttccaccccggaggcttcctggggggaccggcctccagcttcacccctaagcagcgcagcaaggctcgttcctgttcagaaggccgggagtgtgtcaactgtggggccacagccacccctctctggcggcgggacggcaccggccactacctgtgcaatgcctgtggcctctaccacaagatgaatgggcagaaccgaccactcatcaagcccaagcgaagactgtcggccgccagaagagccggcacctgttgtgcaaattgtcagacgacaaccaccaccttatggcgccgaaacgccaacggggaccctgtctgcaacgcctgtggcctctactacaagctgcacaatgttaacaggccactgaccatgaagaaggaagggatccagactcggaaccggaagatgtccaacaagtccaagaagagcaagaaaggggcggagtgcttcgaggagctgtcaaagtgcatgcaggagaagtcatcccccttcagtgcagctgccctggctggacacatggctcctgtgggccacctcccgcccttcagccactccggacacatcctgcccactccgacgcccatccacccctcctccagcctctccttcggccacccccacccgtccagcatggtgaccgccatgggctagggaacagatggacgtcgaggaccgggcactcccggatgggtggaccaaacccttagcagcccagcatttcccgaagccgacaccactcctgcctgcccggctcggcccagcaccccctctcctggagggcgcccagcagcctgccagcagttactgtgaatgttccccaccgctgagaggctgcctccgcacctgaccgctgcccaggtggggtttcctgcatggacagttgtttggagaacaacaaggacaactttatgtagagaaaaggaggggacgggacagacgaaggcaaccatttttagaaggaaaaaggattaggcaaaaataatttattttgctcttgtttctaacaaggacttggagacttggtggtctgagctgtcccaagtcctccggttcttcctcgggattggcgggtccacttgccagggctctgggggcagatttgtggggacctcagcctgcaccctcttctcctctggcttccctctctgaaatagccgaactccaggctgggctgagccaaagccagagtggccacggccagggagggtgagctggtgcctgctttgacgggccaggcctggagggagagacaatcacgggcggtcctgcacagattcccaggccagggctgggtcacaggaaggaaacaacattttcttgaaaggggaaacgtctcccagatcgctcccttggctttgaggccgaagctgctgtgactgtgtccccttactgagcgcaagcacagcctgtcttgtcaggtggaccctgtaaatacatccttttttctgctaacccttcaaccccctcgcctcctactctgagacaaaagaaaaaatattaaaaaaatgcataggcttaactcgctgatgagttaattgttttatttttaaactcttttggggtccagttgattgtacgtagccacaggagccctgctatgaaaggaataaaacctaaggttgggagctttgcaattctttttgggaaaaggggcctt

SEQ ID NO: 14 - protein, 480 aa, Homo sapiens
MEVAPEQPGWMAHPAVLNAHDPDSHHPGLAHNYMEPAHVLPPDEVDVFFNHLDSQGNPYYANPAHARAAVSYSPAHARLTGSQMCRPHLLHSPGLPWLDGGKAALSAAAAHHHNPWTVSPFSKTPLHPSAAGGPGGPLSVYPGAGGGSGGGSGSSVASLTPTAAHSGSHLFGFPPTPPKEVSPDPSTTGAASPASSSAGGSAARGEDKDGVKYQVSLTESMKMESGSPLRPGLATMGTQPATHHPIPTYPSYVPAAAHDYSSGLFHPGGFLGGPASSFTPKQRSKARSCSEGRECVNCGATATPLWRRDGTGHYLCNACGLYHKMNGQNRPLIKPKRRLSAARRAGTCCANCQTTTTTLWRRNANGDPVCNACGLYYKLHNVNRPLTMKKEGIQTRNRKMSNKSKKSKKGAECFEELSKCMQEKSSPFSAAALAGHMAPVGHLPPFSHSGHILPTPTPIHPSSSLSFGHPHPSSMVTAMG

SEQ ID NO: 15 - DNA, 3383 bp, Homo sapiens
gagcgccaggaaggtagcgaggccagcgtcgccccgggactcgctgctcaagtctgtctattgcctgccgccacatccatcctagcagggccccgtcgcccaccaggcggacaaaagcggtccgctgaacaccatgcggccgctcggcgtgccgcccaggctctgctggtgagcgccgccaccccgcgcccaggtcccgcgagcccgcctgccgcgcacctcgccctgctcccagctctactccaggccccgtccgcccgggggcgccgcccaccgcgcctcgctcgggccgttgccgtctgcacccagaccctgagccgccgccgccggccatggaggtggcgccggagcagccgcgctggatggcgcacccggccgtgctgaatgcgcagcaccccgactcacaccacccgggcctggcgcacaactacatggaacccgcgcagctgctgcctccagacgaggtggacgtcttcttcaatcacctcgactcgcagggcaacccctactatgccaaccccgctcacgcgcgggcgcgcgtctcctacagccccgcgcacgcccgcctgaccggaggccagatgtgccgcccacacttgttgcacagcccgggtttgccctggctggacgggggcaaagcagccctctctgccgctgcggcccaccaccacaacccctggaccgtgagccccttctccaagacgccactgcacccctcagctgctggaggccctggaggcccactctctgtgtacccaggggctgggggtgggagcgggggaggcagcgggagctcagtggcctccctcacccctacagcagcccactctggctcccaccttttcggcttcccacccacgccacccaaagaagtgtctcctgaccctagcaccacgggggctgcgtctccagcctcatcttccgcggggggtagtgcagcccgaggagaggacaaggacggcgtcaagtaccaggtgtcactgacggagagcatgaagatggaaagtggcagtcccctgcgcccaggcctagctactatgggcacccagcctgctacacaccaccccatccccacctacccctcctatgtgccggcggctgcccacgactacagcagcggactcttccaccccggaggcttcctggggggaccggcctccagcttcacccctaagcagcgcagcaaggctcgttcctgttcagaaggccgggagtgtgtcaactgtggggccacagccacccctctctggcggcgggacggcaccggccactacctgtgcaatgcctgtggcctctaccacaagatgaatgggcagaaccgaccactcatcaagcccaagcgaagactgtcggccgccagaagagccggcacctgttgtgcaaattgtcagacgacaaccaccaccttatggcgccgaaacgccaacggggaccctgtctgcaacgcctgtggcctctactacaagctgcacaatgttaacaggccactgaccatgaagaaggaagggatccagactcggaaccggaagatgtccaacaagtccaagaagagcaagaaaggggcggagtgcttcgaggagctgtcaaagtgcatgcaggagaagtcatcccccttcagtgcagctgccctggctggacacatggcacctgtgggccacctcccgcccttcagccactccggacacatcctgcccactccgacgcccatccacccctcctccagcctctccttcggccacccccacccgtccagcatggtgaccgccatgggctagggaacagatggacgtcgaggaccgggcactcccgggatgggtggaccaaacccttagcagcccagcatttcccgaaggccgacaccactcctgccagcccggctcggcccagcaccccctctcctggagggcgcccagcagcctgccagcagttactgtgaatgttccccaccgctgagaggctgcctccgcacctgactgctgcccaggtggggtttcctgcatggacagttgtttggagaacaacaaggacaactttatgtagagaaaaggaggggacgggacagacgaaggcaaccatttttagaaggaaaaaggattaggcaaaaataatttattttgctcttgtttctaacaaggacttggagacttggtggtctgagctgtcccaagtcctccggttcttcctcgggattggcgggtccacttgccagggctctgggggcagatttgtggggacctcagcctgcaccctcttctcttctggcttccctctctgaaatagccgaactccaggctgggctgagccaaagccagagtggccacggcccagggagggtgagctggtgcctgctttgacgggccaggccctggagggcagagacaatcacgggcggtcctgcacagattcccaggccagggctgggtcacaggaaggaaacaacattttcttgaaaggggaaacgtctcccagatcgctcccttggctttgaggccgaagctgctgtgactgtgtccccttactgagcgcaagccacagcctgtcttgtcaggtggaccctgtaaatacatcctttttctgctaacccttcaaccccctcgcctcctactctgagacaaaagaaaaaatattaaaaaaatgcataggcttaactcgctgatgagttaattgttttatttttaaactctttttgggtccagttgattgtacgtagccacaggagccctgctatgaaaggaataaaacctacacacaaggttggagctttgcaattctttttggaaaagagctgggatcccacagccctagtatgaaagctgggggtggggaggggcctttgctgcccttggtttctgggggctggttggcatttgctggcctggcagggggtgaaggcaggagttgggggcaggtcaggaccaggacccagggagaggctgtgtccctgctggggtctcaggtccagctttactgtggctgtctggatccttcccaaggtacagctgtatataaacgtgtcccgagcttagattctgtatgcggtgacggcggggtgtggtggcctgtgaggggcccctggcccaggaggaggattgtgctgatgtagtgaccaagtgcaatatgggcgggcagtcgctgcagggagcaccacggccagaagtaacttattttgtactagtgtccgcataagaaaaagaatcggcagtattttctgtttttatgttttatttggcttgttttattttggattagtgaactaagttattgttaattatgtacaacatttatatattgtctgtaaaaaatgtatgctatcctcttattcctttaaagtgagtactgttaagaataataaaatactttttgtgaaaaaaaaaaaaaaaaaa

SEQ ID NO: 16 - protein, 480 aa, Homo sapiens
MEVAPEQPRWMAHPAVLNAQHPDSHHPGLAHNYMEPAQLLPPDEVDVFFNHLDSQGNPYYANPAHARARVSYSPAHARLTGGQMCRPHLLHSPGLPWLDGGKAALSAAAAHHHNPWTVSPFSKTPLHPSAAGGPGGPLSVYPGAGGGSGGGSGSSVASLTPTATHSGSHLFGFPPTPPKEVSPDPSTTGAASPASSSAGGSAARGEDKDGVKYQVSLTESMKMESGSPLRPGLATMGTQPATHHPIPTYPSYVPAAAHDYSSGLFHPGGFLGGPASSFTPKQRSKARSCSEGRECVNCGATATPLWRRDGTGHYLCNACGLYHKMNGQNRPLIKPKRRLSAARRAGTCCANCQTTTTTLWRRNANGDPVCNACGLYYKLHNVNRPLTMKKEGIQTRNRKMSNKSKKSKKGAECFEELSKCMQEKSSPFSAAALAGHMAPVGHLPPFSHSGHILPTPTPIHPSSSLSFGHPHPSSMVTAMG

SEQ ID NO: 17 - DNA, 1555 bp, Homo sapiens
gctgccgccgccgcgcccgggcgcacccgcccgctcgctgtcccgcgcaccccgtagcgcctcgggctcccgggccggacagaggagccagcccggtgcgcccctccacctcctgctcggggggctttaatgagacacccaccgctgctgtggggccggcggggagcagcaccgcgacggggaccggggctgggcgctggagccagaatcggaaccacgatgtgactccgccgccggggacccgtgaggtttgtgtggaccccgagttccaccaggtgagaagagtgatgaccatccttttccttactatggttatttcatactttggttgcatgaaggctgcccccatgaaagaagcaaacatccgaggacaaggtggcttggcctacccaggtgtgcggacccatgggactctggagagcgtgaatgggcccaaggcaggttcaagaggcttgacatcattggctgacactttcgaacacgtgatagaagagctgttggatgaggaccagaaagttcggcccaatgaagaaaacaataaggacgcagacttgtacacgtccagggtgatgctcagtagtcaagtgcctttggagcctcctcttctctttctgctggaggaatacaaaaattacctagatgctgcaaacatgtccatgagggtccggcgccactctgaccctgcccgccgaggggagctgagcgtgtgtgacagtattagtgagtgggtaacggcggcagacaaaaagactgcagtggacatgtcgggcgggacggtcacagtccttgaaaaggtccctgtatcaaaaggccaactgaagcaatacttctacgagaccaagtgcaatcccatgggttacacaaaagaaggctgcaggggcatagacaaaaggcattggaactcccagtgccgaactacccagtcgtacgtgcgggcccttaccatggatagcaaaaagagaattggctggcgattcataaggatagacacttcttgtgtatgtacattgaccattaaaaggggaagatagtggatttatgttgtatagattagattatattgagacaaaaattatctatttgtatatatacataacagggtaaattattcagttaagaaaaaaataattttatgaactgcatgtataaatgaagtttatacagtacagtggttctacaatctatttattggacatgtccatgaccagaagggaaacagtcatttgcgcacaacttaaaaagtctgcattacattccttgataatgttgtggtttgttgccgttgccaagaactgaaaacataaaaagttaaaaaaaataataaattgcatgctgctttaattgtgaattgataataaactgtcctctttcagaaaacagaaaaaaaacacacacacacacaacaaaaatttgaaccaaaacattccgtttacattttagacagtaagtatcttcgttcttgttagtactatatctgttttactgcttttaacttctgatagcgttggaattaaaacaatgtcaaggtgaaaaaaaaaaaaaaaaaaaaaaaaaa

SEQ ID NO: 18 - protein, 247 aa, Homo sapiens
MTILFLTMVISYFGCMKAAPMKEANIRGQGGLAYPGVRTHGTLESVNGPKAGSRGLTSLADTFEHVIEELLDEDQKVRPNEENNKDADLYTSRVMLSSQVPLEPPLLFLLEEYKNYLDAANMSMRVRRHSDPARRGELSVCDSISEWVTAADKKTAVDMSGGTVTVLEKVPVSKGQLKQYFYETKCNPMGYTKEGCRGIDKRHWNSQCRTTQSYVRALTMDSKKRIGWRFIRIDTSCVCTLTIKRGR

SEQ ID NO: 19 - DNA, 1606 bp, Homo sapiens
tcattcattagaatcacgtaagaactcaaaaggaaacgtgtctctcggagtgagggcgtttgcgtaaatctataggtttttcgacatcgatgccagttgctttgtcttctgtagtcgccaaggtggttgagagtttaagcttgcggatattgcaaagggttattagattcataagtcacaccaagtggtgggcgatccactgagcaaagccgaacttctcacatgatgacttcaaacaagacacattaccttccagcatctgttggggagacgagattttaagacacttgagtctccaggacagcaaaggcacaatgttccaccaggtgagaagagtgatgaccatccttttccttactatggttatttcatactttggttgcatgaaggctgcccccatgaaagaagcaaacatccgaggacaaggtggcttggcctacccaggtgtgcggacccatgggactctggagagcgtgaatgggcccaaggcaggttcaagaggcttgacatcattggctgacactttcgaacacgtgatagaagagctgttggatgaggaccagaaagttcggcccaatgaagaaaacaataaggacgcagacttgtacacgtccagggtgatgctcagtagtcaagtgcctttggagcctcctcttctctttctgctggaggaatacaaaaattacctagatgctgcaaacatgtccatgagggtccggcgccactctgaccctgcccgccgaggggagctgagcgtgtgtgacagtattagtgagtgggtaacggcggcagacaaaaagactgcagtggacatgtcgggcgggacggtcacagtccttgaaaaggtccctgtatcaaaaggccaactgaagcaatacttctacgagaccaagtgcaatcccatgggttacacaaaagaaggctgcaggggcatagacaaaaggcattggaactcccagtgccgaactacccagtcgtacgtgcgggcccttaccatggatagcaaaaagagaattggctggcgattcataaggatagacacttcttgtgtatgtacattgaccattaaaaggggaagatagtggatttatgttgtatagattagattatattgagacaaaaattatctatttgtatatatacataacagggtaaattattcagttaagaaaaaaataattttatgaactgcatgtataaatgaagtttatacagtacagtggttctacaatctatttattggacatgtccatgaccagaagggaaacagtcatttgcgcacaacttaaaaagtctgcattacattccttgataatgttgtggtttgttgccgttgccaagaactgaaaacataaaaagttaaaaaaaataataaattgcatgctgctttaattgtgaattgataataaactgtcctctttcagaaaacagaaaaaaaacacacacacacacaacaaaaatttgaaccaaaacattccgtttacattttagacagtaagtatcttcgttcttgttagtactatatctgttttactgcttttaacttctgatagcgttggaattaaaacaatgtcaaggtgaaaaaaaaaaaaaaaaaaaaaaaaaa

SEQ ID NO: 20 - protein, 255 aa, Homo sapiens
MFHQVRRVMTILFLTMVISYFGCMKAAPMKEANIRGQGGLAYPGVRTHGTLESVNGPKAGSRGLTSLADTFEHVIEELLDEDQKVRPNEENNKDADLYTSRVMLSSQVPLEPPLLFLLEEYKNYLDAANMSMRVRRHSDPARRGELSVCDSISEWVTAADKKTAVDMSGGTVTVLEKVPVSKGQLKQYFYETKCNPMGYTKEGCRGIDKRHWNSQCRTTQSYVRALTMDSKKRIGWRFIRIDTSCVCTLTIKRGR

SEQ ID NO: 21 - DNA, 1622 bp, Homo sapiens
gccaacggatttgtccgaggtggcggtacccccaggtagtcttcttggccccgctgtaaagccaaccctgtgtcgcccttaaaaagcgtcttttctgaggttcggctcacactgagatcggggctggagagagagtcagattttggagcggagcgtttggaaagcgagccccagtttggtcccctcattgagctcgctgaagttggcttcctagcggtgtaggctggaatagactcttggcaagctccgggttggtatactgggttaactttgggaaatgcaagtgtttatctccaggatctagccaccggggtggtgtaagccgcaaagaagttccaccaggtgagaagagtgatgaccatccttttccttactatggttatttcatactttggttgcatgaaggctgcccccatgaaagaagcaaacatccgaggacaaggtggcttggcctacccaggtgtgcggacccatgggactctggagagcgtgaatgggcccaaggcaggttcaagaggcttgacatcattggctgacactttcgaacacgtgatagaagagctgttggatgaggaccagaaagttcggcccaatgaagaaaacaataaggacgcagacttgtacacgtccagggtgatgctcagtagtcaagtgcctttggagcctcctcttctctttctgctggaggaatacaaaaattacctagatgctgcaaacatgtccatgagggtccggcgccactctgaccctgcccgccgaggggagctgagcgtgtgtgacagtattagtgagtgggtaacggcggcagacaaaaagactgcagtggacatgtcgggcgggacggtcacagtccttgaaaaggtccctgtatcaaaaggccaactgaagcaatacttctacgagaccaagtgcaatcccatgggttacacaaaagaaggctgcaggggcatagacaaaaggcattggaactcccagtgccgaactacccagtcgtacgtgcgggcccttaccatggatagcaaaaagagaattggctggcgattcataaggatagacacttcttgtgtatgtacattgaccattaaaaggggaagatagtggatttatgttgtatagattagattatattgagacaaaaattatctatttgtatatatacataacagggtaaattattcagttaagaaaaaaataattttatgaactgcatgtataaatgaagtttatacagtacagtggttctacaatctatttattggacatgtccatgaccagaagggaaacagtcatttgcgcacaacttaaaaagtctgcattacattccttgataatgttgtggtttgttgccgttgccaagaactgaaaacataaaaagttaaaaaaaataataaattgcatgctgctttaattgtgaattgataataaactgtcctctttcagaaaacagaaaaaaaacacacacacacacaacaaaaatttgaaccaaaacattccgtttacattttagacagtaagtatcttcgttcttgttagtactatatctgttttactgcttttaacttctgatagcgttggaattaaaacaatgtcaaggtgaaaaaaaaaaaaaaaaaaaaaaaaaa

SEQ ID NO: 22 - DNA, 1599 bp, Homo sapiens
ggctgctctcgctgccgctccccccggcgaactagcatgaaatctccctgcctctgccgagatcaaatggagcttctcgctgatggggtgcgagtattacctccgccatgcaatttccactatcaataatttaacttctttgctgcagaacagaaggagtacataccgggcaccaaagactcgcgccccctcccccctttaattaagcgaagggaacgtgaaaaaataatagagtgtgggagttttggggccgaagtctttcccggagcagctgccttgatggttactttgacaagtagtgactgaaaagttccaccaggtgagaagagtgatgaccatccttttccttactatggttatttcatactttggttgcatgaaggctgcccccatgaaagaagcaaacatccgaggacaaggtggcttggcctacccaggtgtgcggacccatgggactctggagagcgtgaatgggcccaaggcaggttcaagaggcttgacatcattggctgacactttcgaacacgtgatagaagagctgttggatgaggaccagaaagttcggcccaatgaagaaaacaataaggacgcagacttgtacacgtccagggtgatgctcagtagtcaagtgcctttggagcctcctcttctctttctgctggaggaatacaaaaattacctagatgctgcaaacatgtccatgagggtccggcgccactctgaccctgcccgccgaggggagctgagcgtgtgtgacagtattagtgagtgggtaacggcggcagacaaaaagactgcagtggacatgtcgggcgggacggtcacagtccttgaaaaggtccctgtatcaaaaggccaactgaagcaatacttctacgagaccaagtgcaatcccatgggttacacaaaagaaggctgcaggggcatagacaaaaggcattggaactcccagtgccgaactacccagtcgtacgtgcgggcccttaccatggatagcaaaaagagaattggctggcgattcataaggatagacacttcttgtgtatgtacattgaccattaaaaggggaagatagtggatttatgttgtatagattagattatattgagacaaaaattatctatttgtatatatacataacagggtaaattattcagttaagaaaaaaataattttatgaactgcatgtataaatgaagtttatacagtacagtggttctacaatctatttattggacatgtccatgaccagaagggaaacagtcatttgcgcacaacttaaaaagtctgcattacattccttgataatgttgtggtttgttgccgttgccaagaactgaaaacataaaaagttaaaaaaaataataaattgcatgctgctttaattgtgaattgataataaactgtcctctttcagaaaacagaaaaaaaacacacacacacacaacaaaaatttgaaccaaaacattccgtttacattttagacagtaagtatcttcgttcttgttagtactatatctgttttactgcttttaacttctgatagcgttggaattaaaacaatgtcaaggtgaaaaaaaaaaaaaaaaaaaaaaaaaa

SEQ ID NO: 23 - DNA, 3690 bp, Homo sapiens
agcgggcttccggaagcgggcgactcgcagctccacgcgacgccgaggggctccgcgccgggaccgggcgggtgctcggagtttcggggaccgcacgggaccgagggcaggaggagacatcacagctttcccagatcgggaggaaaaatatggaatgtgttttaccgctgactgaacacaaccaaatgaactgtcctgacagtagtttgcaaaccagcagctagcagtttgtccagcctctaacattgtccagcactttccagagcaaactcactgtttacaagaactcttggccttacgaagtttataacctcaagctttgtttatttaaaatattcctgcaaaagaaaagtacccggcacccactttccaaaatggccatggatgagtatttgtggatggtcattttgggtttcatcatagctttcatcttggccttttctgttggtgcaaacgatgttgccaactcctttggtacagccgtgggctctggtgtggtgaccttgaggcaggcatgcattttagcttcaatatttgaaaccaccggctccgtgttactaggcgccaaagtaggagaaaccattcgcaaaggtatcattgacgtgaacctgtacaacgagacggtggagactctcatggctggggaagttagtgccatggttggttccgctgtgtggcagctgattgcttccttcctgaggcttccaatctcaggaacgcactgcattgtgggttctactataggattctcactggtcgcaatcggtaccaaaggtgtgcagtggatggagcttgtcaagattgttgcttcttggtttatatctccactgttgtctggtttcatgtctggcctgctgtttgtactcatcagaattttcatcttaaaaaaggaagaccctgttcccaatggcctccgggcactcccagtattctatgctgctaccatagcaatcaatgtcttttccatcatgtacacaggagcaccagtgctcggccttgttctccccatgtgggccatagccctcatttcctttggtgtcgccctcctgttcgctttttttgtgtggctcttcgtgtgtccgtggatgcggaggaaaataacaggcaaattacaaaaagaaggtgctttatcacgagtatctgacgaaagcctcagtaaggttcaggaagcagagtccccagtatttaaagagctaccaggtgccaaggctaatgatgacagcaccatcccgctcacgggagcagcaggggagacactggggacctcggaaggcacttctgcgggcagccaccctcgggctgcatacggaagagcactgtccatgacccatggctctgtgaaatcgcccatctccaacggcaccttcggcttcgacggccacaccaggagcgacggtcatgtgtaccacaccgtgcacaaagactcggggctctacaaagatctgctgcacaaaatccacatcgacaggggccccgaggagaagccagcccaggaaagcaactaccggctgctgcgccgaaacaacagttacacctgctacaccgcagccatttgtgggctgccagtgcacgccacctttcgagctgcggactcatcggccccagaggacagtgagaagctggtgggcgacaccgtgtcctactccaagaagaggctgcgctacgacagctactcgagctactgtaacgcggtggcagaggcggagatcgaggcggaggagggcggcgtggagatgaagctggcgtcggagctggccgaccctgaccagccgcgagaggaccctgcagaggaggagaaggaggagaaggacgcacccgaggttcacctcctgttccatttcctgcaggtcctcaccgcctgtttcgggtcctttgctcacggcggcaatgacgtgagtaatgccatcggtcccctggtagccttgtggctgatttacaaacaaggcggggtaacgcaagaagcagctacacccgtctggctgctgttttatggaggagttggaatctgcacaggcctctgggtctgggggagaagagtgatccagaccatggggaaggacctcactcccatcacgccgtccagcggcttcacgatcgagctggcctcagccttcacagtggtgatcgcctccaacatcgggcttccagtcagcaccacgcactgtaaggtgggctcggtggtggccgtgggctggatccgctcccgcaaggctgtggactggcgcctctttcggaacatcttcgtggcctggttcgtgaccgtccctgtggctgggctgttcagcgctgctgtcatggctcttctcatgtatgggatccttccatatgtgtgatttgtcttcttccagctgcaaacagctaaagggatggtctggtgttggcgtgtgggagacatgtgtgctcgtgccacacatacacatcctggccgtgcacggctctctcatgaccagctctctgcctcccttccaggaggctccatcccacactgttcacccaggctgcggagactcaccttcccgagctaacttaactactgtacataataatatgtattaaactggtatcgtggtgatataatgtggtgcagttacttatatattaaatatctattgtatccatagaataggcagcattatttcaaacatattcaagttgggagtggagatcattgcctagaagtcaatattcaataaatcttgtacataactatttcgatggcaaatgttaagccttctaaaaggaaagtgtagattggaaaatgattttttttccaaatgatgtttttgccttctaatatactgtaaggtaatgagcttcagaacaggcaacctgaccctgcagaggtcgcgtgctgtgggatgacagcgggacgggagctcacaagtgctttcactgaagatttgttcatatactgtgtattgattgttgtgtaatatatcatcattgcttttgtaaatacgtaaaactgtaattttttaatggtgtgcttcccttatacttttttgatcagagaattttggaaagtaccaaagaagcaggggaatcattggccagtgttacgttttcacattgtctgtctcccaccctcactgatcacgcctgccccagagcagtgtgtggcggtgacaccgtcacccagcatgcgccacgccgtggctcccaccagcagtgccaccgccaccacaccccagatcccacccaccttgcagtggcctttccttgtcatcagagtagagaatgcacaggtgttggtgagggcgtgtggctgagcactacatgtcaagtccagagtcagtttctatcccaattctccctgcagcctgaagaacggatccttgtctccaatgtcagcacaaaggaggctttttctgtgctttgacattctagcacttcagggatgagagggagggagaatcctggatgctggatggagtatttctctgaggcccacacaaagctggacacccccaggctctactccatcccattggagtctcttctttttttgatagcgggagggaggaagtacgactaatgttggagcctgaaactatggaaatgctgctaaaatttttatattgacaaacattttcttggtacttcattgtcatttttcattaatcaaccatattaaatttataataaaaaatgcccctcagaaaaaaaaaaaaaaagaaaaaaaaaaaaaaa

SEQ ID NO: 24 - protein, 652 aa, Homo sapiens
MAMDEYLWMVILGFIIAFILAFSVGANDVANSFGTAVGSGVVTLRQACILASIFETTGSVLLGAKVGETIRKGIIDVNLYNETVETLMAGEVSAMVGSAVWQLIASFLRLPISGTHCIVGSTIGFSLVAIGTKGVQWMELVKIVASWFISPLLSGFMSGLLFVLIRIFILKKEDPVPNGLRALPVFYAATIAINVFSIMYTGAPVLGLVLPMWAIALISFGVALLFAFFVWLFVCPWMRRKITGKLQKEGALSRVSDESLSKVQEAESPVFKELPGAKANDDSTIPLTGAAGETLGTSEGTSAGSHPRAAYGRALSMTHGSVKSPISNGTFGFDGHTRSDGHVYHTVHKDSGLYKDLLHKIHIDRGPEEKPAQESNYRLLRRNNSYTCYTAAICGLPVHATFRAADSSAPEDSEKLVGDTVSYSKKRLRYDSYSSYCNAVAEAEIEAEEGGVEMKLASELADPDQPREDPAEEEKEEKDAPEVHLLFHFLQVLTACFGSFAHGGNDVSNAIGPLVALWLIYKQGGVTQEAATPVWLLFYGGVGICTGLWVWGRRVIQTMGKDLTPITPSSGFTIELASAFTVVIASNIGLPVSTTHCKVGSVVAVGWIRSRKAVDWRLFRNIFVAWFVTVPVAGLFSAAVMALLMYGILPYV

SEQ ID NO: 25 - DNA, 3297 bp, Homo sapiens
tgccggcgctctctgcgtggttcttcttctcggccgctgaaacccccgcggctgcttcctgggaaggtcgtgagtcccgctgagctgtccccggtgccgccgacccgggccgtgtgcccgtggctccagccgctgccgcctcgatctcctcgtctcccgctccgccctcccttttccctggatgaacttgcgtcctttctcttctccgccatggaattctgctccgtgcttttagccctcctgagccaaagaaaccccagacaacagatgcccatacgcagcgtatagcagtaactccccagctcggtttctgtgccgtagtttacagtatttaattttatataatatatattatttattatagcatttttgatacctcatattctgtttacacatcttgaaaggcgctcagtagttctcttactaaacaaccactactccagagaatggcaacgctgattaccagtactacagctgctaccgccgcttctggtcctttggtggactacctatggatgctcatcctgggcttcattattgcatttgtcttggcattctccgtgggagccaatgatgtagcaaattcttttggtacagctgtgggctcaggtgtagtgaccctgaagcaagcctgcatcctagctagcatctttgaaacagtgggctctgtcttactgggggccaaagtgagcgaaaccatccggaagggcttgattgacgtggagatgtacaactcgactcaagggctactgatggccggctcagtcagtgctatgtttggttctgctgtgtggcaactcgtggcttcgtttttgaagctccctatttctggaacccattgtattgttggtgcaactattggtttctccctcgtggcaaaggggcaggagggtgtcaagtggtctgaactgataaaaattgtgatgtcttggttcgtgtccccactgctttctggaattatgtctggaattttattcttcctggttcgtgcattcatcctccataaggcagatccagttcctaatggtttgcgagctttgccagttttctatgcctgcacagttggaataaacctcttttccatcatgtatactggagcaccgttgctgggctttgacaaacttcctctgtggggtaccatcctcatctcggtgggatgtgcagttttctgtgcccttatcgtctggttctttgtatgtcccaggatgaagagaaaaattgaacgagaaataaagtgtagtccttctgaaagccccttaatggaaaaaaagaatagcttgaaagaagaccatgaagaaacaaagttgtctgttggtgatattgaaaacaagcatcctgtttctgaggtagggcctgccactgtgcccctccaggctgtggtggaggagagaacagtctcattcaaacttggagatttggaggaagctccagagagagagaggcttcccagcgtggacttgaaagaggaaaccagcatagatagcaccgtgaatggtgcagtgcagttgcctaatgggaaccttgtccagttcagtcaagccgtcagcaaccaaataaactccagtggccactaccagtatcacaccgtgcataaggattccggcctgtacaaagagctactccataaattacatcttgccaaggtgggagattgcatgggagactccggtgacaaacccttaaggcgcaataatagctatacttcctataccatggcaatatgtggcatgcctctggattcattccgtgccaaagaaggtgaacagaagggcgaagaaatggagaagctgacatggcctaatgcagactccaagaagcgaattcgaatggacagttacaccagttactgcaatgctgtgtctgaccttcactcagcatctgagatagacatgagtgtcaaggcagagatgggtctaggtgacagaaaaggaagtaatggctctctagaagaatggtatgaccaggataagcctgaagtctctctcctcttccagttcctgcagatccttacagcctgctttgggtcattcgcccatggtggcaatgacgtaagcaatgccattgggcctctggttgctttatatttggtttatgacacaggagatgtttcttcaaaagtggcaacaccaatatggcttctactctatggtggtgttggtatctgtgttggtctgtgggtttggggaagaagagttatccagaccatggggaaggatctgacaccgatcacaccctctagtggcttcagtattgaactggcatctgccctcactgtggtgattgcatcaaatattggccttcccatcagtacaacacattgtaaagtgggctctgttgtgtctgttggctggctccggtccaagaaggctgttgactggcgtctctttcgtaacatttttatggcctggtttgtcacagtccccatttctggagttatcagtgctgccatcatggcaatcttcagatatgtcatcctcagaatgtgaagctgtttgagattaaaatttgtgtcaatgtttgggaccatcttaggtattcctgctcccctgaagaatgattacagtgttaacagaagactgacaagagtctttttatttgggagccagaggagggaagtgttacttgtgctataactgcttttgtgctaaatatgaattgtctcaaaattagctgtgtaaaatagcccgggttcctttggctcctgctgaggtcccctttccttctgggctgtgaattcctgtacatatttctctactttttgtatcaggcttcaattccattatgttttaatgttgtctctgaagatgacttgtgatttttttttcttttttttaaaccatgaagagccgtttgacagagcatgctctgcgttgttggtttcaccagcttctgccctcacatgcacagggatttaacaacaaaaatataactacaacttcccttgtagtctcttatataagtagagtccttggtactctgccctcctgtcagtagtggcaggatctattggcatattcgggagcttcttagagggatgaggttctttgaacacagtgaaaatttaaattagtaacttttttgcaagcagtttattgactgttattgctaagaagaagtaagaaagaaaaagcctgttggcaatcttggttatttctttaagatttctggcagtgtgggatggatgaatgaagtggaatgtgaacttcgggcaagttaaatgggacagccttccatgttcatttgtctacctcttaactgaataaaaaagcctacagtttttagaaaaaaaaaaaaaaa

SEQ ID NO: 26 - protein, 679 aa, Homo sapiens
MATLITSTTAATAASGPLVDYLWMLILGFIIAFVLAFSVGANDVANSFGTAVGSGVVTLKQACILASIFETVGSVLLGAKVSETIRKGLIDVEMYNSTQGLLMAGSVSAMFGSAVWQLVASFLKLPISGTHCIVGATIGFSLVAKGQEGVKWSELIKIVMSWFVSPLLSGIMSGILFFLVRAFILHKADPVPNGLRALPVFYACTVGINLFSIMYTGAPLLGFDKLPLWGTILISVGCAVFCALIVWFFVCPRMKRKIEREIKCSPSESPLMEKKNSLKEDHEETKLSVGDIENKHPVSEVGPATVPLQAVVEERTVSFKLGDLEEAPERERLPSVDLKEETSIDSTVNGAVQLPNGNLVQFSQAVSNQINSSGHSQYHTVHKDSGLYKELLHKLHLAKVGDCMGDSGDKPLRRNNSYTSYTMAICGMPLDSFRAKEGEQKGEEMEKLTWPNADSKKRIRMDSYTSYCNAVSDLHSASEIDMSVKAAMGLGDRKGSNGSLEEWYDQDKPEVSLLFQFLQILTACFGSFAHGGNDVSNAIGPLVALYLVYDTGDVSSKVATPIWLLLYGGVGICVGLWVWGRRVIQTMGKDLTPITPSSGFSIELASALTVVIASNIGLPISTTHCKVGSVVSVGWLRSKKAVDWRLFRNIFMAWFVTVPISGVISAAIMAIFRYVILRM

SEQ ID NO: 27 - DNA, 2511 bp, Homo sapiens
cgccgcctgtgccatttctgattttgcaacttggggaagaagaaaaaagcgagagaagggagcttgctcgccggggggtggggaggggggaaggagagcgcggcccccccaggaacggagcgcggggggagcgggcgaggggagcaggggtgttggggggggagcctgagagcctgggggggctgcaaaaagagagaaagaaaacagcaggaaccacaacaaaacgccagcagggcgggcgggcgcgcagcagcagcggggcggccgaggcagtagcggcggcagcggcggcggcggcggaggcagcggccggtgtccggctcgggctcggctcctgcgaccccggggcgcccggcgggccccccgccccctccccctccccccttccccttccccttcccctcccagcgcgcccgcgcgccccgcggccctcggcgagcagctcggctccccccagcgctccccgggcccaaagatatggcaatggtagttagcagctggcgagatccgcaggacgacgtggccgggggcaaccccggcggccccaaccccgcagcgcaggcggcccgcggcggcggcggcggcgccggcgagcagcagcagcaggcgggctcgggcgcgccgcacacgccgcagaccccgggccagcccggagcgcccgccacccccggcacggcgggggacaagggccagggcccgcccggttcgggccagagccagcagcacatcgagtgcgtggtgtgcggggacaagtcgagcggcaagcactacggccaattcacctgcgagggctgcaaaagtttcttcaagaggagcgtccgcaggaacttaacttacacatgccgtgccaacaggaactgtcccatcgaccagcaccaccgcaaccagtgccaatactgccgcctcaagaagtgcctcaaagtgggcatgaggcgggaagcggttcagcgaggaagaatgcctccaacccagcccaatccaggccagtacgcactcaccaacggggaccccctcaacggccactgctacctgtccggctacatctcgctgctgctgcgcgccgagccctaccccacgtcgcgctacggcagccagtgcatgcagcccaacaacattatgggcatcgagaacatctgcgagctggccgcgcgcctgctcttcagcgccgtcgagtgggcccgcaacatccccttcttcccggatctgcagatcaccgaccaggtgtccctgctacgcctcacctggagcgagctgttcgtgctcaacgcggcccagtgctctatgccgctgcacgtggcgccgttgctggccgccgccggcctgcatgcctcgcccatgtctgccgaccgcgtcgtggccttcatggaccacatccgcatcttccaggagcaggtggagaagctcaaggcgctacacgtcgactcagccgagtacagctgcctcaaagccatcgtgctgttcacgtcagacgcctgtggcctgtcggatgcggcccacatcgagagcctgcaggagaagtcgcagtgcgcactggaggagtacgtgaggagccagtaccccaaccagcccagccgttttggcaaactgctgctgcgactgccctcgctgcgcaccgtgtcctcctccgtcatcgagcagctcttcttcgtccgtttggtaggtaaaacccccatcgaaactctcatccgcgatatgttactgtctgggagcagcttcaactggccttacatgtccatccagtgctcctagaccttgggcgcttcccacctgccccgtccccctagagactcagaggacccacctgggccaaggactccaaagccgcggggacaccgggaagtgcagcgggccaggcaggctgggtgggagggaggagggccgagacaggagcagcccacccagcagaaatacaatccgagctacaaagcatgggaaaaagagactcttttaggatcagatctgtgagcacgttggcgaggaaaaacaaaacaaacaaaaaaaagaaccttgtgtctgtctggtgaaaaaaagaaaaacaaattggaagagaggaccatgagaattttaataaaacagaaggaaactaatggaccttccaggatttattgtggacggatgtggatatattctgtacaggaacaacacatatggaagtggactgaagcctatgtagaaacacacacacactgaacattgttattcattttgtaaaatactagtctttattttcattttttgtaaaatttaaacatcgtatgcgcataaagaaaaaggaaacaagaattaggggaaaataacattttccaaataattataaaaaattgtcctgtgtctatgtatctatatctgttttgtatttttttctggttccaaaccagatttcctgtgattctatactaataatttttgatataaccctttgcttcttataatgagtgcgatatatgttgtcgaggctgttcttcaagaattaaaattgaagtgaaaatttaaacaaaaataaaagaattg

SEQ ID NO: 28 - DNA, 2589 bp, Homo sapiens
atggcggacggaggagcagcgagtcaagatgagagttcagccgcggcggcagcagcagcagactggaaaagtaagaagagctttcctgcctttttaattaccaaactactctcagttttcaatgaatcagttcaaagaaagaatgcagtctttctatacctgactcaagaatgaacwrkccgtcagaaaccagtaaaccatctatggagagtggagatggcaacacaggcacacaaaccaatggtctggactttcagaagcagcctgtgcctgtaggaggagcaatctcaacagcccaggcgcaggctttccttggacatctccatcaggtccaactcgctggaacaagtttacaggctgctgctcagtctttaaatgtacagtctaaatctaatgaagaatcgggggattcgcagcagccaagccagccttcccagcagccttcagtgcaggcagccattccccagacccagcttatgctagctggaggacagataactgggcttactttgacgcctgcccagcaacagttactactccagcaggcacaggcacaggcacagctgctggctgctgcagtgcagcagcactccgccagccagcagcacagtgctgctggagccaccatctccgcctctgctgccacgcccatgacgcagatccccctgtctcagcccatacagatcgcacaggatcttcaacaactgcaacagcttcaacagcagaatctcaacctgcaacagtttgtgttggtgcatccaaccaccaatttgcagccagcgcagtttatcatctcacagacgccccagggccagcagggtctcctgcaagcgcaaaatcttcaaacgcaactacctcagcaaagccaagccaacctcctacagtcgcagccaagcatcaccctcacctcccagccagcaaccccaacacgcacaatagcagcaaccccaattcagacacttccacagagccagtcaacaccaaagcgaattgatactcccagcttggaggagcccagtgaccttgaggagcttgagcagtttgccaagaccttcaaacaaagacgaatcaaacttggattcactcagggtgatgttgggctcgctatggggaaactatatggaaatgacttcagccaaactaccatctctcgatttgaagccttgaacctcagctttaagaacatgtgcaagttgaagccacttttagagaagtggctaaatgatgcagagaacctctcatctgattcgtccctctccagcccaagtgccctgaattctccaggaattgagggcttgagccgtaggaggaagaaacgcaccagcatagagaccaacatccgtgtggccttagagaagagtttcttggagaatcaaaagcctacctcggaagagatcactatgattgctgatcagctcaatatggaaaaagaggtgattcgtgtttggttctgtaaccgccgccagaaagaaaaaagaatcaacccaccaagcagtggtgggaccagcagctcacctattaaagcaattttccccagcccaacttcactggcacttcagacaccacctccaacaacacagcaaccgtgatttccacagcgcctccagcttcctcagcagtcacgtccccctctctgagtccctccccttctgcctcagcctccacctccgaggcatccagtgccagtgagaccagcacaacacagaccacctccactcctttgtcctcccctcttgggaccagccaggtgatggtgacagcatcaggtttgcaaacagcagcagctgctgcccttcaaggagctgcacagttgccagcaaatgccagtcttgctgccatggcagctgctgcaggactaaacccaagcctgatggcaccctcacagtttgcggctggaggtgccttactcagtctgaatccagggaccctgagcggtgctctcagcccagctctaatgagcaacagtacactggcaactattcaagctcttgcttctggtggctctcttccaataacatcacttgatgcaactgggaacctggtatttgccaatgcgggaggagcccccaacatcgtgactgcccctctgttcctgaaccctcagaacctctctctgctcaccagcaaccctgttagcttggtctctgccgccgcagcatctgcagggaactctgcacctgtagccagccttcacgccacctccacctctgctgagtccatccagaactctctcttcacagtggcctctgccagcggggctgcgtccaccaccaccaccgcctccaaggcacagtgagctgggcagagctgggctgccagaagcctttttcactctgcagtgtgattggactgccagccaggttaataaactgaaaaatgtgattggcttcctctcgccgtgttgtgagggcaaaggagagaagggagaaaaaaaaaaaaaaaaccacacacacccatacacaatataccagaaaaggaaggaaggatggagacggaacatttgcctaatttgtaataaaacactgtcttttcagggttgcttcatgggttggaggactttctaaccaaaaattaaaaaaaaaaaaaaaa

SEQ ID NO: 29 - DNA, 3592 bp, Homo sapiens
ctgagcgggtgcgcgggcaacttccggtgtgggtgacgagtggtggccgaagcagggggacagcaagggacgctcaggcggggaccatggcggacggcggctcggagcgggctgacgggcgcatcgtcaagatggaggtggactacagcgccacggtggatcagcgcctacccgagtgtgcgaagctagccaaggaaggaagacttcaagaagtcattgaaacccttctctctctggaaaagcagactcgtactgcttccgatatggtatcgacatcccgtatcttagttgcagtagtgaagatgtgctatgaggctaaagaatgggatttacttaatgaaaatattatgcttttgtccaaaaggcggagtcagttaaaacaagctgttgccaaaatggttcaacagtgctgtacttatgttgaggaaatcacagaccttcctatcaaacttcgattaattgatactctacgaatggttaccgaaggcaagatttatgttgaaattgagcgtgcgcgactgactaaaacattagcaactataaaagaacaaaatggtgatgtgaaagaggcagcctccattttacaggagttacaggtggaaacctacgggtcaatggaaaagaaagagcgagtggaatttattttggagcaaatgaggctctgcctagctgtgaaggattacattcgaacacaaatcatcagcaagaaaattaacaccaaatttttccaggaagaaaatacagagaaattaaagttgaagtactataatttaatgattcagctggatcaacatgagggatcctatttgtctatttgtaagcactacagagcaatatatgatactccctgtatacaggcagaaagtgaaaaatggcagcaggctctgaagagtgttgtactctatgttatcctggctccttttgacaatgaacagtcagatttggttcaccgaataagtggtgacaagaagttagaagaaattcccaaatacaaggatcttttaaagctttttaccacaatggagttgatgcgttggtccacacttgttgaggactatggaatggaattaagaaaaggttcccttgagagtcctgcaacggatgtttttggttctacagaggaaggtgaaaaaaggtggaaagacttgaagaacagagttgttgaacataatattagaataatggccaagtattatactcggataacaatgaaaaggatggcacagcttctggatctatctgttgatgagtccgaagcctttctctcaaatctagtagttaacaagaccatctttgctaaagtagacagattagcaggaattatcaacttccagagacccaaggatccaaataatttattaaatgactggtctcagaaactgaactcattaatgtctctggttaacaaaactacgcatctcatagccaaagaggagatgatacataatctacaataagggtcttagtgctttagaaaaaagttaaaattggaagtcattaaaaaaagactgttataatggtgtatatgttggggttttttttctaagcttctttgtcttaaattttaaaatagtgaatatgtttgagactccctttgacctttcagttccccaagttcattgttaactttgcatttgcaattggtgcaaaaatacagatttctgtcgtctgaatacacaaaaagttgtgtcataacttacccagatatgtttttctatcatttgaaacctttttagctactgtttgttttcattcaactaacaaacatattccaataataaaagcagtatatacatatttcctttctacagttacctctgattctcaacattttgtggggtagtgatttggcaagtgttttttaaataaaacaaatctcattgtaaagctatcagtcatttagtagaatagaaaagcaacatagagcatacaagaacatttgggatagagttgtgatttgtgaagaatttgtactttgatattgtggcggaaagtctagactgagtgtgtatgctggtaaactgtagacttttttttttttttttttgagtccggctggttccaatcacagtagcttgattgctttcagccctcatcctctcacttgatcagttgttcaacagaatcagctgacataattgacacagtttattgggtgttaagtccgctctatagggatagtgactactttttttttttttttttttttgctcttcttcctctcccctttctttatatgggtttaaatttaacataaagttgtttttataaggcttatttgtggctttaacttgtaagtctgattacatcattattgttccaaattcattatctctgtaggaacttttagttccattatatgaacactggataacctaattttttttaatgctttaaaaaaatggcaaaaagacgtcaggccaccctcatagtaagtggtgtagtattaaaatattttcacggaattaaaagtagcttgctgtcaaagaaacacctgagatgaattggtgtgaacgaattttgcaagtttaatttgatttatttcagagaaaatagaaaaaacaatgttagaaggttatttaaaatgatacttaaataaagaaagtgtgaggtctactttaaaaaaattcaaatgaagagaaaaagaaaaacagcattctagaaatggcatttctcctaattaattttccacttaatggaagattatcaattgtcctattttatgatcccaggactgaagacagttgtgggatatctgtcatatttatcctgtgagtcattgtgaataatgacatacagtactgaagtaatctgattttattctttggaaattcaatgcattggtcacactaataacatcaacatctgctatcacttatctttttaaaactaaccaaaaaaggctgggattacaggcatgagccactgcacccaactcctctttcgtctttctttaacacacactaggctctttgtgtattatgattcagtgctatttgtaactgtgtcccagtgaccaaattgcactcgactcgatcagctgttcatccatttcgtgttttttcctgtcaaacattaatccagcaaatatatgaggtatttaccaatttattttcttagtattacaaaataattcattagcataaagtacaatagtgaaatatttgagttgttcggaacctcaattaatcctgttttacatttcagacctaaagctggcaatcaggagaagaagcactttgttttaaatgtggagaagataacacttgattccatttcattgtcattagtgtattaaccagcaggagaggtgatgagccatttttcaaatgaaataccttttatttccatataatttttttattttagagttcaatagctgtttctatgattatcctcaatttccatatgttactgaatctgaaaaacatctttaaaattcaaacagttccattttctctcttgtaagtgttaaatgtgataaaagtacatattttaaattgttttcagctcttggatatagcagcaataaaaacactaatttgtgggtatttaagaaaacctggagaataaactcatactttaaaagatc

SEQ ID NO: 30 - protein, 456 aa, Homo sapiens
MADGGSERADGRIVKMEVDYSATVDQRLPECAKLAKEGRLQEVIETLLSLEKQTRTASDMVSTSRILVAVVKMCYEAKEWDLLNENIMLLSKRRSQLKQAVAKMVQQCCTYVEEITDLPIKLRLIDTLRMVTEGKIYVEIERARLTKTLATIKEQNGDVKEAASILQELQVETYGSMEKKERVEFILEQMRLCLAVKDYIRTQIISKKINTKFFQEENTEKLKLKYYNLMIQLDQHEGSYLSICKHYRAIYDTPCIQAESEKWQQALKSVVLYVILAPFDNEQSDLVHRISGDKKLEEIPKYKDLLKLFTTMELMRWSTLVEDYGMELRKGSLESPATDVFGSTEEGEKRWKDLKNRVVEHNIRIMAKYYTRITMKRMAQLLDLSVDESEAFLSNLVVNKTIFAKVDRLAGIINFQRPKDPNNLLNDWSQKLNSLMSLVNKTTHLIAKEEMIHNLQ

SEQ ID NO: 31 - DNA, 3745 bp, Homo sapiens
gaattcggcacgaggccattgaatcccagtcctaacagaagtactgcgaatcttgtggcctcattctgaacaaaagggattagagaagaaaaatctcttgatataaggcttgaaagcaagggcaggcaatcttggttgtgaatattttctgatttttccagaaatcaagcagaagattgagctgctgatgtcagttaactctgagaagtcgtcctcttcagaaaggccggagcctcaacagaaagctcctttagttcctcctcctccaccgccaccaccaccaccaccgccacctttgccagaccccacacccccggagccagaggaggagatcctgggatcagatgatgaggagcaagaggaccctgcggactactgcaaaggtggatatcatccagtgaaaattggagacctcttcaatggccggtatcatgttattagaaagcttggatgggggcacttctctactgtctggctgtgctgggatatgcaggggaaaagatttgttgcaatgaaagttgtaaaaagtgcccagcattatacggagacagccttggatgaaataaaattgctcaaatgtgttcgagaaagtgatcccagtgacccaaacaaagacatggtggtccagctcattgacgacttcaagatttcaggcatgaatgggatacatgtctgcatggtcttcgaagtacttggccaccatctcctcaagtggatcatcaaatccaactatcaaggcctcccagtacgttgtgtgaagagtatcattcgacaggtccttcaagggttagattacttacacagtaagtgcaagatcattcatactgacataaagccggaaaatatcttgatgtgtgtggatgatgcatatgtgagaagaatggcagctgagcctgagtggcagaaagcaggtgctcctcctccttcagggtctgcagtgagtacggctccacagcagaaacctataggaaaaatatctaaaaacaaaaagaaaaaactgaaaaagaaacagaagaggcaggctgagttattggagaagcgcctgcaggagatagaagaattggagcgagaagctgaaaggaaaataatagaagaaaacatcacctcagctgcaccttccaatgaccaggatggcgaatactgcccagaggtgaaactaaaaacaacaggattagaggaggcggctgaggcagagactgcaaaggacaatggtgaagctgaggaccaggaagagaaagaagatgctgagaaagaaaacattgaaaaagatgaagatgatgtagatcaggaacttgcgaacatagaccctacgtggatagaatcacctaaaaccaatggccatattgagaatggcccattctcactggagcagcaactggacgatgaagatgatgatgaagaagactgcccaaatcctgaggaatataatcttgatgagccaaatgcagaaagtgattacacatatagcagctcctatgaacaattcaatggtgaattgccaaatggacgacataaaattcccgagtcacagttcccagagttttccacctcgttgttctctggatccttagaacctgtggcctgcggctctgtgctttctgagggatcaccacttactgagcaagaggagagcagtccatcccatgacagaagcagaacggtttcagcctccagtactggggatttgccaaaagcaaaaacccgggcagctgacttgttggtgaatcccctggatccgcggaatcgagataaaattagagtaaaaattgctgacctgggaaatgcttgttgggtgcataaacacttcacggaagacatccagacgcgtcagtaccgctccatagaggttttaataggagcggggtacagcacccctgcggacatctggagcacggcgtgtatggcatttgagctggcaacgggagattatttgtttgaaccacattctggggaagactattccagagacgaagaccacatagcccacatcatagagctgctaggcagtattccaaggcactttgctctatctggaaaatattctcgggaattcttcaatcgcagaggagaactgcgacacatcaccaagctgaagccctggagcctctttgatgtacttgtggaaaagtatggctggccccatgaagatgctgcacagtttacagatttcctgatcccgatgttagaaatggttccagaaaaacgagcctcagctggcgaatgtcggcatccttggttgaattcttagcaaattctaccaatattgcattctgagctagcaaatgttcccagtacattggacctaaacggtgactctcattctttaacaggattacaagtgagctggcttcatcctcagacctttattttgctttgaggtactgttgtttgacattttgctttttgtgcactgtgatcctggggaagggtagtcttttgtcttcagctaagtagtttactgaccattttcttctggaaacaataacatgtctctaagcattgtttcttgtgttgtgtgacattcaaatgtcatttttttgaatgaaaaatactttcccctttgtgttttggcaggttttgtaactatttatgaagaaatattttagctgagtactatataatttacaatcttaagaaattatcaagttggaaccaagaaatagcaaggaaatgtacaattttatcttctggcaaagggacatcattcctgtattatagtgtatgtaaatgcaccctgtaaatgttactttccattaaatatgggagggggactcaaatttcagaaaagctaccaagtcttgagtgctttgtagcctatgttgcatgtagcggactttaactgctccaaggagttgtgcaaacttttcattccataacagtcttttcacattggattttaaacaaagtggctctgggttataagatgtcattctctatatggcactttaaaggaagaaaagatatgtttctcattctaaaatatgcattataatttagcagtcccatttgtgattttgcatatttttaaaagtacttttaaagaagagcaatttccctttaaaaatgtgatggctcagtaccatgtcatgttgcctcctctgggcgctgtaagttaagctctacatagattaaattggagaaacgtgttaattgtgtggaatgaaaaaatacatatatttttggaaaagcatgatcatgcttgtctagaacacaaggtatggtatatacaatttgcagtgcagtgggcagaatacttctcacagctcaaagataacagtgatcacattcattccataggtagctttacgtgtggctacaacaaattttactagctttttcattgtctttccatgaaacgaagttgagaaaatgattttccctttgcaggttgcacacagttttgtttatgcatttccttaaaattaattgtagactccaggatacaaaccatagtaggcaatacaatttagaatgtaatatatagaggtatattagcctctttagaagtcagtggattgaatgtctttttattttaaattttacattcattaaggtgcctcgtttttgactttgtccattaacatttatccatatgcctttgcaataactagattgtgaaaagctaacaagtgttgtaacaataatccattgtttgaggtgcttgcagttgtcttaaaaattaaagtgttttggtttttttttttccagaaaaaaaaaaaaaaaaaaaaaaaaaaaaaattcctgc

SEQ ID NO: 32 - protein, 686 aa, Homo sapiens
MSVNSEKSSSSERPEPQQKAPLVPPPPPPPPPPPPPLPDPTPPEPEEEILGSDDEEQEDPADYCKGGYHPVKIGDLFNGRYHVIRKLGWGHFSTVWLCWDMQGKRFVAMKVVKSAQHYTETALDEIKLLKCVRESDPSDPNKDMVVQLIDDFKISGMNGIHVCMVFEVLGHHLLKWIIKSNYQGLPVRCVKSIIRQVLQGLDYLHSKCKIIHTDIKPENILMCVDDAYVRRMAAEPEWQKAGAPPPSGSAVSTAPQQKPIGKISKNKKKKLKKKQKRQAELLEKRLQEIEELEREAERKIIEENITSAAPSNDQDGEYCPEVKLKTTGLEEAAEAETAKDNGEAEDQEEKEDAEKENIEKDEDDVDQELANIDPTWIESPKTNGHIENGPFSLEQQLDDEDDDEEDCPNPEEYNLDEPNAESDYTYSSSYEQFNGELPNGRHKIPESQFPEFSTSLFSGSLEPVACGSVLSEGSPLTEQEESSPSHDRSRTVSASSTGDLPKAKTRAADLLVNPLDPRNRDKIRVKIADLGNACWVHKHFTEDIQTRQYRSIEVLIGAGYSTPADIWSTACMAFELATGDYLFEPHSGEDYSRDEDHIAHIIELLGSIPRHFALSGKYSREFFNRRGELRHITKLKPWSLFDVLVEKYGWPHEDAAQFTDFLIPMLEMVPEKRASAGECRHPWLNS

SEQ ID NO: 33 - DNA, 3676 bp, Homo sapiens
tgcccggcggaaaccaaaccgagggatggggtggcgaggacagggtacgtcgcaggcttgtgcgggtcgggttcggacctgcgctgcctcgggatgtaaagtataacaagagggtcgggatgggcagcgtaggcctgtgaggcctgcgggtgcccctgtcccccagctccccccgcagccggctccgcagtggtccactccggttgccgggtgcggattcgggttccggaccgaaggctgtgtgttctccgccgttcattgtggccccgacaggccggggttactgtggcgaccacgagagcagctttggcgctatggaggagcccggggctacccctcaaccgtatttggggctgctcctggaggagctacgcagggttgtggcagcactgcctgaaggtatgagaccagattctaatctttatggttttccatgggaattggtgatatgtgcagctgttgttggattttttgctgttctcttttttttgtggagaagttttagatcggttaggagtcggctttatgtgggacgagagaaaaagcttgctctaatgctttctggactaattgaagaaaaaagtaaactacttgaaaaatttagccttgttcaaaaagagtatgaaggctatgaagtagagtcatctttaaaggatgccagctttgagaaggaggcaacagaagcacaaagtttggaggcaacctgtgaaaagctgaacaggtccaattctgaacttgaggatgaaatactctgtctagaaaaagagttaaaagaagagaaatccaaacattctgaacaagatgaattgatggcggatatttcaaaaaggatacagtctctagaagatgagtcaaaatccctcaaatcacaagtagctgaagccaaaatgaccttccagatatttccaatgaatgaagaacgactgaagatagcaataaaagatgctttgaatgaaaattctcaacttcaggaaagccagaaacagcttttgcaagaagctgaagtatggaaagaacaagtgagtgaacttaataaacagaaagtaacatttgaagactccaaagtacatgcagaacaagttctaaatgataaagaaagtcacatcaagactctgactgaacgcttgttaaagatgaaagattgggctgctatgcttggagaagacataacggatgatgataacttggaattagaaatgaacagtgaatcggaaaatggtgcttacttagataatcctccaaaaggagctttgaagaaactgattcatgctgctaagttaaatgcttctttaaaaaccttagaaggagaaagaaaccaaatttatattcagttgtctgaagttgataaaacaaaggaagagcttacagagcatattaaaaatcttcagactgaacaagcatctttgcagtcagaaaacacacattttgaaaatgagaatcagaagcttcaacagaaacttaaagtaatgactgaattatatcaagaaaatgaaatgaaactccacaggaaattaacagtagaggaaaattatcggttagagaaagaagagaaactttctaaagtagatgaaaagatcagccatgccactgaagagctggagacctatagaaagcgagccaaagatcttgaagaagaattggagagaactattcattcttatcaagggcagattatttcccatgagaaaaaagcacatgataattggttggcagctcggaatgctgaaagaaacctcaatgatttaaggaaagaaaatgctcacaacagacaaaaattaactgaaacagagcttaaatttgaacttttagaaaaagatccttatgcactcgatgttccaaatacagcatttggcagagagcattccccatatggtccctcaccattgggttggccttcatctgaaacaagagcttttctctctcctccaactttgttggagggtccactcacactctcacctttgcttccagggggaggaggaagaggctcacgaggcccagggaatcctttggaccatcagattaccaatgaaagaggagaatcaagctgtgataggttaaccgatcctcatagggctctctctgacactgggtttctgtcacctccatgggaccaggaccgtaggatgatgtttcctccgccaggacaatcatatcctgattcagcccttcctccacaaaggcaagacagattttgttctaattctggtagactgtctggaccagcagaactcagaagttttaatatgccttctttggataaaatggatgggtcaatgccttcagaaatggaatccagtagaaatgataccaaagatgatcttggtaatttaaatgtgcctgattcatctctccctgctgaaaatgaagccactggccctggctttgttcctccacctcttgctccagtcagaggtccattgtttccagtggatgcaagaggcccattcttgagaagaggacctcctttccccccacctcctccaggagccatgtttggagcttctcgagattattttccaccaggggatttcccaggtccaccacctgctccatttgcaatgagaaatgtctatccaccgaggggttttcctccttaccttcccccaagacctggatttttccccccacccccacattctgaaggtagaagtgagttcccctcaggtttgattccaccttcaaatgagcctgctactgaacatccagaaccacagcaagaaacctgacaatatttttgctctcttcaaaagtaattttgactgatctcattttcagtttaagtaactgctgttacttaagtgattacacttttgctcaaattgaagcttaatggaattataattctcaggatagtattttgtaaataaagatgatttaaatatgaatcttatgagtaaattatttcaattttattttagacggtataactatttcaatttgattaatccactattatataaacaatagtgggagttttatatatgtaatcttgcaggtggggaggctttaaattctgaagtctgtgtctttatgccaagaactgtatttactgtggttgtggacaaatgtgaaagtaactttatgcttaaataaattatagttgatttaaagatttgtttggcattgataataataaaatcagtagtttttctataactatggctctattaattaacttttttccttttaccaataactttgaggtgcaaaactcaaacttatgtgggtcttttgtgttcaattatgttatgacaaatgtgctctctttcttgtaaatagacatgagtggcccaaagcaacaaattaatacacttttaaaagtcaaaattgattatattttaaagataaccaggatattatctaatggtgaattgtagaattttgatcttcttattcactgagtttcttgcacggtttctttattgctttttttcccgcctgttcttttgtaaggtatttactattttctgtggaggatattgagatgtactacaggataactgtagtgaatgatgtgtcatcattttgagctttggactcaatatctttagtgtttccctaaatcagatttgtaggtcatgttaagcttcttgcacattaatatgattatggaaggaaaggcagtgaagcataactaataaacatcataatacttaaaaaaaaaaaaaaaaaa

SEQ ID NO: 34 - protein, 804 aa, Homo sapiens
MEEPGATPQPYLGLLLEELRRVVAALPEGMRPDSNLYGFPWELVICAAVVGFFAVLFFLWRSFRSVRSRLYVGREKKLALMLSGLIEEKSKLLEKFSLVQKEYEGYEVESSLKDASFEKEATEAQSLEATCEKLNRSNSELEDEILCLEKELKEEKSKHSEQDELMADISKRIQSLEDESKSLKSQVAEAKMTFQIFPMNEERLKIAIKDALNENSQLQESQKQLLQEAEVWKEQVSELNKQKVTFEDSKVHAEQVLNDKESHIKTLTERLLKMKDWAAMLGEDITDDDNLELEMNSESENGAYLDNPPKGALKKLIHAAKLNASLKTLEGERNQIYIQLSEVDKTKEELTEHIKNLQTEQASLQSENTHFENENQKLQQKLKVMTELYQENEMKLHRKLTVEENYRLEKEEKLSKVDEKISHATEELETYRKRAKDLEEELERTIHSYQGQIISHEKKAHDNWLAARNAERNLNDLRKENAHNRQKLTETELKFELLEKDPYALDVPNTAFGREHSPYGPSPLGWPSSETRAFLSPPTLLEGPLTLSPLLPGGGGRGSRGPGNPLDHQITNERGESSCDRLTDPHRALSDTGFLSPPWDQDRRMMFPPPGQSYPDSALPPQRQDRFCSNSGRLSGPAELRSFNMPSLDKMDGSMPSEMESSRNDTKDDLGNLNVPDSSLPAENEATGPGFVPPPLAPVRGPLFPVDARGPFLRRGPPFPPPPPGAMFGASRDYFPPGDFPGPPPAPFAMRNVYPPRGFPPYLPPRPGFFPPPPHSEGRSEFPSGLIPPSNEPATEHPEPQQET

SEQ ID NO: 35 - DNA, 2591 bp, Homo sapiens
cgtccctctttctccaccccgccgagcctaaactagtgacggggagggagacgggatagtgtttctgtttccgtggtctttgaatccacaacctctagtctgaacacagagaacacaaatttgtcgattacttcaggaagcccagggggaaccgcgccccgctgaagggctcggggaaggcgcgctcccgcgtcccgccccctcctcccccagcactcacactgtggtagcggcggagggcggagggatccggaggcggcggagggagacgtcattgcagggttgtttgtcagtctcggcggcggcggcggcggcggcggcggcggcggcgatccacagtgattcggccgcgccgccgggggtgggggggctgcgcgggacttttttttttttcagactgaccgcggggcagctgcggagcatgtcgaccccggcccggaggaggctcatgcgggatttcaagcggttacaagaggacccacctgtgggtgtcagtggcgcaccatctgaaaacaacatcatgcagtggaatgcagttatatttggaccagaagggacaccttttgaagatggtacttttaaactagtaatagaattttctgaagaatatccaaataaaccaccaactgttaggtttttatccaaaatgtttcatccaaatgtgtatgctgatggtagcatatgtttagatatccttcagaatcgatggagtccaacatatgatgtatcttctatcttaacatcaattcagtctctgctggatgaaccgaatcctaacagtccagccaatagccaggcagcacagctttatcaggaaaacaaacgagaatatgagaaaagagtttcggccattgttgaacaaagctggaatgattcataatagacaactggtctgttaatctttttcatcattgttgtgtataatttacctctcattagaaaggctaacaaattttaagtgccacaggttttaaggattctgcagaaaaaaaagaaaaaagtccttcagtttagaacctacaaaagcttgtgtatcttgattaatgtactttttattgcatggtgtgaactaagttattgctgcataaatttgtaatatatcctgtttgtatttttttccaagtgtataatgttggtgtggagttttcatgacagaatatacacattttgtaaatctgtacttttttcaaatattgaatgccttatttttgaattctttagatttttaaattggagaaaagcacttaaagttttttatatatgaatattacatgtaaagctgttaaaatacataacttcagtgcaagagactttgtcacttatttccttatgtgtgtaggaggggttaataagtctctagctctccatctattgatagtttcatttacaatttcaaaagaacattcttatattttatcaaggaagtcttcaaatttgattctaaatagcgattataatctccaactttattttgaatgtacctctattagtttcaattgagtaattctagacataactggtttgactctgtccaactctgtatttaggccatttgttacagtttcttcatgcattacttactgttaaaactgtaccttttgcgatttcacagttggcacttctgccatgagcagagaactgatgcgacttgttttgctgcttggtagcactttaaaaaattttttgattaatgaagaaagtaaaaccataaacattgccaaaaattcatgccccagtattagcaatgaattagttgaattggtttgagaaaggcacatattggagggaaatcttggtgtaacttaaatatttgaaaattacctttaatgcaatgcatatctgtttattctgggaaatgttttaatgccagggcctgctgagttgcttcttcttgtggagattttttttttaatctcctgagttgtataaaagttgtactgcatcttagtttactggataaatttaaaacacagtattgtagaaagctaatacaaaactatcctatgccttcaaatagtatagaaaatggaaaatatacaagtaaattctgttgaaccacctgtgtagtctctctagtagttaaaacagctattttagtaaccccaagagtttcttctcatatccataaaattggattacagtatggcaatatctacagcttctattcattatgcaacgtttaacattgattggataaatgcttataggctgggccaggtggctcccacctgtagtcccagcactttgggaggcaaaggcgggaggatcacttgaggccaggactttgagaccagccagggcaacataataagacttttctctactttaaattttttaaaaaattagttgggcatagtggcacttgcctgtagtctcagctacttaggaggctgaggtggcagaatagcttatgcctaggaggttgaggctgcagtgagctgtgattatgccattgcactccagcctgggtgacagagcaataccctgtctttaaaaataaaagctattacttggcaaaaaattccgcactatataattcgcacacattaattagggtttatgtaccatacaaaaaaaaattaattagggct

SEQ ID NO: 36 - protein, 152 aa, Homo sapiens
MSTPARRRLMRDFKRLQEDPPVGVSGAPSENNIMQWNAVIFGPEGTPFEDGTFKLVIEFSEEYPNKPPTVRFLSKMFHPNVYADGSICLDILQNRWSPTYDVSSILTSIQSLLDEPNPNSPANSQAAQLYQENKREYEKRVSAIVEQSWNDS

SEQ ID NO: 37 - DNA, 2834 bp, Homo sapiens
gcccactcccaccgccagctggaaccctggggactacgacgtccctcaaaccttgcttctaggagataaaaagaacatccagtcatggataaaaatgagctggttcagaaggccaaactggccgagcaggctgagcgatatgatgacatggcagcctgcatgaagtctgtaactgagcaaggagctgaattatccaatgaggagaggaatcttctctcagttgcttataaaaatgttgtaggagcccgtaggtcatcttggagggtcgtctcaagtattgaacaaaagacggaaggtgctgagaaaaaacagcagatggctcgagaatacagagagaaaattgagacggagctaagagatatctgcaatgatgtactgtctcttttggaaaagttcttgatccccaatgcttcacaagcagagagcaaagtcttctatttgaaaatgaaaggagattactaccgttacttggctgaggttgccgctggtgatgacaagaaagggattgtcgatcagtcacaacaagcataccaagaagcttttgaaatcagcaaaaaggaaatgcaaccaacacatcctatcagactgggtctggcccttaacttctctgtgttctattatgagattctgaactccccagagaaagcctgctctcttgcaaagacagcttttgatgaagccattgctgaacttgatacattaagtgaagagtcatacaaagacagcacgctaataatgcaattactgagagacaacttgacattgtggacatcggatacccaaggagacgaagctgaagcaggagaaggaggggaaaattaaccggccttccaacttttgtctgcctcattctaaaatttacacagtagaccatttgtcatccatgctgtcccacaaatagttttttgtttacgatttatgacaggtttatgttacttctatttgaatttctatatttcccatgtggtttttatgtttaatattaggggagtagagccagttaacatttagggagttatctgttttcatcttgaggtggccaatatggggatgtggaatttttatacaagttataagtgtttggcatagtacttttggtacattgtggcttcaaaagggccagtgtaaaactgcttccatgtctaagcaaagaaaactgcctacatactggtttgtcctggcggggaataaaagggatcattggttccagtcacaggtgtagtaattgtgggtactttaaggtttggagcacttacaaggctgtggtagaatcataccccatggataccacatattaaaccatgtatatctgtggaatactcaatgtgtacacctttgactacagctgcagaagtgttcctttagacaaagttgtgacccattttactctggataagggcagaaacggttcacattccattatttgtaaagttacctgctgttagctttcattatttttgctacactcattttatttgtatttaaatgttttaggcaacctaagaacaaatgtaaaagtaaagatgcaggaaaaatgaattgcttggtattcattacttcatgtatatcaagcacagcagtaaaacaaaaacccatgtatttaacttttttttaggatttttgcttttgtgattttttttttttttttttgatacttgcctaacatgcatgtgctgtaaaaatagttaacagggaaataacttgagatgatggctagctttgtttaatgtcttatgaaattttcatgaacaatccaagcataattgttaagaacacgtgtattaaattcatgtaagtggaataaaagttttatgaatggacttttcaactactttctctacagcttttcatgtaaattagtcttggttctgaaacttctctaaaggaaattgtacattttttgaaatttattccttattccctcttggcagctaatgggctcttaccaagtttaaacacaaaatttatcataacaaaaatactactaatataactactgtttccatgtcccatgatcccctctcttcctccccaccctgaaaaaaatgagttcctattttttctgggagagggggggattgattagaaaaaaatgtagtgtgttccatttaaaattttggcatatggcattttctaacttaggaagccacaatgttcttggcccatcatgacattgggtagcattaactgtaagttttgtgcttccaaatcactttttggtttttaagaatttcttgatactcttatagcctgccttcaattttgatcctttattctttctatttgtcaggtgcacaagattaccttcctgttttagccttctgtcttgtcaccaaccattcttacttggtggccatgtacttggaaaaaggccgcatgatctttctggctccactcagtgtctaaggcaccctgcttcctttgcttgcatcccacagactatttccctcatcctatttactgcagcaaatctctccttagttgatgagactgtgtttatctccctttaaaaccctacctatcctgaatggtctgtcattgtctgcctttaaaatccttcctctttcttcctcctctattctctaaataatgatggggctaagttatacccaaagctcactttacaaaatatttcctcagtactttgcagaaaacaccaaacaaaaatgccattttaaaaaaggtgtattttttcttttagaatgtaagctcctcaagagcagggacaatgttttctgtatgttctattgtgcctagtacactgtaaatgctcaataaatattgatgatgggaggcagtgagtcttgatgataagggtgagaaactgaaatccc

SEQ ID NO: 38 - protein, 245 aa, Homo sapiens
MDKNELVQKAKLAEQAERYDDMAACMKSVTEQGAELSNEERNLLSVAYKNVVGARRSSWRVVSSIEQKTEGAEKKQQMAREYREKIETELRDICNDVLSLLEKFLIPNASQAESKVFYLKMKGDYYRYLAEVAAGDDKKGIVDQSQQAYQEAFEISKKEMQPTHPIRLGLALNFSVFYYEILNSPEKACSLAKTAFDEAIAELDTLSEESYKDSTLIMQLLRDNLTLWTSDTQGDEAEAGEGGEN

SEQ ID NO: 39 - DNA, 2876 bp, Homo sapiens
gcctgtgagcagcgagatccagggacagagtctcagcctcgccgctgctgccgccgccgccgcccagagactgctgagcccgtccgtccgccgccaccacccactccggacacagaacatccagtcatggataaaaatgagctggttcagaaggccaaactggccgagcaggctgagcgatatgatgacatggcagcctgcatgaagtctgtaactgagcaaggagctgaattatccaatgaggagaggaatcttctctcagttgcttataaaaatgttgtaggagcccgtaggtcatcttggagggtcgtctcaagtattgaacaaaagacggaaggtgctgagaaaaaacagcagatggctcgagaatacagagagaaaattgagacggagctaagagatatctgcaatgatgtactgtctcttttggaaaagttcttgatccccaatgcttcacaagcagagagcaaagtcttctatttgaaaatgaaaggagattactaccgttacttggctgaggttgccgctggtgatgacaagaaagggattgtcgatcagtcacaacaagcataccaagaagcttttgaaatcagcaaaaaggaaatgcaaccaacacatcctatcagactgggtctggcccttaacttctctgtgttctattatgagattctgaactccccagagaaagcctgctctcttgcaaagacagcttttgatgaagccattgctgaacttgatacattaagtgaagagtcatacaaagacagcacgctaataatgcaattactgagagacaacttgacattgtggacatcggatacccaaggagacgaagctgaagcaggagaaggaggggaaaattaaccggccttccaacttttgtctgcctcattctaaaatttacacagtagaccatttgtcatccatgctgtcccacaaatagttttttgtttacgatttatgacaggtttatgttacttctatttgaatttctatatttcccatgtggtttttatgtttaatattaggggagtagagccagttaacatttagggagttatctgttttcatcttgaggtggccaatatggggatgtggaatttttatacaagttataagtgtttggcatagtacttttggtacattgtggcttcaaaagggccagtgtaaaactgcttccatgtctaagcaaagaaaactgcctacatactggtttgtcctggcggggaataaaagggatcattggttccagtcacaggtgtagtaattgtgggtactttaaggtttggagcacttacaaggctgtggtagaatcataccccatggataccacatattaaaccatgtatatctgtggaatactcaatgtgtacacctttgactacagctgcagaagtgttcctttagacaaagttgtgacccattttactctggataagggcagaaacggttcacattccattatttgtaaagttacctgctgttagctttcattatttttgctacactcattttatttgtatttaaatgttttaggcaacctaagaacaaatgtaaaagtaaagatgcaggaaaaatgaattgcttggtattcattacttcatgtatatcaagcacagcagtaaaacaaaaacccatgtatttaacttttttttaggatttttgcttttgtgattttttttttttttttttgatacttgcctaacatgcatgtgctgtaaaaatagttaacagggaaataacttgagatgatggctagctttgtttaatgtcttatgaaattttcatgaacaatccaagcataattgttaagaacacgtgtattaaattcatgtaagtggaataaaagttttatgaatggacttttcaactactttctctacagcttttcatgtaaattagtcttggttctgaaacttctctaaaggaaattgtacattttttgaaatttattccttattccctcttggcagctaatgggctcttaccaagtttaaacacaaaatttatcataacaaaaatactactaatataactactgtttccatgtcccatgatcccctctcttcctccccaccctgaaaaaaatgagttcctattttttctgggagagggggggattgattagaaaaaaatgtagtgtgttccatttaaaattttggcatatggcattttctaacttaggaagccacaatgttcttggcccatcatgacattgggtagcattaactgtaagttttgtgcttccaaatcactttttggtttttaagaatttcttgatactcttatagcctgccttcaattttgatcctttattctttctatttgtcaggtgcacaagattaccttcctgttttagccttctgtcttgtcaccaaccattcttacttggtggccatgtacttggaaaaaggccgcatgatctttctggctccactcagtgtctaaggcaccctgcttcctttgcttgcatcccacagactatttccctcatcctatttactgcagcaaatctctccttagttgatgagactgtgtttatctccctttaaaaccctacctatcctgaatggtctgtcattgtctgcctttaaaatccttcctctttcttcctcctctattctctaaataatgatggggctaagttatacccaaagctcactttacaaaatatttcctcagtactttgcagaaaacaccaaacaaaaatgccattttaaaaaaggtgtattttttcttttagaatgtaagctcctcaagagcagggacaatgttttctgtatgttctattgtgcctagtacactgtaaatgctcaataaatattgatgatgggaggcagtgagtcttgatgataagggtgagaaactgaaatccc

SEQ ID NO: 40 - DNA, 2667 bp, Homo sapiens
tctgagaggcgaggccgggtgaggcggcgagggcggcccgacgggcgcgggacgggacggggcagcgagggcgccgggagccgcggcccggaatcggggcgcttcgccccgggccccccagcatgaagaccccggcggacacagggtttgccttcccggattgggcctacaagccagagtcgtcccctggctcaaggcagatccagctgtggcactttatcctggagctgctgcggaaggaggagtaccagggcgtcattgcctggcagggggactacggggaattcgtcatcaaagaccctgatgaggtggcccggctgtggggcgttcgcaagtgcaagccccagatgaattacgacaagctgagccgggccctgcgctattactataacaagcgcattctgcacaagaccaaggggaaacggttcacctacaagttcaatttcaacaaactggtgctggtcaattacccattcattgatgtggggttggctgggggtgcagtgccccagagtgccccgccagtgccgtcgggtggtagccacttccgcttccctccctcaacgccctccgaggtgctgtcccccaccgaggacccccgctcaccaccagcctgctcttcatcttcatcttccctcttctcggctgtggtggcccgccgcctgggccgaggctcagtcagtgactgtagtgatggcacgtcagagctggaggaaccgctgggagaggatccccgcgcccgaccacccggccctccggatctgggtgccttccgagggcccccgctggcccgcctgccccatgaccctggtgtcttccgagtctatccccggcctcggggtggccctgaacccctcagccccttccctgtgtcgcctctggccggtcctggatccctgctgccccctcagctctccccggctctgcccatgacgcccacccacctggcctacactccctcgcccacgctgagcccgatgtaccccagtggtggcggggggcccagcggctcagggggaggctcccacttctccttcagccctgaggacatgaaacggtacctgcaggcccacacccaaagcgtctacaactaccacctcagcccccgcgccttcctgcactaccctgggctggtggtgccccagccccagcgccctgacaagtgcccgctgccgcccatggcacccgagaccccaccggtcccctcctcggcctcgtcatcctcttcttcttcttcctccccattcaagtttaagctccagcggcccccactcggacgccggcagcgggcagctggggagaaggccgtagccgctgctgacaagagcggtggcagtgcaggcgggctggctgagggggcaggggcgctagccccaccgcccccgccaccacagatcaaggtggagcccatctcggaaggcgagtcggaggaggtagaggtgactgacatcagtgatgaggatgaggaagacggggaggtgttcaagacgccccgtgccccacctgcaccccctaagcctgagcccggcgaggcacccggggcatcccagtgcatgcccctcaagctacgctttaagcggcgctggagtgaagactgtcgcctcgaagggggtgggggccccgctgggggctttgaggatgagggtgaggacaagaaggtgcgtggggaggggcctggggaggctggggggcccctcaccccaaggcgggtgagctctgacctccagcatgccacggcccagctctccctggagcaccgagactcctgagggctgtgggcaggggacctgtgtgccccgcaccccccatgcttcttttgctgccttaagccccctatgccctggaggtgagggcagctctcttgtctcttccctgcctcctcccttttccctccccacattttgtataaaactttaatttcttttttttaaaaatggtgggggtgggtgggtgcccagggctaggggctattccctgtctctgtgggtttctaagctctgggcaaattggtggtagggggagggagggggaagttaagggggtcacctccattctggggaatttatatttgaattgaggctttggccttaacacccaggaacttttctattacaatcgcttaggaagtaaagccttgtctccctccctgttctctgcctcttgtacccctctgacccacccgctctgccccactcccagccctcctcagccccagccctgcctgccctgcccctccagggggccatgagtgcctaggtttctcataccccacaaggtcacagcaggggagggagggacaattttataatgaaccaaaaattccatgtgttggggggtggggggcggaggagggtgaggggtgccgcccatgggccacaaatctctacaagtgcctgctatccctctcccactccccaccccagcaccggtccaaccccttcatccccagctgctcctaggactggcccatgggcaggcgggtggggggatgggaagggggtgccctgaaaccaaactggaagccccctctgcctcccagctggggcctctggggtggggtggggggctgtggtcaagccttattctgtattggggactgagggtggggggagtagaggggccgctggagaatgtattcaaaacaataaactttggacctttggaaaa

SEQ ID NO: 41 - protein, 548 aa, Homo sapiens
MKTPADTGFAFPDWAYKPESSPGSRQIQLWHFILELLRKEEYQGVIAWQGDYGEFVIKDPDEVARLWGVRKCKPQMNYDKLSRALRYYYNKRILHKTKGKRFTYKFNFNKLVLVNYPFIDVGLAGGAVPQSAPPVPSGGSHFRFPPSTPSEVLSPTEDPRSPPACSSSSSSLFSAVVARRLGRGSVSDCSDGTSELEEPLGEDPRARPPGPPDLGAFRGPPLARLPHDPGVFRVYPRPRGGPEPLSPFPVSPLAGPGSLLPPQLSPALPMTPTHLAYTPSPTLSPMYPSGGGGPSGSGGGSHFSFSPEDMKRYLQAHTQSVYNYHLSPRAFLHYPGLVVPQPQRPDKCPLPPMAPETPPVPSSASSSSSSSSSPFKFKLQRPPLGRRQRAAGEKAVAAADKSGGSAGGLAEGAGALAPPPPPPQIKVEPISEGESEEVEVTDISDEDEEDGEVFKTPRAPPAPPKPEPGEAPGASQCMPLKLRFKRRWSEDCRLEGGGGPAGGFEDEGEDKKVRGEGPGEAGGPLTPRRVSSDLQHATAQLSLEHRDS

SEQ ID NO: 42 - DNA, 13509 bp, Homo sapiens
ggggcatttccgggtccgggccgagcgggcgcacgcgcgggagcgggactcggcggcatggcgggctccggagccggtgtgcgttgctccctgctgcggctgcaggagaccttgtccgctgcggaccgctgcggtgctgccctggccggtcatcaactgatccgcggcctggggcaggaatgcgtcctgagcagcagccccgcggtgctggcattacagacatctttagttttttccagagatttcggtttgcttgtatttgtccggaagtcactcaacagtattgaatttcgtgaatgtagagaagaaatcctaaagtttttatgtattttcttagaaaaaatgggccagaagatcgcaccttactctgttgaaattaagaacacttgtaccagtgtttatacaaaagatagagctgctaaatgtaaaattccagccctggaccttcttattaagttacttcagacttttagaagttctagactcatggatgaatttaaaattggagaattatttagtaaattctatggagaacttgcattgaaaaaaaaaataccagatacagttttagaaaaagtatatgagctcctaggattattgggtgaagttcatcctagtgagatgataaataatgcagaaaacctgttccgcgcttttctgggtgaacttaagacccagatgacatcagcagtaagagagcccaaactacctgttctggcaggatgtctgaaggggttgtcctcacttctgtgcaacttcactaagtccatggaagaagatccccagacttcaagggagatttttaattttgtactaaaggcaattcgtcctcagattgatctgaagagatatgctgtgccctcagctggcttgcgcctatttgccctgcatgcatctcagtttagcacctgccttctggacaactacgtgtctctatttgaagtcttgttaaagtggtgtgcccacacaaatgtagaattgaaaaaagctgcactttcagccctggaatcctttctgaaacaggtttctaatatggtggcgaaaaatgcagaaatgcataaaaataaactgcagtactttatggagcagttttatggaatcatcagaaatgtggattcgaacaacaaggagttatctattgctatccgtggatatggactttttgcaggaccgtgcaaggttataaacgcaaaagatgttgacttcatgtacgttgagctcattcagcgctgcaagcagatgttcctcacccagacagacactggtgacgaccgtgtttatcagatgccaagcttcctccagtctgttgcaagcgtcttgctgtaccttgacacagttcctgaggtgtatactccagttctggagcacctcgtggtgatgcagatagacagtttcccacagtacagtccaaaaatgcagctggtgtgttgcagagccatagtgaaggtgttcctagctttggcagcaaaagggccagttctcaggaattgcattagtactgtggtgcatcagggtttaatcagaatatgttctaaaccagtggtccttccaaagggccctgagtctgaatctgaagaccaccgtgcttcaggggaagtcagaactggcaaatggaaggtgcccacatacaaagactacgtggatctcttcagacatctcctgagctctgaccagatgatggattctattttagcagatgaagcatttttctctgtgaattcctccagtgaaagtctgaatcatttactttatgatgaatttgtaaaatccgttttgaagattgttgagaaattggatcttacacttgaaatacagactgttggggaacaagagaatggagatgaggcgcctggtgtttggatgatcccaacttcagatccagcggctaacttgcatccagctaaacctaaagatttttcggctttcattaacctggtggaattttgcagagagattctccctgagaaacaagcagaattttttgaaccatgggtgtactcattttcatatgaattaattttgcaatctacaaggttgcccctcatcagtggtttctacaaattgctttctattacagtaagaaatgccaagaaaataaaatatttcgagggagttagtccaaagagtctgaaacactctcctgaagacccagaaaagtattcttgctttgctttatttgtgaaatttggcaaagaggtggcagttaaaatgaagcagtacaaagatgaacttttggcctcttgtttgacctttcttctgtccttgccacacaacatcattgaactcgatgttagagcctacgttcctgcactgcagatggctttcaaactgggcctgagctatacccccttggcagaagtaggcctgaatgctctagaagaatggtcaatttatattgacagacatgtaatgcagccttattacaaagacattctcccctgcctggatggatacctgaagacttcagccttgtcagatgagaccaagaataactgggaagtgtcagctctttctcgggctgcccagaaaggatttaataaagtggtgttaaagcatctgaagaagacaaagaacctttcatcaaacgaagcaatatccttagaagaaataagaattagagtagtacaaatgcttggatctctaggaggacaaataaacaaaaatcttctgacagtcacgtcctcagatgagatgatgaagagctatgtggcctgggacagagagaagcggctgagctttgcagtgccctttagagagatgaaacctgtcattttcctggatgtgttcctgcctcgagtcacagaattagcgctcacagccagtgacagacaaactaaagttgcagcctgtgaacttttacatagcatggttatgtttatgttgggcaaagccacgcagatgccagaagggggacagggagccccacccatgtaccagctctataagcggacgtttcctgtgctgcttcgacttgcgtgtgatgttgatcaggtgacaaggcaactgtatgagccactagttatgcagctgattcactggttcactaacaacaagaaatttgaaagtcaggatactgttgccttactagaagctatattggatggaattgtggaccctgttgacagtactttaagagatttttgtggtcggtgtattcgagaattccttaaatggtccattaagcaaataacaccacagcagcaggagaagagtccagtaaacaccaaatcgcttttcaagcgactttatagccttgcgcttcaccccaatgctttcaagaggctgggagcatcacttgcctttaataatatctacagggaattcagggaagaagagtctctggtggaacagtttgtgtttgaagccttggtgatatacatggagagtctggccttagcacatgcagatgagaagtccttaggtacaattcaacagtgttgtgatgccattgatcacctatgccgcatcattgaaaagaagcatgtttctttaaataaagcaaagaaacgacgtttgccgcgaggatttccaccttccgcatcattgtgtttattggatctggtcaagtggcttttagctcattgtgggaggccccagacagaatgtcgacacaaatccattgaactcttttataaattcgttcctttattgccaggcaacagatcccctaatttgtggctgaaagatgttctcaaggaagaaggtgtctcttttctcatcaacacctttgaggggggtggctgtggccagccctcgggcatcctggcccagcccaccctcttgtaccttcgggggccattcagcctgcaggccacgctatgctggctggacctgctcctggccgcgttggagtgctacaacacgttcattggcgagagaactgtaggagcgctccaggtcctaggtactgaagcccagtcttcacttttgaaagcagtggctttcttcttagaaagcattgccatgcatgacattatagcagcagaaaagtgctttggcactggggcagcaggtaacagaacaagcccacaagagggagaaaggtacaactacagcaaatgcaccgttgtggtccggattatggagtttaccacgactctgctaaacacctccccggaaggatggaagctcctgaagaaggacttgtgtaatacacacctgatgagagtcctggtgcagacgctgtgtgagcccgcaagcataggtttcaacatcggagacgtccaggttatggctcatcttcctgatgtttgtgtgaatctgatgaaagctctaaagatgtccccatacaaagatatcctagagacccatctgagagagaaaataacagcacagagcattgaggagctttgtgccgtcaacttgtatggccctgacgcgcaagtggacaggagcaggctggctgctgttgtgtctgcctgtaaacagcttcacagagctgggcttctgcataatatattaccgtctcagtccacagatttgcatcattctgttggcacagaacttctttccctggtttataaaggcattgcccctggagatgagagacagtgtctgccttctctagacctcagttgtaagcagctggccagcggacttctggagttagcctttgcttttggaggactgtgtgagcgccttgtgagtcttctcctgaacccagcggtgctgtccacggcgtccttgggcagctcacagggcagcgtcatccacttctcccatggggagtatttctatagcttgttctcagaaacgatcaacacggaattattgaaaaatctggatcttgctgtattggagctcatgcagtcttcagtggataataccaaaatggtgagtgccgttttgaacggcatgttagaccagagcttcagggagcgagcaaaccagaaacaccaaggactgaaacttgcgactacaattctgcaacactggaagaagtgtgattcatggtgggccaaagattcccctctcgaaactaaaatggcagtgctggccttactggcaaaaattttacagattgattcatctgtatcttttaatacaagtcatggttcattccctgaagtctttacaacatatattagtctacttgctgacacaaagctggatctacatttaaagggccaagctgtcactcttcttccattcttcaccagcctcactggaggcagtctggaggaacttagacgtgttctggagcagctcatcgttgctcacttccccatgcagtccagggaatttcctccaggaactccgcggttcaataattatgtggactgcatgaaaaagtttctagatgcattggaattatctcaaagccctatgttgttggaattgatgacagaagttctttgtcgggaacagcagcatgtcatggaagaattatttcaatccagtttcaggaggattgccagaaggggttcatgtgtcacacaagtaggccttctggaaagcgtgtatgaaatgttcaggaaggatgacccccgcctaagtttcacacgccagtcctttgtggaccgctccctcctcactctgctgtggcactgtagcctggatgctttgagagaattcttcagcacaattgtggtggatgccattgatgtgttgaagtccaggtttacaaagctaaatgaatctacctttgatactcaaatcaccaagaagatgggctactataagattctagacgtgatgtattctcgccttcccaaagatgatgttcatgctaaggaatcaaaaattaatcaagttttccatggctcgtgtattacagaaggaaatgaacttacaaagacattgattaaattgtgctacgatgcatttacagagaacatggcaggagagaatcagctgctggagaggagaagactttaccattgtgcagcatacaactgcgccatatctgtcatctgctgtgtcttcaatgagttaaaattttaccaaggttttctgtttagtgaaaaaccagaaaagaacttgcttatttttgaaaatctgatcgacctgaagcgccgctataattttcctgtagaagttgaggttcctatggaaagaaagaaaaagtacattgaaattaggaaagaagccagagaagcagcaaatggggattcagatggtccttcctatatgtcttccctgtcatatttggcagacagtaccctgagtgaggaaatgagtcaatttgatttctcaaccggagttcagagctattcatacagctcccaagaccctagacctgccactggtcgttttcggagacgggagcagcgggaccccacggtgcatgatgatgtgctggagctggagatggacgagctcaatcggcatgagtgcatggcgcccctgacggccctggtcaagcacatgcacagaagcctgggcccgcctcaaggagaagaggattcagtgccaagagatcttccttcttggatgaaattcctccatggcaaactgggaaatccaatagtaccattaaatatccgtctcttcttagccaagcttgttattaatacagaagaggtctttcgcccttacgcgaagcactggcttagccccttgctgcagctggctgcttctgaaaacaatggaggagaaggaattcactacatggtggttgagatagtggccactattctttcatggacaggcttggccactccaacaggggtccctaaagatgaagtgttagcaaatcgattgcttaatttcctaatgaaacatgtctttcatccaaaaagagctgtgtttagacacaaccttgaaattataaagacccttgtcgagtgctggaaggattgtttatccatcccttataggttaatatttgaaaagttttccggtaaagatcctaattctaaagacaactcagtagggattcaattgctaggcatcgtgatggccaatgacctgcctccctatgacccacagtgtggcatccagagtagcgaatacttccaggctttggtgaataatatgtcctttgtaagatataaagaagtgtatgccgctgcagcagaagttctaggacttatacttcgatatgttatggagagaaaaaacatactggaggagtctctgtgtgaactggttgcgaaacaattgaagcaacatcagaatactatggaggacaagtttattgtgtgcttgaacaaagtgaccaagagcttccctcctcttgcagacaggttcatgaatgctgtgttctttctgctgccaaaatttcatggagtgttgaaaacactctgtctggaggtggtactttgtcgtgtggagggaatgacagagctgtacttccagttaaagagcaaggacttcgttcaagtcatgagacatagagatgatgaaagacaaaaagtatgtttggacataatttataagatgatgccaaagttaaaaccagtagaactccgagaacttctgaaccccgttgtggaattcgtttcccatccttctacaacatgtagggaacaaatgtataatattctcatgtggattcatgataattacagagatccagaaagtgagacagataatgactcccaggaaatatttaagttggcaaaagatgtgctgattcaaggattgatcgatgagaaccctggacttcaattaattattcgaaatttctggagccatgaaactaggttaccttcaaataccttggaccggttgctggcactaaattccttatattctcctaagatagaagtgcactttttaagtttagcaacaaattttctgctcgaaatgaccagcatgagcccagattatccaaaccccatgttcgagcatcctctgtcagaatgcgaatttcaggaatataccattgattctgattggcgtttccgaagtactgttctcactccgatgtttgtggagacccaggcctcccagggcactctccagacccgtacccaggaagggtccctctcagctcgctggccagtggcagggcagataagggccacccagcagcagcatgacttcacactgacacagactgcagatggaagaagctcatttgattggctgaccgggagcagcactgacccgctggtcgaccacaccagtccctcatctgactccttgctgtttgcccacaagaggagtgaaaggttacagagagcacccttgaagtcagtggggcctgattttgggaaaaaaaggctgggccttccaggggacgaggtggataacaaagtgaaaggtgcggccggccggacggacctactacgactgcgcagacggtttatgagggaccaggagaagctcagtttgatgtatgccagaaaaggcgttgctgagcaaaaacgagagaaggaaatcaagagtgagttaaaaatgaagcaggatgcccaggtcgttctgtacagaagctaccggcacggagaccttcctgacattcagatcaagcacagcagcctcatcaccccgttacaggccgtggcccagagggacccaataattgcaaaacagctctttagcagcttgttttctggaattttgaaagagatggataaatttaagacactgtctgaaaaaaacaacatcactcaaaagttgcttcaagacttcaatcgttttcttaataccaccttctctttctttccaccctttgtctcttgtattcaggacattagctgtcagcacgcagccctgctgagcctcgacccagcggctgttagcgctggttgcctggccagcctacagcagcccgtgggcatccgcctgctagaggaggctctgctccgcctgctgcctgctgagctgcctgccaagcgagtccgtgggaaggcccgcctccctcctgatgtcctcagatgggtggagcttgctaagctgtatagatcaattggagaatacgacgtcctccgtgggatttttaccagtgagataggaacaaagcaaatcactcagagtgcattattagcagaagccagaagtgattattctgaagctgctaagcagtatgatgaggctctcaataaacaagactgggtagatggtgagcccacagaagccgagaaggatttttgggaacttgcatcccttgactgttacaaccaccttgctgagtggaaatcacttgaatactgttctacagccagtatagacagtgagaaccccccagacctaaataaaatctggagtgaaccattttatcaggaaacatatctaccttacatgatccgcagcaagctgaagctgctgctccagggagaggctgaccagtccctgctgacatttattgacaaagctatgcacggggagctccagaaggcgattctagagcttcattacagtcaagagctgagtctgctttacctcctgcaagatgatgttgacagagccaaatattacattcaaaatggcattcagagttttatgcagaattattctagtattgatgtcctcttacaccaaagtagactcaccaaattgcagtctgtacaggctttaacagaaattcaggagttcatcagctttataagcaaacaaggcaatttatcatctcaagttccccttaagagacttctgaacacctggacaaacagatatccagatgctaaaatggacccaatgaacatctgggatgacatcatcacaaatcgatgtttctttctcagcaaaatagaggagaagcttacccctcttccagaagataatagtatgaatgtggatcaagatggagaccccagtgacaggatggaagtgcaagagcaggaagaagatatcagctccctgatcaggagttgcaagttttccatgaaaatgaagatgatagacagtgcccggaagcagaacaatttctcacttgctatgaaactactgaaggagctgcataaagagtcaaaaaccagagacgattggctggtgagctgggtgcagagctactgccgcctgagccactgccggagccggtcccagggctgctctgagcaggtgctcactgtgctgaaaacagtctctttgttggatgagaacaacgtgtcaagctacttaagcaaaaatattctggctttccgtgaccagaacattctcttgggtacaacttacaggatcatagcgaatgctctcagcagtgagccagcctgccttgctgaaatcgaggaggacaaggctagaagaatcttagagctttctggatccagttcagaggattcagagaaggtgatcgcgggtctgtaccagagagcattccagcacctctctgaggctgtgcaggcggctgaggaggaggcccagcctccctcctggagctgtgggcctgcagctggggtgattgatgcttacatgacgctggcagatttctgtgaccaacagctgcgcaaggaggaagagaatgcatcagttattgattctgcagaactgcaggcgtatccagcacttgtggtggagaaaatgttgaaagctttaaaattaaattccaatgaagccagattgaagtttcctagattacttcagattatagaacggtatccagaggagactttgagcctcatgacaaaagagatctcttccgttccctgctggcagttcatcagctggatcagccacatggtggccttactggacaaagaccaagccgttgctgttcagcactctgtggaagaaatcactgataactacccgcaggctattgtttatcccttcatcataagcagcgaaagctattccttcaaggatacttctactggtcataagaataaggagtttgtggcaaggattaaaagtaagttggatcaaggaggagtgattcaagattttattaatgccttagatcagctctctaatcctgaactgctctttaaggattggagcaatgatgtaagagctgaactagcaaaaacccctgtaaataaaaaaaacattgaaaaaatgtatgaaagaatgtatgcagccttgggtgacccaaaggctccaggcctgggggcctttagaaggaagtttattcagacttttggaaaagaatttgataaacattttgggaaaggaggttctaaactactgagaatgaagctcagtgacttcaacgacattaccaacatgctacttttaaaaatgaacaaagactcaaagccccctgggaatctgaaagaatgttcaccctggatgagcgacttcaaagtggagttcctgagaaatgagctggagattcccggtcagtatgacggtaggggaaagccattgccagagtaccacgtgcgaatcgccgggtttgatgagcgggtgacagtcatggcgtctctgcgaaggcccaagcgcatcatcatccgtggccatgacgagagggaacaccctttcctggtgaagggtggcgaggacctgcggcaggaccagcgcgtggagcagctcttccaggtcatgaatgggatcctggcccaagactccgcctgcagccagagggccctgcagctgaggacctatagcgttgtgcccatgacctccaggttaggattaattgagtggcttgaaaatactgttaccttgaaggaccttcttttgaacaccatgtcccaagaggagaaggcggcttacctgagtgatcccagggcaccgccgtgtgaatataaagattggctgacaaaaatgtcaggaaaacatgatgttggagcttacatgctaatgtataagggcgctaatcgtactgaaacagtcacgtcttttagaaaacgagaaagtaaagtgcctgctgatctcttaaagcgggccttcgtgaggatgagtacaagccctgaggctttcctggcgctccgctcccacttcgccagctctcacgctctgatatgcatcagccactggatcctcgggattggagacagacatctgaacaactttatggtggccatggagactggcggcgtgatcgggatcgactttgggcatgcgtttggatccgctacacagtttctgccagtccctgagttgatgccttttcggctaactcgccagtttatcaatctgatgttaccaatgaaagaaacgggccttatgtacagcatcatggtacacgcactccgggccttccgctcagaccctggcctgctcaccaacaccatggatgtgtttgtcaaggagccctcctttgattggaaaaattttgaacagaaaatgctgaaaaaaggagggtcatggattcaagaaataaatgttgctgaaaaaaattggtacccccgacagaaaatatgttacgctaagagaaagttagcaggtgccaatccagcagtcattacttgtgatgagctactcctgggtcatgagaaggcccctgccttcagagactatgtggctgtggcacgaggaagcaaagatcacaacattcgtgcccaagaaccagagagtgggctttcagaagagactcaagtgaagtgcctgatggaccaggcaacagaccccaacatccttggcagaacctgggaaggatgggagccctggatgtgaggtctgtgggagtctgcagatagaaagcattacattgtttaaagaatctactatactttggttggcagcattccatgagctgattttcctgaaacactaaagagaaatgtcttttgtgctacagtttcgtagcatgagtttaaatcaagattatgatgagtaaatgtgtatgggttaaatcaaagataaggttatagtaacatcaaagattaggtgaggtttatagaaagatagatatccaggcttaccaaagtattaagtcaagaatataatatgtgatcagctttcaaagcatttacaagtgctgcaagttagtgaaacagctgtctccgtaaatggaggaaatgtggggaagccttggaatgcccttctggttctggcacattggaaagcacactcagaaggcttcatcaccaagattttgggagagtaaagctaagtatagttgatgtaacattgtagaagcagcataggaacaataagaacaataggtaaagctataattatggcttatatttagaaatgactgcatttgatattttaggatatttttctaggttttttcctttcattttattctcttctagttttgacattttatgatagatttgctctctagaaggaaacgtctttatttaggagggcaaaaattttggtcatagcattcacttttgctattccaatctacaactggaagatacataaaagtgctttgcattgaatttgggataacttcaaaaatcccatggttgttgttagggatagtactaagcatttcagttccaggagaataaaagaaattcctatttgaaatgaattcctcatttggaggaaaaaaagcatgcattctagcacaacaagatgaaattatggaatacaaaagtggctccttcccatgtgcagtccctgtccccccccgccagtcctccacacccaaactgtttctgattggcttttagctttttgttgtttttttttttccttctaacacttgtatttggaggctcttctgtgattttgagaagtatactcttgagtgtttaataaagtttttttccaaaagta

SEQ ID NO: 43 - protein, 4128 aa, Homo sapiens [sequence omitted]

SEQ ID NO: 44 - DNA, 2444 bp, Homo sapiens
ggcacgaggcggggccgggtcgcagctgggcccgcggcatggacgaactgttccccctcatcttcccggcagagcagcccaagcagcggggcatgcgcttccgctacaagtgcgaggggcgctccgcgggcagcatcccaggcgagaggagcacagataccaccaagacccaccccaccatcaagatcaatggctacacaggaccagggacagtgcgcatctccctggtcaccaaggaccctcctcaccggcctcacccccacgagcttgtaggaaaggactgccgggatggcttctatgaggctgagctctgcccggaccgctgcatccacagtttccagaacctgggaatccagtgtgtgaagaagcgggacctggagcaggctatcagtcagcgcatccagaccaacaacaaccccttccaagttcctatagaagagcagcgtggggactacgacctgaatgctgtgcggctctgcttccaggtgacagtgcgggacccatcaggcaggcccctccgcctgccgcctgtcctttctcatcccatctttgacaatcgtgcccccaacactgccgagctcaagatctgccgagtgaaccgaaactctggcagctgcctcggtggggatgagatcttcctactgtgtgacaaggtgcagaaagaggacattgaggtgtatttcacgggaccaggctgggaggcccgaggctccttttcgcaagctgatgtgcaccgacaagtggccattgtgttccggacccctccctacgcagaccccagcctgcaggctcctgtgcgtgtctccatgcagctgcggcggccttccgaccgggagctcagtgagcccatggaattccagtacctgccagatacagacgatcgtcaccggattgaggagaaacgtaaaaggacatatgagaccttcaagagcatcatgaagaagagtcctttcagcggacccaccgacccccggcctccacctcgacgcattgctgtgccttcccgcagctcagcttctgtccccaagccagcaccccagccctatccctttacgtcatccctgagcaccatcaactatgatgagtttcccaccatggtgtttccttctgggcagatcagccaggcctcggccttggccccggcccctccccaagtcctgccccaggctccagcccctgcccctgctccagccatggtatcagctctggcccaggccccagcccctgtcccagtcctagccccaggccctcctcaggctgtggccccacctgcccccaagcccacccaggctggggaaggaacgctgtcagaggccctgctgcagctgcagtttgatgatgaagacctgggggccttgcttggcaacagcacagacccagctgtgttcacagacctggcatccgtcgacaactccgagtttcagcagctgctgaaccagggcatacctgtggccccccacacaactgagcccatgctgatggagtaccctgaggctataactcgcctagtgacagcccagaggccccccgacccagctcctgctccactgggggccccggggctccccaatggcctcctttcaggagatgaagacttctcctccattgcggacatggacttctcagccctgctgagtcagatcagctcctaagggggtgacgcctgccctccccagagcactggttgcaggggattgaagccctccaaaagcacttacggattctggtggggtgtgttccaactgcccccaactttgtggatgtcttccttggaggggggagccatattttattcttttattgtcagtatctgtatctctctctctttttggaggtgcttaagcagaagcattaacttctctggaaaggggggagctggggaaactcaaacttttcccctgtcctgatggtcagctcccttctctgtagggaactgtggggtcccccatccccatcctccagcttctggtactctcctagagacagaagcaggctggaggtaaggcctttgagcccacaaagccttatcaagtgtcttccatcatggattcattacagcttaatcaaaataacgccccagataccagcccctgtatggcactggcattgtccctgtgcctaacaccagcgtttgaggggctgccttcctgccctacagaggtctctgccggctctttccttgctcaaccatggctgaaggaaacagtgcaacagcactggctctctccaggatccagaaggggtttggtctggacttccttgctctcccctcttctcaagtgccttaatagtagggtaagttgttaagagtgggggagagcaggctggcagctctccagtcaggaggcatagtttttagtgaacaatcaaagcacttggactcttgctctttctactctgaactaataaagctgttgccaagctggacggcacgagctcgtgcc

SEQ ID NO: 45 - protein, 537 aa, Homo sapiens
MDELFPLIFPAEQPKQRGMRFRYKCEGRSAGSIPGERSTDTTKTHPTIKINGYTGPGTVRISLVTKDPPHRPHPHELVGKDCRDGFYEAELCPDRCIHSFQNLGIQCVKKRDLEQAISQRIQTNNNPFQVPIEEQRGDYDLNAVRLCFQVTVRDPSGRPLRLPPVLSHPIFDNRAPNTAELKICRVNRNSGSCLGGDEIFLLCDKVQKEDIEVYFTGPGWEARGSFSQADVHRQVAIVFRTPPYADPSLQAPVRVSMQLRRPSDRELSEPMEFQYLPDTDDRHRIEEKRKRTYETFKSIMKKSPFSGPTDPRPPPRRIAVPSRSSASVPKPAPQPYPFTSSLSTINYDEFPTMVFPSGQISQASALAPAPPQVLPQAPAPAPAPAMVSALAQAPAPVPVLAPGPPQAVAPPAPKPTQAGEGTLSEALLQLQFDDEDLGALLGNSTDPAVFTDLASVDNSEFQQLLNQGIPVAPHTTEPMLMEYPEAITRLVTAQRPPDPAPAPLGAPGLPNGLLSGDEDFSSIADMDFSALLSQISS

SEQ ID NO: 46 - DNA, 1462 bp, Homo sapiens
ggcaagcgccggtggggcggcggcgccagagctgctggagcgctcggggtccccgggcggcggcggcggcgcagaggaggaggcaggcggcggccccggtggctcccccccggacggtgcgcggcccggcccgtctcgcgaactcgcggtggtcgcgcggccccgcgctgctccgaccccgggcccctccgccgccgccatggctcggccgctagtgcccagctcgcagaaggcgctgctgctggagctcaaggggctgcaggaagagccggtcgagggattccgcgtgacactggtggacgagggcgatctatacaactgggaggtggccatcttcgggccccccaacacctactacgagggcggctacttcaaggcgcgcctcaagttccccatcgactacccatactctccaccagcctttcggttcctgaccaagatgtggcaccctaacatctacgagacgggggacgtgtgtatctccatcctccacccgccggtggacgacccccagagcggggagctgccctcagagaggtggaaccccacgcagaacgtcaggaccattctcctgagtgtgatctccctcctgaacgagcccaacaccttctcgcccgcaaacgtggacgcctccgtgatgtacaggaagtggaaagagagcaaggggaaggatcgggagtacacagacatcatccggaagcaggtcctggggaccaaggtggacgcggagcgtgacggcgtgaaggtgcccaccacgctggccgagtactgcgtgaagaccaaggcgccggcgcccgacgagggctcagacctcttctacgacgactactacgaggacggcgaggtggaggaggaggccgacagctgcttcggggacgatgaggatgactctggcacggaggagtcctgacaccaccagaataaacttgccgagtttacctcactagggccggacccgtggctccttagacgacagactacctcacggaggttttgtgctggtccccgtctcctctggttgtttcgttttggctttttctccctccccatgtctgttctgggttttcacgtgcttcagagaagaggggctgccccaccgccactcacgtcactcggggctcggtggacgggcccagggtgggagcggccggcccacctgtcccctcgggaggggagctgagcccgacttctaccggggtcccccagcttccggactggccgcaccccggaggagccacgggggcgctgctgggaacgtgggcggggggccgtttcctgacactaccagcctgggaggcccaggtgtagcggtccgaggggcccggtcctgcctgtcagctccaggtcctggagccacgtccagcacagagtggacggattcaccgtggccgactcttttccctgctttggtttgtttgaaatctaaataaaactactttatgagaaaaaaaaaaaaaaaaaa

SEQ ID NO: 47 - protein, 236 aa, Homo sapiens
MARPLVPSSQKALLLELKGLQEEPVEGFRVTLVDEGDLYNWEVAIFGPPNTYYEGGYFKARLKFPIDYPYSPPAFRFLTKMWHPNIYETGDVCISILHPPVDDPQSGELPSERWNPTQNVRTILLSVISLLNEPNTFSPANVDASVMYRKWKESKGKDREYTDIIRKQVLGTKVDAERDGVKVPTTLAEYCVKTKAPAPDEGSDLFYDDYYEDGEVEEEADSCFGDDEDDSGTEES

SEQ ID NO: 48 - DNA, 1439 bp, Homo sapiens
ggctcgcctcggcgtgcagtgcgcgtgcgtggagctgggagctaggtcctcggagtgggccggagatggcggcggccgacggggctttgccggaggcggcggctttagagcaacccgcggagctgcctgcctcggtgcgggcgagtatcgagcggaagcggcagcgggcactgatgctgcgccaggcccggctggctgcccggccctactcggcgacggcggctgcggctactggaggcatggctaatgtaaaagcagccccaaagataattgacacaggaggaggcttcattttagaagaggaagaagaagaagaacagaaaattggaaaagttgttcatcaaccaggacctgttatggaatttgattatgtaatatgcgaagaatgtgggaaagaatttatggattcttatcttatgaaccactttgatttgccaacttgtgataactgcagagatgctgatgataaacacaagcttataaccaaaacagaggcaaaacaagaatatcttctgaaagactgtgatttagaaaaaagagagccacctcttaaatttattgtgaagaagaatccacatcattcacaatggggtgatatgaaactctacttaaagttacagattgtgaagaggtctcttgaagtttggggtagtcaagaagcattagaagaagcaaaggaagtccgacaggaaaaccgagaaaaaatgaaacagaagaaatttgataaaaaagtaaaagaattgcggcgagcagtaagaagcagcgtgtggaaaagggagacgattgttcatcaacatgagtatggaccagaagaaaacctagaagatgacatgtaccgtaagacttgtactatgtgtggccatgaactgacatatgaaaaaatgtgattttttagttcagtgacctgttttatagaattttatatttaaataaaggaaatttagattggtccttttcaaaattcaaaaaaaaaagcaacatcttcatagatgaatgaaacccttgtataagtaatacttcagtaataattatgtatgttatggcttaaaagcaagtttcagtgaaggtcacctggcctggttgtgtgcacaatgtcatgtctgtgattgccttcttacaacagagatgggagctgagtgctagagtaggtgcagaagtggtaggtcagctacaaatttgaggacaagataccaaggcaaaccctagattggggtagagggaaaagggttcaacaaaggctgaactggattcttaaccaagaaacaaataatagcaatggtggtgcaccactgtaccccaggttctagtcatgtgttttttaggacgatttctgtctccacgatggtggaaacagtggggaactactgctggaaaaagccctaatagcagaaataaacattgagttgtacgagtctgaaaaaaaaaaaaaaaaaaaaaaa

SEQ ID NO: 49 - protein, 273 aa, Homo sapiens
MAAADGALPEAAALEQPAELPASVRASIERKRQRALMLRQARLAARPYSATAAAATGGMANVKAAPKIIDTGGGFILEEEEEEEQKIGKVVHQPGPVMEFDYVICEECGKEFMDSYLMNHFDLPTCDNCRDADDKHKLITKTEAKQEYLLKDCDLEKREPPLKFIVKKNPHHSQWGDMKLYLKLQIVKRSLEVWGSQEALEEAKEVRQENREKMKQKKFDKKVKELRRAVRSSVWKRETIVHQHEYGPEENLEDDMYRKTCTMCGHELTYEKM

SEQ ID NO: 50 - DNA, 986 bp, Homo sapiens
tgcgaacggcgagcagcggcggcggcgcggagagacgcagcggaggttttcctggtttcggaccccagcggccggatggtgaaatcctccctgcagcggatcctcaatagccactgcttcgccagagagaaggaaggggataaacccagcgccaccatccacgccagccgcaccatgccgctccttagcctgcacagccgcggcggcagcagcagtgagagttccagggtctccctccactgctgtagtaacccgggtccggggcctcggtggtgctcctgatgcccctcacccacccctgaagatcccaggtgggcgagggaatagtcagagggatcacaatctttcagctaacttattctactccgatgatcggctgaatgtaacagaggaactaacgtccaacgacaagacgaggattctcaacgtccagtccaggctcacagacgccaaacgcattaactggcgaacagtgctgagtggcggcagcctctacatcgagatcccgggcggcgcgctgcccgaggggagcaaggacagctttgcagttctcctggagttcgctgaggagcagctgcgagccgaccatgtcttcatttgcttccacaagaaccgcgaggacagagccgccttgctccgaaccttcagctttttgggctttgagattgtgagaccggggcatccccttgtccccaagagacccgacgcttgcttcatggcctacacgttcgagagagagtcttcgggagaggaggaggagtagggccgcctcggggctgggcatccggcccctggggccaccccttgtcagccgggtgggtaggaaccgtagactcgctcatctcgcctgggtttgtccgcatgttgtaatcgtgcaaataaacgctcactccgaattagcggtgtatttcttgaagtttaatattgtgtttgtgatactgaagtatttgctttaattctaaataaaaatttatattttacttttt

SEQ ID NO: 51 - protein, 228 aa, Homo sapiens
MVKSSLQRILNSHCFAREKEGDKPSATIHASRTMPLLSLHSRGGSSSESSRVSLHCCSNPGPGPRWCSDAPHPPLKIPGGRGNSQRDHNLSANLFYSDDRLNVTEELTSNDKTRILNVQSRLTDAKRINWRTVLSGGSLYIEIPGGALPEGSKDSFAVLLEFAEEQLRADHVFICFHKNREDRAALLRTFSFLGFEIVRPGHPLVPKRPDACFMAYTFERESSGEEEE

SEQ ID NO: 52 - DNA, 2422 bp, Homo sapiens
ggcacgaggctcgcactcacacccgggcgcaggaggcgggcggcccgggccccaccggccccccatggacgcccccagcacggggcgctgagacccccgcgtcgctgcccagcccggtccggcgcgccacgccgagggatctctggacaggacaagactccgaagctactcccccagcacacagcccgggacccacaaacccagcttgcccccagccctcccacctgccactccctggcccctcccaccgcccgccccccttggggcgcagggcatggtgtgaaaggccaagtgctgaggcgggtatcatgggtgctgtgccctagggcctgggtggcagggggtgggtggcctgtgggtgtgccgggggggccagtgtgcccaccccagtctcttggcgtgctggagggcatcctggatggaattgaagtgaatggaacagaagccaagcaaggtggagtgtgggtcagacccagaggagaacagtgccaggtcaccagatggaaagcgaaaaagaaagaacggccaatgttccctgaaaaccagcatgtcagggtatatccctagttacctggacaaagacgagcagtgtgtcgtgtgtggggacaaggcaactggttatcactaccgctgtatcacttgtgagggctgcaagggcttctttcgccgcacaatccagaagaacctccatcccacctattcctgcaaatatgacagctgctgtgtcattgacaagatcacccgcaatcagtgccagctgtgccgcttcaagaagtgcatcgccgtgggcatggccatggacttggttctagatgactcgaagcgggtggccaagcgtaagctgattgagcagaaccgggagcggcggcggaaggaggagatgatccgatcactgcagcagcgaccagagcccactcctgaagagtgggatctgatccacattgccacagaggcccatcgcagcaccaatgcccagggcagccattggaaacagaggcggaaattcctgcccgatgacattggccagtcacccattgtctccatgccggacggagacaaggtggacctggaagccttcagcgagtttaccaagatcatcaccccggccatcacccgtgtggtggactttgccaaaaaactgcccatgttctccgagctgccttgcgaagaccagatcatcctcctgaaggggtgctgcatggagatcatgtccctgcgggcggctgtccgctacgaccctgagagcgacaccctgacgctgagtggggagatggctgtcaagcgggagcagctcaagaatggcggcctgggcgtagtctccgacgccatctttgaactgggcaagtcactctctgcctttaacctggatgacacggaagtggctctgctgcaggctgtgctgctaatgtcaacagaccgctcgggcctgctgtgtgtggacaagatcgagaagagtcaggaggcgtacctgctggcgttcgagcactacgtcaaccaccgcaaacacaacattccgcacttctggcccaagctgctgatgaaggagagagaagtgcagagttcgattctgtacaagggggcagcggcagaaggccggccgggcgggtcactgggcgtccacccggaaggacagcagcttctcggaatgcatgttgttcagggtccgcaggtccggcagcttgagcagcagcttggtgaagcgggaagtctccaagggccggttcttcagcaccagagcccgaagagcccgcagcagcgtctcctggagctgctccaccgaagcggaattctccatgcccgagcggtctgtggggaagacgacagcagtgaggcggactccccgagctcctctgaggaggaaccggaggtctgcgaggacctggcaggcaatgcagcctctccctgaagccccccagaaggccgatggggaaggagaaggagtgccataccttctcccaggcctctgccccaagagcaggaggtgcctgaaagctgggagcgtgggctcagcagggctggtcacctcccatcccgtaagaccaccttcccttcctcagcaggccaaacatggccagactcccttgctttttgctgtgtagttccctctgcctgggatgcccttccccctttctctgcctggcaacatcttacttgtcctttgaggccccaactcaagtgtcacctccttccccagctcccccaggcagaaatagttgtctgtgcttccttggttcatgcttctactgtgacacttatctcactgttttataattagtcgggcatgagtctgtttcccaagctagactgtgtctgaatcatgtctgtatccccagtgcccggtgcagggcctggcatagagtaggtactccataaaaggtgtgttgaattgaaaaaaaaaaaaaaaaaaaaaaaaaaaaaaaaa

SEQ ID NO: 53 - protein, 490 aa, Homo sapiens
MEQKPSKVECGSDPEENSARSPDGKRKRKNGQCSLKTSMSGYIPSYLDKDEQCVVCGDKATGYHYRCITCEGCKGFFRRTIQKNLHPTYSCKYDSCCVIDKITRNQCQLCRFKKCIAVGMAMDLVLDDSKRVAKRKLIEQNRERRRKEEMIRSLQQRPEPTPEEWDLIHIATEAHRSTNAQGSHWKQRRKFLPDDIGQSPIVSMPDGDKVDLEAFSEFTKIITPAITRVVDFAKKLPMFSELPCEDQIILLKGCCMEIMSLRAAVRYDPESDTLTLSGEMAVKREQLKNGGLGVVSDAIFELGKSLSAFNLDDTEVALLQAVLLMSTDRSGLLCVDKIEKSQEAYLLAFEHYVNHRKHNIPHFWPKLLMKEREVQSSILYKGAAAEGRPGGSLGVHPEGQQLLGMHVVQGPQVRQLEQQLGEAGSLQGPVLQHQSPKSPQQRLLELLHRSGILHARAVCGEDDSSEADSPSSSEEEPEVCEDLAGNAASP

SEQ ID NO: 54 - DNA, 1990 bp, Homo sapiens
gaattccgggggtattggcagctgaggagtggaggctgggcagctccgactccctgacgccagcgcgaccagatcaatccaggctccaggagaaagcaggcgggcgggcggagaaaggagaggccgagcggctcaacccgggccgaggctcggggagcggagagtggcgcaccgcccggccgtccggacccgggccgcgagaccccgctcgcccggccactcgtgctcccgcacggacgggcgcgccgccaacccggtgctgactgggttacttttttaaacactaggaatggtaatttctactcttctggacttcaaactaagaagttaaagagacttctctgtaaataaacaaatctcttctgctgtccttttgcatttggagacagctttatttcaccatatccaaggagtataactagtgctgtcattatgaatgtgacaagtttattttcctttacaagtccagctgtgaagagacttcttgggtggaaacagggcgatgaagaagaaaaatgggcagagaaagctgttgatgctttggtgaaaaaactgaagaaaaagaaaggtgccatggaggaactggaaaaggccttgagctgcccagggcaaccgagtaactgtgtcaccattccccgctctctggatggcaggctgcaagtctcccaccggaagggactgcctcatgtcatttactgccgtgtgtggcgctggcccgatcttcagagccaccatgaactaaaaccactggaatgctgtgagtttccttttggttccaagcagaaggaggtctgcatcaatccctaccactataagagagtagaaagccctgtacttcctcctgtgctggttccaagacacagcgaatataatcctcagcacagcctcttagctcagttccgtaacttaggacaaaatgagcctcacatgccactcaacgccacttttccagattctttccagcaacccaacagccacccgtttcctcactctcccaatagcagttacccaaactctcctgggagcagcagcagcacctaccctcactctcccaccagctcagacccaggaagccctttccagatgccagctgatacgcccccacctgcttacctgcctcctgaagaccccatgacccaggatggctctcagccgatggacacaaacatgatggcgcctcccctgccctcagaaatcaacagaggagatgttcaggcggttgcttatgaggaaccaaaacactggtgctctattgtctactatgagctcaacaatcgtgtgggtgaagcgttccatgcctcctccacaagtgtgttggtggatggtttcactgatccttccaacaataagaaccgtttctgccttgggctgctctccaatgttaaccggaattccactattgaaaacaccaggcggcatattggaaaaggagttcatctttattatgttggaggggaggtgtatgccgaatgccttagtgacagtagcatctttgtgcaaagtcggaactgcaactaccatcatggatttcatcctactactgtttgcaagatccctagtgggtgtagtctgaaaatttttaacaaccaagaatttgctcagttattggcacagtctgtgaaccatggatttgagacagtctatgagcttacaaaaatgtgtactatacgtatgagctttgtgaagggctggggagcagaataccaccgccaggatgttactagcaccccctgctggattgagatacatctgcacggccccctccagtggctggataaagttcttactcaaatgggttcacctcataatcctatttcatctgtatcttaaatggccccagcatctgcctctggaaaactattgagccttgcatgtacttgaaggatggatgagtcagacacgattgagaactgacaaaggagccttgataatacttgacctctgtgaccaactgttggattcagaaatttaaacaaaaaaaaaaaaaaaa

SEQ ID NO: 55 - protein, 465 aa, Homo sapiens
MNVTSLFSFTSPAVKRLLGWKQGDEEEKWAEKAVDALVKKLKKKKGAMEELEKALSCPGQPSNCVTIPRSLDGRLQVSHRKGLPHVIYCRVWRWPDLQSHHELKPLECCEFPFGSKQKEVCINPYHYKRVESPVLPPVLVPRHSEYNPQHSLLAQFRNLGQNEPHMPLNATFPDSFQQPNSHPFPHSPNSSYPNSPGSSSSTYPHSPTSSDPGSPFQMPADTPPPAYLPPEDPMTQDGSQPMDTNMMAPPLPSEINRGDVQAVAYEEPKHWCSIVYYELNNRVGEAFHASSTSVLVDGFTDPSNNKNRFCLGLLSNVNRNSTIENTRRHIGKGVHLYYVGGEVYAECLSDSSIFVQSRNCNYHHGFHPTTVCKIPSGCSLKIFNNQEFAQLLAQSVNHGFETVYELTKMCTIRMSFVKGWGAEYHRQDVTSTPCWIEIHLHGPLQWLDKVLTQMGSPHNPISSVS

SEQ ID NO: 56 - DNA, 3945 bp, Homo sapiens
cgtccacccgcccagggagagtcagacctgggggggcgagggccccccaaactcagttcggatcctacccgagtgaggcggcgccatggagctccgggtgctgctctgctgggcttcgttggccgcagctttggaagagaccctgctgaacacaaaattggaaactgctgatctgaagtgggtgacattccctcaggtggacgggcagtgggaggaactgagcggcctggatgaggaacagcacagcgtgcgcacctacgaagtgtgtgaagtgcagcgtgccccgggccaggcccactggcttcgcacaggttgggtcccacggcggggcgccgtccacgtgtacgccacgctgcgcttcaccatgctcgagtgcctgtccctgcctcgggctgggcgctcctgcaaggagaccttcaccgtcttctactatgagagcgatgcggacacggccacggccctcacgccagcctggatggagaacccctacatcaaggtggacacggtggccgcggagcatctcacccggaagcgccctggggccgaggccaccgggaaggtgaatgtcaagacgctgcgtctgggaccgctcagcaaggctggcttctacctggccttccaggaccagggtgcctgcatggccctgctatccctgcacctcttctacaaaaagtgcgcccagctgactgtgaacctgactcgattcccggagactgtgcctcgggagctggttgtgcccgtggccggtagctgcgtggtggatgccgtccccgcccctggccccagccccagcctctactgccgtgaggatggccagtgggccgaacagccggtcacgggctgcagctgtgctccggggttcgaggcagctgaggggaacaccaagtgccgagcctgtgcccagggcaccttcaagcccctgtcaggagaagggtcctgccagccatgcccagccaatagccactctaacaccattggatcagccgtctgccagtgccgcgtcgggtacttccgggcacgcacagacccccggggtgcaccctgcaccacccctccttcggctccgcggagcgtggtttcccgcctgaacggctcctccctgcacctggaatggagtgcccccctggagtctggtggccgagaggacctcacctacgccctccgctgccgggagtgccgacccggaggctcctgtgcgccctgcgggggagacctgacttttgaccccggcccccgggacctggtggagccctgggtggtggttcgagggctacgtccggacttcacctatacctttgaggtcactgcattgaacggggtatcctccttagccacggggcccgtcccatttgagcctgtcaatgtcaccactgaccgagaggtacctcctgcagtgtctgacatccgggtgacgcggtcctcacccagcagcttgagcctggcctgggctgttccccgggcacccagtggggcgtggctggactacgaggtcaaataccatgagaagggcgccgagggtcccagcagcgtgcggttcctgaagacgtcagaaaaccgggcagagctgcgggggctgaagcggggagccagctacctggtgcaggtacgggcgcgctctgaggccggctacgggcccttcggccaggaacatcacagccagacccaactggatgagagcgagggctggcgggagcagctggccctgattgcgggcacggcagtcgtgggtgtggtcctggtcctggtggtcattgtggtcgcagttctctgcctcaggaagcagagcaatgggagagaagcagaatattcggacaaacacggacagtatctcatcggacatggtactaaggtctacatcgaccccttcacttatgaagaccctaatgaggctgtgagggaatttgcaaaagagatcgatgtctcctacgtcaagattgaagaggtgattggtgcaggtgagtttggcgaggtgtgccgggggcggctcaaggccccagggaagaaggagagctgtgtggcaatcaagaccctgaagggtggctacacggagcggcagcggcgtgagtttctgagcgaggcctccatcatgggccagttcgagcaccccaatatcatccgcctggagggcgtggtcaccaacagcatgcccgtcatgattctcacagagttcatggagaacggcgccctggactccttcctgcggctaaacgacggacagttcacagtcatccagctcgtgggcatgctgcggggcatcgcctcgggcatgcggtaccttgccgagatgagctacgtccaccgagacctggctgctcgcaacatcctagtcaacagcaacctcgtctgcaaagtgtctgactttggcctttcccgattcctggaggagaactcttccgatcccacctacacgagctccctgggaggaaagattcccatccgatggactgccccggaggccattgccttccggaagttcacttccgccagtgatgcctggagttacgggattgtgatgtgggaggtgatgtcatttggggagaggccgtactgggacatgagcaatcaggacgtgatcaatgccattgaacaggactaccggctgcccccgcccccagactgtcccacctccctccaccagctcatgctggactgttggcagaaagaccggaatgcccggccccgcttcccccaggtggtcagcgccctggacaagatgatccggaaccccgccagcctcaaaatcgtggcccgggagaatggcggggcctcacaccctctcctggaccagcggcagcctcactactcagcttttggctctgtgggcgagtggcttcgggccatcaaaatgggaagatacgaagaaagtttcgcagccgctggctttggctccttcgagctggtcagccagatctctgctgaggacctgctccgaatcggagtcactctggcgggacaccagaagaaaatcttggccagtgtccagcacatgaagtcccaggccaagccgggaaccccgggtgggacaggaggaccggccccgcagtactgacctgcaggaactccccaccccagggacaccgcctccccattttccggggcagagtggggactcacagaggcccccagccctgtgccccgctggattgcactttgagcccgtggggtgaggagttggcaatttggagagacaggatttgggggttctgccataataggaggggaaaatcaccccccagccacctcggggaactccagaccaagggtgagggcgcctttccctcaggactgggtgtgaccagaggaaaaggaagtgcccaacatctcccagcctccccaggtgcccccctcaccttgatgggtgcgttcccgcagaccaaagagagtgtgactcccttgccagctccagagtgggggggctgtcccagggggcaagaaggggtgtcagggcccagtgacaaaatcattggggtttgtagtcccaacttgctgctgtcaccaccaaactcaatcatttttttcccttgtaaatgcccctcccccagctgctgccttcatattgaaggtttttgagttttgtttttggtcttaatttttctccccgttccctttttgtttcttcgttttgtttttctaccgtccttgtcataactttgtgttggagggaacctgtttcactatggcctcctttgcccaagttgaaacaggggcccatcatcatgtctgtttccagaacagtgccttggtcatcccacatccccggaccccgcctgggacccccaagctgtgtcctatgaaggggtgtggggtgaggtagtgaaaagggcggtagttggtggtggaacccagaaacggacgccggtgcttggaggggttcttaaattatatttaaaaaagtaactttttgtataaataaaagaaaatgggacgtgtcccagctccaggggt

SEQ ID NO: 57 - protein, 987 aa, Homo sapiens
MELRVLLCWASLAAALEETLLNTKLETADLKWVTFPQVDGQWEELSGLDEEQHSVRTYEVCEVQRAPGQAHWLRTGWVPRRGAVHVYATLRFTMLECLSLPRAGRSCKETFTVFYYESDADTATALTPAWMENPYIKVDTVAAEHLTRKRPGAEATGKVNVKTLRLGPLSKAGFYLAFQDQGACMALLSLHLFYKKCAQLTVNLTRFPETVPRELVVPVAGSCVVDAVPAPGPSPSLYCREDGQWAEQPVTGCSCAPGFEAAEGNTKCRACAQGTFKPLSGEGSCQPCPANSHSNTIGSAVCQCRVGYFRARTDPRGAPCTTPPSAPRSVVSRLNGSSLHLEWSAPLESGGREDLTYALRCRECRPGGSCAPCGGDLTFDPGPRDLVEPWVVVRGLRPDFTYTFEVTALNGVSSLATGPVPFEPVNVTTDREVPPAVSDIRVTRSSPSSLSLAWAVPRAPSGAWLDYEVKYHEKGAEGPSSVRFLKTSENRAELRGLKRGASYLVQVRARSEAGYGPFGQEHHSQTQLDESEGWREQLALIAGTAVVGVVLVLVVIVVAVLCLRKQSNGREAEYSDKHGQYLIGHGTKVYIDPFTYEDPNEAVREFAKEIDVSYVKIEEVIGAGEFGEVCRGRLKAPGKKESCVAIKTLKGGYTERQRREFLSEASIMGQFEHPNIIRLEGVVTNSMPVMILTEFMENGALDSFLRLNDGQFTVIQLVGMLRGIASGMRYLAEMSYVHRDLAARNILVNSNLVCKVSDFGLSRFLEENSSDPTYTSSLGGKIPIRWTAPEAIAFRKFTSASDAWSYGIVMWEVMSFGERPYWDMSNQDVINAIEQDYRLPPPPDCPTSLHQLMLDCWQKDRNARPRFPQVVSALDKMIRNPASLKIVARENGGASHPLLDQRQPHYSAFGSVGEWLRAIKMGRYEESFAAAGFGSFELVSQISAEDLLRIGVTLAGHQKKILASVQHMKSQAKPGTPGGTGGPAPQY

SEQ ID NO: 58 - DNA, 2309 bp, Homo sapiens
ggagttggcgagtgtgttttgtgagtttttaggcaccttttgaaatgtaatcatttgggtcaatatgtaattttcagtgttagactagtaaattgtccgctaaattctggccgtttttggcttttttgttagacaatgcagatcttcgtgaagactctgactggtaagaccatcaccctcgaggtggagcccagtgacaccatcgagaatgtcaaggcaaagatccaagataaggaaggcattcctcctgatcagcagaggttgatctttgccggaaaacagctggaagatggtcgtaccctgtctgactacaacatccagaaagagtccaccttgcacctggtactccgtctcagaggtgggatgcaaatcttcgtgaagacactcactggcaagaccatcacccttgaggtcgagcccagtgacacaatcgagaacgtcaaggcaaagatccaagacaaggaaggcattcctcctgaccagcagaggttgatctttgccggaaagcagctggaagatgggcgcaccctgtctgactacaacatccagaaagagtctaccctgcacctggtgctccgtctcagaggtgggatgcagatcttcgtgaagaccctgactggtaagaccatcaccctcgaagtggagccgagtgacaccattgagaatgtcaaggcaaagatccaagacaaggaaggcatccctcctgaccagcagaggttgatctttgccggaaaacagctggaagatggtcgtaccctgtctgactacaacatccagaaagagtccaccttgcacctggtgctccgtctcagaggtgggatgcagatcttcgtgaagaccctgactggtaagaccatcactctcgaggtggagccgagtgacaccattgagaatgtcaaggcaaagatccaagacaaggaaggcatccctcctgatcagcagaggttgatctttgctgggaaacagctggaagatggacgcaccctgtctgactacaacatccagaaagagtccaccctgcacctggtgctccgtcttagaggtgggatgcagatcttcgtgaagaccctgactggtaagaccatcactctcgaagtggagccgagtgacaccattgagaatgtcaaggcaaagatccaagacaaggaaggcatccctcctgaccagcagaggttgatctttgctgggaaacagctggaagatggacgcaccctgtctgactacaacatccagaaagagtccaccctgcacctggttctccgtcttagaggtgggatgcagatcttcgtgaagaccctgactggtaagaccatcactctcgaagtggagccgagtgacaccattgagaatgtcaaggcaaagatccaagacaaggaaggcatccctcctgaccagcagaggttgatctttgctgggaaacagctggaagatggacgcaccctgtctgactacaacatccagaaagagtccaccctgcacctggtgctccgtctcagaggtgggatgcagatcttcgtgaagaccctgactggtaagaccatcaccctcgaggttgagcccagtgacaccatcgagaatgtcaaggcaaagatccaagataaggaaggcatccctcctgatcagcagaggttgatctttgctggaaaacagctggaagatgggcgcaccctgtctgactacaacattcagaaagagtccaccctgcacctggtgctccgtctcagaggtgggatgcaaatcttcgtgaagacactcactggcaagaccatcacccttgaggtggagcccagtgacaccatcgagaacgtcaaggcaaagatccaggacaaggaaggcattcctcctgaccagcagaggttgatctttgccggaaagcagctggaagatgggcggaccctgtctgactacaacatccagaaagagtctaccctgcacctggtgctccgtctcagaggtgggatgcagatcttcgtgaagaccctgactggtaagaccattaccctcgaggtggagcccagtgacaccatcgagaatgtcaaggcaaagatccaagataaggaaggcatccctcctgatcagcagaggttgatctttgctgggaaacagctggaagatggacgcaccctgtctgactacaacatccagaaagagtccactctgcacttggtcctgcgcttgagggggggtgtctaagtttccccttttaaggtttcaacaaatttcattgcactttcctttcaataaagttgttgcattcccaattggtgttttttttttttttttttttttttttaagtttattttgcatt

SEQ ID NO: 59 - protein, 685 aa, Homo sapiens
MQIFVKTLTGKTITLEVEPSDTIENVKAKIQDKEGIPPDQQRLIFAGKQLEDGRTLSDYNIQKESTLHLVLRLRGGMQIFVKTLTGKTITLEVEPSDTIENVKAKIQDKEGIPPDQQRLIFAGKQLEDGRTLSDYNIQKESTLHLVLRLRGGMQIFVKTLTGKTITLEVEPSDTIENVKAKIQDKEGIPPDQQRLIFAGKQLEDGRTLSDYNIQKESTLHLVLRLRGGMQIFVKTLTGKTITLEVEPSDTIENVKAKIQDKEGIPPDQQRLIFAGKQLEDGRTLSDYNIQKESTLHLVLRLRGGMQIFVKTLTGKTITLEVEPSDTIENVKAKIQDKEGIPPDQQRLIFAGKQLEDGRTLSDYNIQKESTLHLVLRLRGGMQIFVKTLTGKTITLEVEPSDTIENVKAKIQDKEGIPPDQQRLIFAGKQLEDGRTLSDYNIQKESTLHLVLRLRGGMQIFVKTLTGKTITLEVEPSDTIENVKAKIQDKEGIPPDQQRLIFAGKQLEDGRTLSDYNIQKESTLHLVLRLRGGMQIFVKTLTGKTITLEVEPSDTIENVKAKIQDKEGIPPDQQRLIFAGKQLEDGRTLSDYNIQKESTLHLVLRLRGGMQIFVKTLTGKTITLEVEPSDTIENVKAKIQDKEGIPPDQQRLIFAGKQLEDGRTLSDYNIQKESTLHLVLRLRGGV

SEQ ID NO: 60 - DNA, 4396 bp, Homo sapiens
gcctgaggtgcccgccctggccccaggagaatgaaccagccgcagaggatggcgcctgtgggcacagacaaggagctcagtgacctcctggacttcagcatgatgttcccgctgcctgtcaccaacgggaagggccggcccgcctccctggccggggcgcagttcggaggttcaggtcttgaggaccggcccagctcaggctcctggggcagcggcgaccagagcagctcctcctttgaccccagccggaccttcagcgagggcacccacttcactgagtcgcacagcagcctctcttcatccacattcctgggaccgggactcggaggcaagagcggtgagcggggcgcctatgcctccttcgggagagacgcaggcgtgggcggcctgactcaggctggcttcctgtcaggcgagctggccctcaacagccccgggcccctgtccccttcgggcatgaaggggacctcccagtactacccctcctactccggcagctcccggcggagagcggcagacggcagcctagacacgcagcccaagaaggtccggaaggtcccgccgggtcttccatcctcggtgtacccacccagctcaggtgaggactacggcagggatgccaccgcctacccgtccgccaagacccccagcagcacctatcccgcccccttctacgtggcagatggcagcctgcacccctcagccgagctctggagtcccccgggccaggcgggcttcgggcccatgctgggtgggggctcatccccgctgcccctcccgcccggtagcggcccggtgggcagcagtggaagcagcagcacgtttggtggcctgcaccagcacgagcgtatgggctaccagctgcatggagcagaggtgaacggtgggctcccatctgcatcctccttctcctcagcccccggagccacgtacggcggcgtctccagccacacgccgcctgtcagcggggccgacagcctcctgggctcccgagggaccacagctggcagctccggggatgccctcggcaaagcactggcctcgatctactccccggatcactcaagcaataacttctcgtccagcccttctacccccgtgggctccccccagggcctggcaggaacgtcacagtggcctcgagcaggagcccccggtgccttatcgcccagctacgacgggggtctccacggcctgcagagtaagatagaagaccacctggacgaggccatccacgtgctccgcagccacgccgtgggcacagccggcgacatgcacacgctgctgcctggccacggggcgctggcctcaggtttcaccggccccatgtcgctgggtgggcggcacgcaggcctggttggaggcagccaccccgaggacggcctcgcaggcagcaccagcctcatgcacaaccacgcggccctccccagccagccaggcaccctccctgacctgtctcggcctcccgactcctacagtgggctagggcgagcaggtgccacggcggccgccagcgagatcaagcgggaggagaaggaggacgaggagaacacgtcagcggctgaccactcggaggaggagaagaaggagctgaaggccccccgggcccggaccagcccagacgaggacgaggacgaccttctccccccagagcagaaggccgagcgggagaaggagcgccgggtggccaataacgcccgggagcggctgcgggtccgtgacatcaacgaggcctttaaggagctggggcgcatgtgccaactgcacctcaacagcgagaagccccagaccaaactgctcatcctgcaccaggctgtctcggtcatcctgaacttggagcagcaagtgcgagagcggaacctgaatcccaaagcagcctgtttgaaacggcgagaagaggaaaaggtgtcaggtgtggttggagacccccagatggtgctttcagctccccacccaggcctgagcgaagcccacaaccccgccgggcacatgtgaaaggtatgcctccgtgggacgagccacccgctttcagccctgtgctctggccccagaagccggactcgagaccccgggcttcatccacatccacacctcacacacctgttgtcagcatcgagccaacaccaacctgacaaggttcggagtgatgggggcggccaaggtgacactgggtccaggagctccctggggccctggcctaccactcactggcctcgctccccctgtccccgaatctcagccaccgtgtcactctgtgacctgtcccatggatcctgaaactgcatcttggccctgttgcctgggctgacaggagcattttttttttttccagtaaacaaaacctgaaagcaagcaacaaaacatacactttgtcagagaagaaaaaaatgccttaactataaaaagcggagaaatggaaacatatcactcaagggggatgctgtggaaacctggcttattcttctaaagccaccagcaaattgtgcctaagcgaaatattttttttaaggaaaataaaaacattagttacaagattttttttttcttaaggtagatgaaaattagcaaggatgctgcctttggtctctggtttttttaagctttttttgcatatgttttgtaagcaacaaatttttttgtataaaagtcccgtgtctctcgctatttctgctgctgttcctagactgagcattgcatttcttgatcaaccagatgattaaacgttgtattaaaaagaccccgtgtaaacctgagccccccccgtccccccccccggaagccactgcacacagacagacggggacaggcggcgggtcttttgtttttttgatgttgggggttctcttggttttgtcatgtggaaagtgatgcgtgggcgttccctgatgaaggcaccttggggcttccctgccgcatcctctcccctcaggaaggggactgacctgggcttgggggaagggacgtcagcaaggtggctctgaccctcccaggtgactctgccaagcagctgtggccccagcggtaccctacacaacgccctccccaggcccccctaagctgctctcccttggaacctgcacagctctctgaaatggggcattttgttgggaccagtgacccctggcatggggaccacaccctggagcccggtgctggggacctcctggacaccctgtccttcactccttgccccagggacccaggctcatgctctgaactctggctgagaggagtctgctcaggagccagcacaggacaccccccaccccaccccaccatgtccccattacaccagagggccatcgtgacgtagacaggatgccaggggcctgaccagcctccccaatgctggggagcatccctggcctggggccacacctgctgccctccctctgtgtggtccaagggcaagagtggctggagccgggggactgtgctggtctgagccccacgaaggccttgggctgtggctccgaccctgctgcagaaccagcagggtgtcccctcgggcccatctgtgtcccatgtcccagcacccaggcctctctccaggtctccttttctggtcttttgccatgagggtaaccagctcttcccagctggctgggactgtcttgggtttaaaactgcaagtctcctaccctgggatcccatccagttccacacgaactagggcagtggtcactgtggcacccaggtgtgggcctggctagctgggggccttcatgtgcccttcatgcccctccctgcattgaggccttgtggacccctgggctggctgtgttcatccccgctgcaggtcgggcgtctccccccgtgccactcctgagactccaccgttacccccaggagatcctggactgcctgactcccctccccagactggcttgggagcctgggccccatggtagatgcaagggaaacctcaaggccagctcaatgcctggtatctgcccccagtccaggccaggcggaggggaggggctgtccggctgcctctcccttctcggtggcttcccctgcgccctgggagtttgatctcttaagggaacttgcctctccctcttgttttgctcctgccctgcccctaggtctgggtggcagtggccccatagcctctggaactgtgcgttctgcatagaattcaaacgagattcacccagcgcgaggaggaagaaacagcagttcctgggaaccacaattatggggggtggggggtgtgatctgagtgcctcaagatggttttcaaaaaattttttttaaagaaaataattgtatacgtgtcaacacagctggctggatgattgggactttaaaacgaccctctttcaggtggattcagagacctgtcctgtatataacagcactgtagcaataaacgtgacattttataaag

SEQ ID NO: 61 - protein, 654 aa, Homo sapiens
MNQPQRMAPVGTDKELSDLLDFSMMFPLPVTNGKGRPASLAGAQFGGSGLEDRPSSGSWGSGDQSSSSFDPSRTFSEGTHFTESHSSLSSSTFLGPGLGGKSGERGAYASFGRDAGVGGLTQAGFLSGELALNSPGPLSPSGMKGTSQYYPSYSGSSRRRAADGSLDTQPKKVRKVPPGLPSSVYPPSSGEDYGRDATAYPSAKTPSSTYPAPFYVADGSLHPSAELWSPPGQAGFGPMLGGGSSPLPLPPGSGPVGSSGSSSTFGGLHQHERMGYQLHGAEVNGGLPSASSFSSAPGATYGGVSSHTPPVSGADSLLGSRGTTAGSSGDALGKALASIYSPDHSSNNFSSSPSTPVGSPQGLAGTSQWPRAGAPGALSPSYDGGLHGLQSKIEDHLDEAIHVLRSHAVGTAGDMHTLLPGHGALASGFTGPMSLGGRHAGLVGGSHPEDGLAGSTSLMHNHAALPSQPGTLPDLSRPPDSYSGLGRAGATAAASEIKREEKEDEENTSAADHSEEEKKELKAPRARTSPDEDEDDLLPPEQKAEREKERRVANNARERLRVRDINEAFKELGRMCQLHLNSEKPQTKLLILHQAVSVILNLEQQVRERNLNPKAACLKRREEEKVSGVVGDPQMVLSAPHPGLSEAHNPAGHM

SEQ ID NO: 62 - DNA, 2131 bp, Homo sapiens
ccgccgccatccgccctctctacccccccatccccaggtgaggggggtgagttcaggaagcggagaccccgaggaacccagcagggtcaccatttgcagcgcaacatggcaggagctggaggagggaatgatattcagtggtgtttttctcaggtgaaaggagcagtagatgatgatgtagcagaagcagatataatttctacagtagaatttaatcattctggagaattactagcaacaggagataaaggtggtagagttgtcatctttcaacaggagcaggagaacaaaatccagtctcatagcagaggagaatataatgtttacagcaccttccagagccatgaaccagagtttgactacttgaaaagtttagaaatagaagaaaagatcaataaaattaggtggttaccccagaaaaatgctgctcagtttttattgtctaccaatgataaaacaataaaattatggaaaatcagtgaaagggacaaaagaccagaagggtataacttgaaagaggaggatggaaggtatagagatcctactacagttactacactacgagtgccagtctttaggcctatggatctaatggttgaggccagtccacgaagaatatttgccaatgctcatacatatcacatcaactcaatttctattaatagtgattatgaaacatatttatctgcagatgatttgcggattaatctttggcatctggaaattacagacaggagttttaacattgtggatatcaagcctgccaatatggaagagctaacagaggtgattacagcagcagaatttcatccaaacagctgtaacacatttgtatacagcagcagtaaaggaactattcggctatgtgacatgagggcatctgccctctgtgatagacattctaaattgtttgaagaacctgaagatcccagtaacaggtcatttttttccgaaatcatctcctctatttcggatgtaaaattcagccatagtggtcgatatatgatgactagagactatttgtcagtcaaaatttgggacttaaatatggaaaacaggcctgtggaaacataccaggtgcatgaatacctcagaagtaaactctgttcactgtatgaaaatgactgcatatttgacaaatttgaatgttgttggaatggatctgacagtgttgtcatgactggatcttacaataatttcttcagaatgtttgacagaaacacaaagcgagacataaccctagaagcatcgcgggaaaacaataagcctcgcacagttctgaagcctcgcaaagtctgtgcaagtggcaagcgaaagaaagatgaaataagtgttgacagcctagacttcaataagaaaatccttcacacagcctggcaccccaaggaaaatatcattgccgtagctactacaaacaatctgtatatatttcaagacaaagtgaattagggttggcattcctagcagaagaacccacttcctgcttagttgagatagttgaatctagcattcgttcctataaaagagagaggtccattgtggcgcccctttccagtgtttgacagtgtgccattcgacaacacattgttatagctacatggagaaagctctgtggattcatcactgtggtgttctccatgtctgctagccatttaggtaagggtagggcacttttaatttaaatgacttcttgcaccatcttgcctaatggactagattggactgtatcaacattgatttactccactttttatgccttccattgtgatgacgtcaaacacagtgaaagccttcagtcatgctatgggatttaattgtgtatcctcattactgtatcatttgtggggtacaccccttccccctttttttaaattaaatacagctcattcttactgtggcttgtagcattcctcctcttctggcctcctggactgctccccttcatctcttacccttgccccctccacccggtcttggtggtggtatattaaaaaaagaaagaatgaaagcacacaaaatgagtcagtttggggtcagtggtataaagggggtatatgttgcaaacaaatgttttagtaacagttggctgtaatcactcctcgccgtgtctggcactgaaaataaggaaaag

SEQ ID NO: 63 - protein, 447 aa, Homo sapiens
MAGAGGGNDIQWCFSQVKGAVDDDVAEADIISTVEFNHSGELLATGDKGGRVVIFQQEQENKIQSHSRGEYNVYSTFQSHEPEFDYLKSLEIEEKINKIRWLPQKNAAQFLLSTNDKTIKLWKISERDKRPEGYNLKEEDGRYRDPTTVTTLRVPVFRPMDLMVEASPRRIFANAHTYHINSISINSDYETYLSADDLRINLWHLEITDRSFNIVDIKPANMEELTEVITAAEFHPNSCNTFVYSSSKGTIRLCDMRASALCDRHSKLFEEPEDPSNRSFFSEIISSISDVKFSHSGRYMMTRDYLSVKIWDLNMENRPVETYQVHEYLRSKLCSLYENDCIFDKFECCWNGSDSVVMTGSYNNFFRMFDRNTKRDITLEASRENNKPRTVLKPRKVCASGKRKKDEISVDSLDFNKKILHTAWHPKENIIAVATTNNLYIFQDKVN

SEQ ID NO: 64 - DNA, 2691 bp, Homo sapiens
gcttgcccgtcggtcgctagctcgctcggtgcgcgtcgtcccgctccatggcgctcttcgtgcggctgctggctctcgccctggctctggccctgggccccgccgcgaccctggcgggtcccgccaagtcgccctaccagctggtgctgcagcacagcaggctccggggccgccagcacggccccaacgtgtgtgctgtgcagaaggttattggcactaataggaagtacttcaccaactgcaagcagtggtaccaaaggaaaatctgtggcaaatcaacagtcatcagctacgagtgctgtcctggatatgaaaaggtccctggggagaagggctgtccagcagccctaccactctcaaacctttacgagaccctgggagtcgttggatccaccaccactcagctgtacacggaccgcacggagaagctgaggcctgagatggaggggcccggcagcttcaccatcttcgcccctagcaacgaggcctgggcctccttgccagctgaagtgctggactccctggtcagcaatgtcaacattgagctgctcaatgccctccgctaccatatggtgggcaggcgagtcctgactgatgagctgaaacacggcatgaccctcacctctatgtaccagaattccaacatccagatccaccactatcctaatgggattgtaactgtgaactgtgcccggctcctgaaagccgaccaccatgcaaccaacggggtggtgcacctcatcgataaggtcatctccaccatcaccaacaacatccagcagatcattgagatcgaggacacctttgagacccttcgggctgctgtggctgcatcagggctcaacacgatgcttgaaggtaacggccagtacacgcttttggccccgaccaatgaggccttcgagaagatccctagtgagactttgaaccgtatcctgggcgacccagaagccctgagagacctgctgaacaaccacatcttgaagtcagctatgtgtgctgaagccatcgttgcggggctgtctgtagagaccctggagggcacgacactggaggtgggctgcagcggggacatgctcactatcaacgggaaggcgatcatctccaataaagacatcctagccaccaacggggtgatccactacattgatgagctactcatcccagactcagccaagacactatttgaattggctgcagagtctgatgtgtccacagccattgaccttttcagacaagccggcctcggcaatcatctctctggaagtgagcggttgaccctcctggctcccctgaattctgtattcaaagatggaacccctccaattgatgcccatacaaggaatttgcttcggaaccacataattaaagaccagctggcctctaagtatctgtaccatggacagaccctggaaactctgggcggcaaaaaactgagagtttttgtttatcgtaatagcctctgcattgagaacagctgcatcgcggcccacgacaagagggggaggtacgggaccctgttcacgatggaccgggtgctgacccccccaatggggactgtcatggatgtcctgaagggagacaatcgctttagcatgctggtagctgccatccagtctgcaggactgacggagaccctcaaccgggaaggagtctacacagtctttgctcccacaaatgaagccttccgagccctgccaccaagagaacggagcagactcttgggagatgccaaggaacttgccaacatcctgaaataccacattggtgatgaaatcctggttagcggaggcatcggggccctggtgcggctaaagtctctccaaggtgacaagctggaagtcagcttgaaaaacaatgtggtgagtgtcaacaaggagcctgttgccgagcctgacatcatggccacaaatggcgtggtccatgtcatcaccaatgttctgcagcctccagccaacagacctcaggaaagaggggatgaacttgcagactctgcgcttgagatcttcaaacaagcatcagcgttttccagggcttcccagaggtctgtgcgactagcccctgtctatcaaaagttattagagaggatgaagcattagcttgaagcactacaggaggaatgcaccacggcagctctccgccaatttctctcagatttccacagagactgtttgaatgttttcaaaaccaagtatcacactttaatgtacatgggccgcaccataatgagatgtgagccttgtgcatgtgggggaggagggagagagatgtactttttaaatcatgttccccctaaacatggctgttaacccactgcatgcagaaacttggatgtcactgcctgacattcacttccagagaggacctatcccaaatgtggaattgactgcctatgccaagtccctggaaaaggagcttcagtattgtggggctcataaaacatgaatcaagcaatccagcctcatgggaagtcctggcacagtttttgtaaagcccttgcacagctggagaaatggcatcattataagctatgagttgaaatgttctgtcaaatgtgtctcacatctacacgtggcttggaggcttttatggggccctgtccaggtagaaaagaaatggtatgtagagcttagatttccctattgtgacagagccatggtgtgtttgtaataataaaaccaaagaaacata

SEQ ID NO: 65 - protein, 683 aa, Homo sapiens
MALFVRLLALALALALGPAATLAGPAKSPYQLVLQHSRLRGRQHGPNVCAVQKVIGTNRKYFTNCKQWYQRKICGKSTVISYECCPGYEKVPGEKGCPAALPLSNLYETLGVVGSTTTQLYTDRTEKLRPEMEGPGSFTIFAPSNEAWASLPAEVLDSLVSNVNIELLNALRYHMVGRRVLTDELKHGMTLTSMYQNSNIQIHHYPNGIVTVNCARLLKADHHATNGVVHLIDKVISTITNNIQQIIEIEDTFETLRAAVAASGLNTMLEGNGQYTLLAPTNEAFEKIPSETLNRILGDPEALRDLLNNHILKSAMCAEAIVAGLSVETLEGTTLEVGCSGDMLTINGKAIISNKDILATNGVIHYIDELLIPDSAKTLFELAAESDVSTAIDLFRQAGLGNHLSGSERLTLLAPLNSVFKDGTPPIDAHTRNLLRNHIIKDQLASKYLYHGQTLETLGGKKLRVFVYRNSLCIENSCIAAHDKRGRYGTLFTMDRVLTPPMGTVMDVLKGDNRFSMLVAAIQSAGLTETLNREGVYTVFAPTNEAFRALPPRERSRLLGDAKELANILKYHIGDEILVSGGIGALVRLKSLQGDKLEVSLKNNVVSVNKEPVAEPDIMATNGVVHVITNVLQPPANRPQERGDELADSALEIFKQASAFSRASQRSVRLAPVYQKLLERMKH

SEQ ID NO: 66 - DNA, 1777 bp, Homo sapiens
ggctaccctcgccccgcccgcggtcctccgtcggttctctcattagtccacggtctggtcttcagctacccgccttcgtctccgagtttgcgactcgcgggaccggcgtccccggcgcgaagaggctggactcggattcgttgcctgagcaatggctgccatccggaagaaactggtgattgttggtgatggagcctgtggaaagacatgcttgctcatagtcttcagcaaggaccagttcccagaggtgtatgtgcccacagtgtttgagaactatgtggcagatatcgaggtggatggaaagcaggtagagttggctttgtgggacacagctgggcaggaagattatgatcgcctgaggcccctctcctacccagataccgatgttatactgatgtgtttttccatcgacagccctgatagtttagaaaacatcccagaaaagtggaccccagaagtcaagcatttctgtcccaacgtgcccatcatcctggttgggaataagaaggatcttcggaatgatgagcacacaaggcgggagctagccaagatgaagcaggagccggtgaaacctgaagaaggcagagatatggcaaacaggattggcgcttttgggtacatggagtgttcagcaaagaccaaagatggagtgagagaggtttttgaaatggctacgagagctgctctgcaagctagacgtgggaagaaaaaatctggttgccttgtcttgtgaaaccttgctgcaagcacagcccttatgcggttaattttgaagtgctgtttattaatcttagtgtatgattactggcctttttcatttatctataatttacctaagattacaaatcagaagtcatcttgctaccagtatttagaagccaactatgattattaacgatgtccaacccgtctggcccaccagggtccttttgacactgctctaacagccctcctctgcactcccacctgacacaccaggcgctaattcaaggaatttcttaacttcttgcttctttctagaaagagaaacagttggtaacttttgtcaattaggctgtaactactttataactaacatgtcctgccctattatctgtcagctgcaaggtactctggtgagtcaccacttcagggctttactccgtaacagattttgttggcatagctctggggtgggcagttttgaaaatgggctcaaccagaaaagcccaagttcatgcagctgtggcagagttacagttctgtggtttcatgttagttaccttatagttactgtgtaattagtgccacttaatgtatgttaccaaaaataaatatatctacccagactagatgtagtattttgtataattggattctaatactgtcatctcaagaagtgtatggtttaaagaagtgtattggaaataaagtcagatggaaattcattttaaattcccgtttgtcacttttctgataaaagatggccatattaccccttttcggccccatgtatctcagtaccccatggagctgggctaagtaaataggaattggtttcacgcctcaggcaattagacactttggaagatggcataacctgtctcacctggacttaagcgtctggctctaattcacagtgctctttctcctcactgtatccaggttccctcccagaggagccaccagttctcatgggtggcactcagtctctcttctctccagctgactaaactttttttctgtaccagttaatttttccaactactaatagaataaaggcagttttctaaaaaaa

SEQ ID NO: 67 - protein, 193 aa, Homo sapiens
MAAIRKKLVIVGDGACGKTCLLIVFSKDQFPEVYVPTVFENYVADIEVDGKQVELALWDTAGQEDYDRLRPLSYPDTDVILMCFSIDSPDSLENIPEKWTPEVKHFCPNVPIILVGNKKDLRNDEHTRRELAKMKQEPVKPEEGRDMANRIGAFGYMECSAKTKDGVREVFEMATRAALQARRGKKKSGCLVL

SEQ ID NO: 68 - DNA, 3603 bp, Homo sapiens
acaaagggaggaggaagaagggagcggggtcggagccgtcggggccaaaggagacggggccaggaacaggcagtctcggcccaactgcggacgctccctccaccccctgcgcaaaaagacccaaccggagttgaggcgctgcccctgaaggccccaccttacacttggcgggggccggagccaggctcccaggactgctccagaaccgagggaagctcgggtccctccaagctagccatggtgaggcgccggaggccccggggccccacccccccggcctgaccacactgccctgggtgccctcctccagaagcccgagatgcggggggccgggagacaacactcctggctccccagagaggcgtgggtctggggctgagggccagggcccggatgcccaggttccgggactagggccttggcagccagcgggggtggggaccacgggcacccagagaaggtcctccacacatcccagcgccggctcccggccatggagcccttgaagagcctcttcctcaagagccctctagggtcatggaatggcagtggcagcgggggtggtgggggcggtggaggaggccggcctgaggggtctccaaaggcagcgggttatgccaacccggtgtggacagccctgttcgactacgagcccagtgggcaggatgagctggccctgaggaagggtgaccgtgtggaggtgctgtcccgggacgcagccatctcaggagacgagggctggtgggcgggccaggtgggtggccaggtgggcatcttcccgtccaactatgtgtctcggggtggtggcccgcccccctgcgaggtggccagcttccaggagctgcggctggaggaggtgatcggcattggaggctttggcaaggtgtacaggggcagctggcgaggtgagctggtggctgtgaaggcagctcgccaggaccccgatgaggacatcagtgtgacagccgagagcgttcgccaggaggcccggctcttcgccatgctggcacaccccaacatcattgccctcaaggctgtgtgcctggaggagcccaacctgtgcctggtgatggagtatgcagccggtgggcccctcagccgagctctggccgggcggcgcgtgcctccccatgtgctggtcaactgggctgtgcagattgcccgtgggatgcactacctgcactgcgaggccctggtgcccgtcatccaccgtgatctcaagtccaacaacattttgctgctgcagcccattgagagtgacgacatggagcacaagaccctgaagatcaccgactttggcctggcccgagagtggcacaaaaccacacaaatgagtgccgcgggcacctacgcctggatggctcctgaggttatcaaggcctccaccttctctaagggcagtgacgtctggagttttggggtgctgctgtgggaactgctgaccggggaggtgccataccgtggcattgactgccttgctgtggcctatggcgtagctgttaacaagctcacactgcccatcccatccacctgccccgagcccttcgcacagcttatggccgactgctgggcgcaggacccccaccgcaggcccgacttcgcctccatcctgcagcagttggaggcgctggaggcacaggtcctacgggaaatgccgcgggactccttccattccatgcaggaaggctggaagcgcgagatccagggtctcttcgacgagctgcgagccaaggaaaaggaactactgagccgcgaggaggagctgacgcgagcggcgcgcgagcagcggtcacaggcggagcagctgcggcggcgcgagcacctgctggcccagtgggagctagaggtgttcgagcgcgagctgacgctgctgctgcagcaggtggaccgcgagcgaccgcacgtgcgccgccgccgcgggacattcaagcgcagcaagctccgggcgcgcgacggcggcgagcgtatcagcatgccactcgacttcaagcaccgcatcaccgtgcaggcctcacccggccttgaccggaggagaaacgtcttcgaggtcgggcctggggattcgcccacctttccccggttccgagccatccagttggagcctgcagagccaggccaggcatggggccgccagtccccccgacgtctggaggactcaagcaatggagagcggcgagcatgctgggcttggggtcccagttcccccaagcctggggaagcccagaatgggaggagaaggtcccgcatggacgaagccacatggtacctggattcagatgactcatcccccttaggatctccttccacacccccagcactcaatggtaaccccccgcggcctagcctggagcccgaggagcccaagaggcctgtccccgcagagcgcggtagcagctctgggacgcccaagctgatccagcgggcgctgctgcgcggcaccgccctgctcgcctcgctgggccttggccgcgacctgcagccgccgggaggcccaggacgcgagcgcggggagtccccgacaacaccccccacgccaacgcccgcgccctgcccgaccgagccgcccccttccccgctcatctgcttctcgctcaagacgcccgactccccgcccactcctgcacccctgttgctggacctgggtatccctgtgggccagcggtcagccaagagcccccgacgtgaggaggagccccgcggaggcactgtctcacccccaccggggacatcacgctctgctcctggcaccccaggcaccccacgttcaccacccctgggcctcatcagccgacctcggccctcgccccttcgcagccgcattgatccctggagctttgtgtcagctgggccacggccttctcccctgccatcaccacagcctgcaccccgccgagcaccctggaccttgttcccggactcagaccccttctgggactccccacctgccaaccccttccaggggggcccccaggactgcagggcacagaccaaagacatgggtgcccaggccccgtgggtgccggaagcggggccttgagtgggccaggccactcccccgagctccagctgccttaggaggagtcacagcatacactggaacaggagctgggtcagcctctgcagctgcctcagtttccccagggaccccacccccctttgggggtcaggaacactacactgcacaggaagccttcacactggaagggggacctgcgcccccacatctgaaacctgtaggtccccccagctcacctgccctactggggcccaacactgtacccagctggttgggaggaccagagcctgtctcagggaattgcctgctggggtgatgcagggaggaggggaggtgcagggaagaggggccggcctcagctgtcaccagcacttttgaccaagtcctgctactgcggcccctgccctagggcttagagcatggacctcctgccctgggggtcatctggggccagggctctctggatgccttcctgctgccccagccagggttggagtcttagcctcgggatccagtgaagccagaagccaaataaactcaaaagctgtctccccaaaaaaaaaaaaaaaaaaaaaaaaaaaaaaaaa

SEQ ID NO: 69 - protein, 847 aa, Homo sapiens
MEPLKSLFLKSPLGSWNGSGSGGGGGGGGGRPEGSPKAAGYANPVWTALFDYEPSGQDELALRKGDRVEVLSRDAAISGDEGWWAGQVGGQVGIFPSNYVSRGGGPPPCEVASFQELRLEEVIGIGGFGKVYRGSWRGELVAVKAARQDPDEDISVTAESVRQEARLFAMLAHPNIIALKAVCLEEPNLCLVMEYAAGGPLSRALAGRRVPPHVLVNWAVQIARGMHYLHCEALVPVIHRDLKSNNILLLQPIESDDMEHKTLKITDFGLAREWHKTTQMSAAGTYAWMAPEVIKASTFSKGSDVWSFGVLLWELLTGEVPYRGIDCLAVAYGVAVNKLTLPIPSTCPEPFAQLMADCWAQDPHRRPDFASILQQLEALEAQVLREMPRDSFHSMQEGWKREIQGLFDELRAKEKELLSREEELTRAAREQRSQAEQLRRREHLLAQWELEVFERELTLLLQQVDRERPHVRRRRGTFKRSKLRARDGGERISMPLDFKHRITVQASPGLDRRRNVFEVGPGDSPTFPRFRAIQLEPAEPGQAWGRQSPRRLEDSSNGERRACWAWGPSSPKPGEAQNGRRRSRMDEATWYLDSDDSSPLGSPSTPPALNGNPPRPSLEPEEPKRPVPAERGSSSGTPKLIQRALLRGTALLASLGLGRDLQPPGGPGRERGESPTTPPTPTPAPCPTEPPPSPLICFSLKTPDSPPTPAPLLLDLGIPVGQRSAKSPRREEEPRGGTVSPPPGTSRSAPGTPGTPRSPPLGLISRPRPSPLRSRIDPWSFVSAGPRPSPLPSPQPAPRRAPWTLFPDSDPFWDSPPANPFQGGPQDCRAQTKDMGAQAPWVPEAGP

SEQ ID NO: 70 - DNA, 1972 bp, Homo sapiens
gaattcggcacgagggcgaccggcgcgtcgtgcggggctgcggcggagcctccttaaggaaggtgcaagaggttggcagcttcgattgaagcacatcgaccggcgacagcagccaggagtcatgagcgacagcggcgagcagaactacggcgagcgggaatcccgttctgcttccagaagtggaagtgctcacggatcggggaaatctgcaaggcatacccctgcaaggtctcgctccaaggaagattccaggcgttccagatcaaagtccaggtcccgatctgaatctaggtctagatccagaagaagctcccgaaggcattatacccggtcacggtctcgctcccgctcccatagacgatcacgtagcaggtcttacagtcgagattatcgtagacggcacagccacagccattctcccatgtctactcgcaggcgtcatgttgggaatcgggcaaatcctgatcctaactgttgtcttggagtatttgggctgagcttgtacaccacagaaagagatctaagagaagtgttctctaaatatggtcccattgccgatgtgtctattgtatatgaccagcagtctaggcgttcaagaggatttgcctttgtatattttgaaaatgtagatgatgccaaggaagctaaagaacgtgccaatggaatggagcttgatgggcgtaggatcagagttgatttctctataacaaaaagaccacatacgccaacaccaggaatttacatggggagacctacctatggcagctctcgccgtcgggattactatgacagaggatatgatcggggctatgatgatcgggactactatagcagatcatacagaggaggaggtggaggaggaggaggatggagagctgcccaagacagggatcagatttatagaaggcggtcaccttctccttactatagtcgtggaggatacagatcacgttccagatctcgatcatactcacctcgtcgctattaaagcatgaagactttctgaaacctgccctagagctgggatattgtttgtgggcaatattttttattgtctcttgtttaaaaagtgaacagtgcctagtgaagttaggtgacttttacaccttttacgatgactacttttggtggagttgaaatgctgttttcattctgcatttgtgtagtttggtgctttgttccaagttaagtgttttcagaaaagtatgttttgcatgtatttttttacagtctaaattttgactgctgagaagtttctattgtacaaaacttcatttaaaaggtttttctactgaatccagggtattctgaagatcgaagcctgtgtaaaatgctaccaaatggcaaaaagcaacaataaacagtttgatttttacttttctttctaacatatcaatgcttagcagaactattcagattgtcagtagtaaatttaaagacaaatgcccgttttcctccagtccatgaaacataccatacttatatacctgcaactaagtgtttaaaattatgctctgtaactctgtactgctagtattagaactaaaaatcttaaaatacagccagtgcttaatgcttatatcaatgtggatttgtcggcttttatgtaatctgtaatatgtatagcaggaaatacgaagagttacacagtgtatgccttaaaaggctgtttcttaaaggtgttacaaggggataatggtatttcaactagttatcagcaagtgacaatacattccaccacaaatacactcttgttcttctagcttttagactatatgaaaaaaccgggtgcttcaaagtacatgataagggaacactatacctgtcatggatgaactgaagactttgcctgttcattttttaaatattattttcaggtcctttgcttaccaaaggaggcccaatttcactcaaatgttttgagaactgtgtttaaataaacgcaaatgaaaagaaaaaaaaaaaaaaaaaa

SEQ ID NO: 71 - protein, 288 aa, Homo sapiens
MSDSGEQNYGERESRSASRSGSAHGSGKSARHTPARSRSKEDSRRSRSKSRSRSESRSRSRRSSRRHYTRSRSRSRSHRRSRSRSYSRDYRRRHSHSHSPMSTRRRHVGNRANPDPNCCLGVFGLSLYTTERDLREVFSKYGPIADVSIVYDQQSRRSRGFAFVYFENVDDAKEAKERANGMELDGRRIRVDFSITKRPHTPTPGIYMGRPTYGSSRRRDYYDRGYDRGYDDRDYYSRSYRGGGGGGGGWRAAQDRDQIYRRRSPSPYYSRGGYRSRSRSRSYSPRRY

SEQ ID NO: 72 - DNA, 4201 bp, Homo sapiens
ggtcgggggatccctccgccgccagcgcgtggtcccggccccctccacccgccgtctcggccgcggccagcagcccctgccccccgggggacgctgacggccgcccggcgcgccgccctagcagacggacagggggcgctgcgcgcggcctggggcaacccgggccacaggggcaggaaagtgagggcccaggtcggcccgggcgtgcaggggccccgggttcgcagcggcggccgcggcagcgatagcggcactagcagcagcgggagtgccgggttgagccgggaagccgatggcggcggctgcggcggctccgattcctcgctgactgcccgtccgccctcctgcatcgagcgccatgttaccgacccaagctggggccgcggcggctctgggccggggctcggccctggggggcagcctgaaccggaccccgacggggcggccgggcggcggcggcgggacacgcggggctaacgggggccgggtccccgggaatggcgcggggctcgggcccggccgcctggagcgggaggctgcggcagcggcggcaaccaccccggcgcccaccgcgggggccctctacagcggcagcgagggcgactcggagtcgggcgaggaggaggagctgggcgccgagcggcgcggcctgaagcggagcctgagcgagatggagatcggtatggtggtcggtgggcccgaggcgtcggcagcggccaccgggggctacgggccggtgagcggcgcggtgagcggggccaagccgggtaagaagacccggggccgcgtgaagatcaagatggagttcatcgacaacaagctgcggcgctacacgaccttcagcaagaggaagacgggcatcatgaagaaggcctatgagctgtccacgctgacagggacacaggtgctgttgctggtggccagtgagacaggccatgtgtatacctttgccacccgaaaactgcagcccatgatcaccagtgagaccggcaaggcactgattcagacctgcctcaactcgccagactctccaccccgttcagaccccacaacagaccagagaatgagtgccactggctttgaagagacagatctcacctaccaggtgtcggagtctgacagcagtggggagaccaaggacacactgaagccggcgttcacagtcaccaacctgccgggtacaacctccaccatccaaacagcacctagcacctctaccaccatgcaagtcagcagcggcccctcctttcccatcaccaactacctggcaccagtgtctgctagtgtcagccccagtgctgtcagcagtgccaatgggactgtgctgaagagtacaggcagcggccctgtctcctctgggggccttatgcagctgcctaccagcttcaccctcatgcctggtggggcagtggcccagcaggtcccagtgcaggccattcaagtgcaccaggccccacagcaagcgtctccctcccgtgacagcagcacagacctcacgcagacctcctccagcgggacagtgacgctgcccgccaccatcatgacgtcatccgtgcccacaactgtgggtggccacatgatgtaccctagcccgcatgcggtgatgtatgcccccacctcgggcctgggtgatggcagcctcaccgtgctgaatgccttctcccaggcaccatccaccatgcaggtgtcacacagccaggtccaggagccaggtggcgtcccccaggtgttcctgacagcatcatctgggacagtgcagatccctgtttcagcagttcagctccaccagatggctgtgatagggcagcaggccgggagcagcagcaacctcaccgagctacaggtggtgaacctggacaccgcccacagcaccaagagtgaatgatccgcccgccgccctggacagatggcccaagggatggcaccacttatttattgttgccttttcacgttttctttacacacacgttgacgggccgcaggagggaggcggggaggaggaacgggcagccacaggactgagccctctcactccagccaaagaaatgggcctgcctgcctccacccgtcctccctcagcctccccttcttcccgccccacctcccatttctgttgctggaggggctgtcctccttcctgggaccccctcgccagcttggctcgatgtttgccatgagtattagcttacccaatgggaccgtgccccacctccccacacacaggccttctgtggggctgggcaccgtgtcctcctctgaggaagcagttggggccctcttgccagcctccttgctgaccccaggtcagccctgtgtctgtcacaggctgggtcaaaagagccctggctctgcccctcagggggccagctggggagatgggggcttcttcctcacactgctgtcctctcccccttcagctcctgagtagctgggcctgtgcactgggcaggttcctggggccgcctgccctgccttgccgctccccttggacctccaggggctcctgggttggagggaaccaccagcgttcccttctcccccttgtcttcccccctctcctcccagctgctttacttaaagttgattttgaactttttatttgaggagacgaagtgaaaacaaatctataaatatatatttttaaaatatttaacttttttttatggcgtttttctcgtccccctccctgcccaaactccccttccctggggagccctcaggctccccagaactggctgggcccctggggacagagccaccccatgagctcggggtccaccagtgtgtgggggagattctgggtttgcccagtcctggattgtttccaggagaaagccgggggaggggccctcaggccattccccaacggggtggggagggtgacccacagctctgggcctctttttgccctttagggctgttgctagggagagggaagagggagaccaaatgtcggggttggggtgggagggcgtcaggcagaggcaactgacttcatttgtgccacacgcatgggcattgcagccttgcgctgtcccaggcatgcagctgcctggggcccaagttgcagtgagcagggtggggtctgggagggggtgagaggcaggaatgggggtcagaagaagtgggagcagcttcttgggctgagtgcagccaaaggggagccagaaatgggcagttctcccagggagtgagcagctactgtaacttttttaaattaagacaaaaagccttgaagaaaatgactttatttttctaagtgtaacctcagtatttatgtaatttgtacaggggccatgccccacccccctcctccccctttggggtagaccttgagggtgggccagcataggggggagggtcttttaccctgtgtcagagcctaccttcaccacctatatccagaaggggagctttttcagaaacagggcagcagtggggtgaaattttcttaacccctaagactgccttcagtaggaacaagctggcttctgtgattaggtgaagggatgggggaagattttatgcacagcctagttatcaaggggatgatttgccgacatgtttgagaaccccctaacctctaaccctcattgctgtcttgccccagtttggggtgccaagatggaagtcacctttctgggctttctcctggagactagctggggcttatgggtggctttcaaggctggggcatggcaaatcaggggccagagagcaggggagcttgggactcaggtctgtaactgcccagccccttttctctgctcttgtttcactccaccatcactcactcactccccactcccccacccatggggaggagacctttgatgaattcttcctctccttcccacaaaagacagacccagtgagtgaatcaggcaaagtgcttataatgtgtgttgtgtgagcgtggccttgggaggacatgcgtgtgtcagggatgagttgaggtgatatttttatgtgcagcgacccttggtgtttcccttcctcggtggctctggggtatgtgtgtgtgggtgtgtgcgcctgagtgagtgtgtgtgcttgaatgtgagtgtgtatgtcagtggtttctacttcccctgggatgctgacccaggaatagtggacatggtcacagtcctatgtacagagctttcttttgtattaaaaaaaaatactctttcaataaatgtatcatttttgtgcacag

SEQ ID NO: 73 - protein, 508 aa, Homo sapiens
MLPTQAGAAAALGRGSALGGSLNRTPTGRPGGGGGTRGANGGRVPGNGAGLGPGRLEREAAAAAATTPAPTAGALYSGSEGDSESGEEEELGAERRGLKRSLSEMEIGMVVGGPEASAAATGGYGPVSGAVSGAKPGKKTRGRVKIKMEFIDNKLRRYTTFSKRKTGIMKKAYELSTLTGTQVLLLVASETGHVYTFATRKLQPMITSETGKALIQTCLNSPDSPPRSDPTTDQRMSATGFEETDLTYQVSESDSSGETKDTLKPAFTVTNLPGTTSTIQTAPSTSTTMQVSSGPSFPITNYLAPVSASVSPSAVSSANGTVLKSTGSGPVSSGGLMQLPTSFTLMPGGAVAQQVPVQAIQVHQAPQQASPSRDSSTDLTQTSSSGTVTLPATIMTSSVPTTVGGHMMYPSPHAVMYAPTSGLGDGSLTVLNAFSQAPSTMQVSHSQVQEPGGVPQVFLTASSGTVQIPVSAVQLHQMAVIGQQAGSSSNLTELQVVNLDTAHSTKSE

SEQ ID NO: 74 - DNA, 4604 bp, Homo sapiens
ggaacagcttgtccacccgccggccggaccagaagcctttgggtctgaagtgtctgtgagacctcacagaagagcacccctgggctccacttacctgccccctgctccttcagggatggaggcaatggcggccagcacttccctgcctgaccctggagactttgaccggaacgtgccccggatctgtggggtgtgtggagaccgagccactggctttcacttcaatgctatgacctgtgaaggctgcaaaggcttcttcaggcgaagcatgaagcggaaggcactattcacctgccccttcaacggggactgccgcatcaccaaggacaaccgacgccactgccaggcctgccggctcaaacgctgtgtggacatcggcatgatgaaggagttcattctgacagatgaggaagtgcagaggaagcgggagatgatcctgaagcggaaggaggaggaggccttgaaggacagtctgcggcccaagctgtctgaggagcagcagcgcatcattgccatactgctggacgcccaccataagacctacgaccccacctactccgacttctgccagttccggcctccagttcgtgtgaatgatggtggagggagccatccttccaggcccaactccagacacactcccagcttctctggggactcctcctcctcctgctcagatcactgtatcacctcttcagacatgatggactcgtccagcttctccaatctggatctgagtgaagaagattcagatgacccttctgtgaccctagagctgtcccagctctccatgctgccccacctggctgacctggtcagttacagcatccaaaaggtcattggctttgctaagatgataccaggattcagagacctcacctctgaggaccagatcgtactgctgaagtcaagtgccattgaggtcatcatgttgcgctccaatgagtccttcaccatggacgacatgtcctggacctgtggcaaccaagactacaagtaccgcgtcagtgacgtgaccaaagccggacacagcctggagctgattgagcccctcatcaagttccaggtgggactgaagaagctgaacttgcatgaggaggagcatgtcctgctcatggccatctgcatcgtctccccagatcgtcctggggtgcaggacgccgcgctgattgaggccatccaggaccgcctgtccaacacactgcagacgtacatccgctgccgccacccgcccccgggcagccacctgctctatgccaagatgatccagaagctagccgacctgcgcagcctcaatgaggagcactccaagcagtaccgctgcctctccttccagcctgagtgcagcatgaagctaacgccccttgtgctcgaagtgtttggcaatgagatctcctgactaggacagcctgtgcggtgcctgggtggggctgctcctccagggccacgtgccaggcccggggctggcggctactcagcagccctcctcacccgtctggggttcagcccctcctctgccacctcccctatccacccagcccattctctctcctgtccaacctaacccctttcctgcgggcttttccccggtcccttgagacctcagccatgaggagttgctgtttgtttgacaaagaaacccaagtgggggcagagggcagaggctggaggcaggccttgcccagagatgcctccaccgctgcctaagtggctgctgactgatgttgagggaacagacaggagaaatgcatccattcctcagggacagagacacctgcacctccccccactgcaggccccgcttgtccagcgcctagtggggtctccctctcctgccttactcacgataaataatcggcccacagctcccaccccacccccttcagtgcccaccaacatcccattgccctggttatattctcacgggcagtagctgtggtgaggtgggttttcttcccatcactggagcaccaggcacgaacccacctgctgagagacccaaggaggaaaaacagacaaaaacagcctcacagaagaatatgacagctgtccctgtcaccaagctcacagttcctcgccctgggtctaaggggttggttgaggtggaagccctccttccacggatccatgtagcaggactgaattgtccccagtttgcagaaaagcacctgccgacctcgtcctccccctgccagtgccttacctcctgcccaggagagccagccctccctgtcctcctcggatcaccgagagtagccgagagcctgctcccccaccccctccccaggggagagggtctggagaagcagtgagccgcatcttctccatctggcagggtgggatggaggagaagaattttcagaccccagcggctgagtcatgatctccctgccgcctcaatgtggttgcaaggccgctgttcaccacagggctaagagctaggctgccgcaccccagagtgtgggaagggagagcggggcagtctcgggtggctagtcagagagagtgtttgggggttccgtgatgtagggtaaggtgccttcttattctcactccaccacccaaaagtcaaaaggtgcctgtgaggcaggggcggagtgatacaacttcaagtgcatgctctctgcaggtcgagcccagcccagctggtgggaagcgtctgtccgtttactccaaggtgggtctttgtgagagtgagctgtaggtgtgcgggaccggtacagaaaggcgttcttcgaggtggatcacagaggcttcttcagatcaatgcttgagtttggaatcggccgcattccctgagtcaccaggaatgttaaagtcagtgggaacgtgactgccccaactcctggaagctgtgtccttgcacctgcatccgtagttccctgaaaacccagagaggaatcagacttcacactgcaagagccttggtgtccacctggccccatgtctctcagaattcttcaggtggaaaaacatctgaaagccacgttccttactgcagaatagcatatatatcgcttaatcttaaatttattagatatgagttgttttcagactcagactccatttgtattatagtctaatatacagggtagcaggtaccactgatttggagatatttatggggggagaacttacattgtgaaacttctgtacattaattattattgctgttgttattttacaagggtctagggagagacccttgtttgattttagctgcagaactgtattggtccagcttgctcttcagtgggagaaaaacacttgtaagttgctaaacgagtcaatcccctcattcaggaaaactgacagaggagggcgtgactcacccaagccatatataactagctagaagtgggccaggacaggccgggcgcggtggctcacgcctgtaatcccagcagtttgggaggtcgaggtaggtggatcacctgaggtcgggagttcgagaccaacctgaccaacatggagaaaccctgtctctattaaaaatacaaaaaaaaaaaaaaaaaaaaatagccgggcatggtggcgcaagcctgtaatcccagctactcaggaggctgaggcagaagaattgaacccaggaggtggaggttgcagtgagctgagatcgtgccgttactctccaacctggacaacaagagcgaaactccgtcttagaagtggaccaggacaggaccagattttggagtcatggtccggtgtccttttcactacaccatgtttgagctcagacccccactctcattccccaggtggctgacccagtccctgggggaagccctggatttcagaaagagccaagtctggatctgggaccctttccttccttccctggcttgtaactccaccaagcccatcagaaggagaaggaaggagactcacctctgcctcaatgtgaatcagaccctaccccaccacgatgtgccctggctgctgggctctccacctcaggccttggataatgctgttgcctcatctataacatgcatttgtctttgtaatgtcaccaccttcccagctctccctctggccctgcttcttcggggaactcctgaaatatcagttactcagccctgggccccaccacctaggccactcctccaaaggaagtctaggagctgggaggaaaagaaaagaggggaaaatgagtttttatggggctgaacggggagaaaaggtcatcatcgattctactttagaatgagagtgtgaaatagacatttgtaaatgtaaaacttttaaggtatatcattataactgaaggagaaggtgccccaaaatgcaagattttccacaagattcccagagacaggaaaatcctctggctggctaactggaagcatgtaggagaatccaagcgaggtcaacagagaaggcaggaatgtgtggcagatttagtgaaagctagagatatggcagcgaaaggatgtaaacagtgcctgctgaatgatttccaaagagaaaaaaagtttgccagaagtttgtcaagtcaaccaatgtagaaagctttgcttatggtaataaaaatggctcatacttatatagcacttactttgtttgcaagtactgctgtaaataaatgctttatgcaaacc

SEQ ID NO: 75 - protein, 427 aa, Homo sapiens
MEAMAASTSLPDPGDFDRNVPRICGVCGDRATGFHFNAMTCEGCKGFFRRSMKRKALFTCPFNGDCRITKDNRRHCQACRLKRCVDIGMMKEFILTDEEVQRKREMILKRKEEEALKDSLRPKLSEEQQRIIAILLDAHHKTYDPTYSDFCQFRPPVRVNDGGGSHPSRPNSRHTPSFSGDSSSSCSDHCITSSDMMDSSSFSNLDLSEEDSDDPSVTLELSQLSMLPHLADLVSYSIQKVIGFAKMIPGFRDLTSEDQIVLLKSSAIEVIMLRSNESFTMDDMSWTCGNQDYKYRVSDVTKAGHSLELIEPLIKFQVGLKKLNLHEEEHVLLMAICIVSPDRPGVQDAALIEAIQDRLSNTLQTYIRCRHPPPGSHLLYAKMIQKLADLRSLNEEHSKQYRCLSFQPECSMKLTPLVLEVFGNEIS

SEQ ID NO: 76 - DNA, 8852 bp, Homo sapiens
gcatgcatattttatgcctaaaaaatatttcatcttctgattttctagctttcttctgcaggttgttttttttttttagaatatttttcaatcattttaattctctattgtaaaacttggaaatctctacttatggactgccaagaacagtctgaaattaaatcaatttactctcactcttagtgaatattttgggagtgctaggtattgaatgtgtcccccaaaagttcatgtgttagaaatgtaatccttctgcccctatgatgagatgaatggatgaatgagggctctgttctcatgacgggatgaatgttgctgtcccaggagtgggtttattatcacagcagcgttattcttgtgcctgtgagctctccctggctcccttgctcccactctgagcatgtgatgccctctgccatgaggtgaggcagcaagaaggccctcacagatgccggcactgtggacttccagcctctagaactatgagctaaataaactttttaatataaattacctagtttgtcatcttttgttaccaataagaaaaggcaataagacagggaggttctattatgatgtcattcatgggaaaatggtagacaggacagaatctttgctggctccctagatactgccttggaatgttactcttggaaaacagtggctacagagtgatgcctttctccataactttaatttaccttaagaaaagctttgagtgctactgagtcgggaatgaaaaacctagagaatgttctgtcctgtgggagcaaggagtatagttagtccctgtattactacccaaaggggcatgaggcttcaccctccttgggctccctagggacttataatgccttcctgtaattatcgggccagttaatttaatactaatccacttaattcagttaacatcagatttgtcctagggatcttgttacatccttttgtatactaaaagagaaaaagaaaaaaaaaagatttgcttctctttcaatattcctgggaagttggatatccacatggaaaaggcagatctctagttcacaacagataaaaaataaattttactcaatgtgaaattaaatgtaaaaaataaaacttcaacattgtagaagaaaatatagaaaaagctctttaggtctgtgaaggagaaaagaattatcgaaatcaggccataaagaaaaagtacaagtcataaaggcaataaatatacaaatagagtttaacctctgaaacacttgaccgcaatgttctgaggtaaaaacaacaaaccagccattgaagggaagaacagattgacagtgcatataacacagaaagaagtagtaatcaaactatttaaaattgcctaataaatcaaaaagaaaagaccaaaaaaggaaccctaaggtttcaggaaatcaacacagagtatttcgcctaaaattaccagatcccaacagatttgcattagctgatatgtctgtttacaaccctgacaaagaacgtttggtttgggcctgtagaggcttagaaataggtaggggccagccattgggtgtagggagcactggtcacccttatttcaataaagtaaaagatacagaaaacagtaatgcatacataacattttctaaagatggacagaatacagcattttctaaagatgacagactgaatacatcctttgatcctaaacaaatccaaatgttcattgtaggatgcacaccttgcataggagagcattgggataaagctgtgccttgtgcaaaaaatgaccagcaaactggcctttgtcctcctattgaattaaaaaatacatatatagaagatggtgatatggcagatataggttttggaaatatgaactttaaggcacttcaagatagtagatcagatgtcagtttggatattgtcaatgaaacttgcaaatatccagattttttaaagatgcaaaatgatatctatggcgatgcctgctttttttatgctcgtagggagcaatgttatgctagacacttttttgttagagggggtaaaactggtgatgacattccaggtgcacaaattgacaatggtacatacaaaaatcaattttacattccaggagctgatggccaagctcaaaagactatcggaaatgccatgtatttcccaactgttagtggctcattagtttccagtgatgctcaattgtttaacaggcccttctggctccaaagagcccaaggtcataataatggcatcctgtgggctaatcaaatgtttatcacagtggttgacaacacaagaaatactaatttcagtatttctgtatataatcaagctggaccactaaaagatgttgcagactataatgcagagcaatttagagaatatcaaagacatgtagaagaatatgaaatatctttaattttacaactttgtaaggttcctttaaaggcggaggtattggcacagatcaatgcaatgaactcctctttattggaagattggcagttaggatttgttcccactcctgataatccaattcaggatacctacaggtatattgactctttggctacacggtgtccagataaaaatcctccaaaagaaaaggaagacccttataaaggcttacatttttgggatgtagatttaactgaaagattgtcattagatttagatcaatattccttaggcaggaaatttttattccaagctggtttacaacacacgaccgttaacggtacaaaagcagtgtcttataaagggtctaatagaggaacaaagcgcaaacgtaaaaattgaggcctgaccgaaagtggtacatttttataaacttttacacagtattcaaggaatgtttgtttactctgactaagtataagtcttccaaggataccgaccgcacccggtacactcagtcaggttgttgccaatatagaatcagatcggtgccaaacacaccgtcttggactcagaacagaccgtgttcgttataacatgctcggattagggacttcgccaaagaagatttaatctacaatcgcttttggcaatcacatttggcactgctaaaggaccgttaacggtaagtagcaagttccttgttccttgtaccaggtgcggtattgggattttgcaattgtaatggttgttgccaactaccataggcacattcaagtttttgcctgtatcgttttcgtatcctgttaacaatatccaatgtatgtatacataaataaatatatatatatataagtgtctaagattgggttattctgtaatcaggcaatggctgagggagccgaacaccaacagaaactgacagaaaaagataaggcagaattaccttcaaccattagagacttagctgaaaccttaggcatccctcttattgattgtataataccttgcaatttttgtggtaaatttttaaattatttggaagcctgtgaattcgactacaaaaaacttagcctaatttggaaagattattgtgtgtttgcgtgttgtcgcgtatgctgtggcgccactgcaacatacgaatttaatcaattttatgagcagacagtgttaggaagagatattgagttagcttcaggactctcgatttttgatattgatatcaggtgtcaaacttgcttagcatttcttgacattatagaaaagttagattgctgtggcagaggccttccctttcacaaggtgaggaacgcctggaagggaatctgtaggcagtgtaagcatttttatcatgattggtaaagaggtcaccgtgcaagatattattctggagctcagtgaggtgcagcccgaagtgctaccagttgacctgttttgtgaagaggaattaccaaacgagcaggaaacggaggaggagcctgacatcgaaaggatctcttacaaagttatagctccgtgcggttgcagacactgtgaggtcaagcttcgcatttttgtccacgccacagaatttggtattagagctttccaacagctattgaccggagatctgcagctcctgtgtcctgactgtcgcggaaactgcaaacatgacggatcctaatcctaaaggtagtacatctaaagaagggtttggtgattggtgtttattggaagctgactgtagtgatgtagaaaatgatttgggacaattgtttgagagagatacagactctgatatatcggatttgttagatgatactgaactggagcagggcaattccctggaactatttcatcaacaggagtgtgagcagagcgaggagcaattacaaaaactaaaacgaaagtatcttagtccaaaagctatcgcacagcttagtccgcgacttgagtcaatttcattgtcacctcagcagaagtctaagcgaaggctctttgcagagcaggacagcggacttgagctgactttaaacaatgaagctgaagatgttactcctgaggtggaggtaccggctattgactctcggccggatgacgagggaggttcaggggatgtagatatacattatacatcattgttgcgttctagcaacaaaaaagccacattaatggctaaatttaaagagtcgtttggagtaggttttaatgaattgacacggcaatttaaaagccacaaaacctgctgtaaggactgggttgtctctgtatatgcagtgcatgatgatttatttgaaagctcaaagcagctgttgcaacagcattgtgactatatctgggtccgtgggcatagcctggccttccatacccatgcccacacgcctgctccttgcttttctgttttgttttttgttcatgctattaactatgccttccttgcctggctgatttttattcatgtcccaaaatgtagctcggagttgacttcctctagggagggttcctattgccattaaagtctcttccttgcatatccttgatgaactattgtgggtaccagggccataacttcaattaccatactgttttgggacaatctatttactcgtctaacttctcttgctagacttacagaaatgcaaacacggaaatcatatctgtaccttatttactcttttaaagccccacctccagtttagagcttggtgtagagcagttccattgaaatactgacctgaggacatttcaacttatatttagttatgttctcatatttttctaagaggttcaaaacaaaactgataaacatgtttttaaaaaatgagtatctgattgtttagaaatgctttttacagaaaaagactgatcagattctaacagaagcaaaactgccttttaaactatttattttaaagttcttctctccccatgtagcttttacatggtctcgtgagttatgacatcaacttcttctatgacctccagaaagccgttttatgcctcagttactttgttggtaaaattagcgatgataactactgctaagcaatattgataaaagttgtttgatttgaaagtgttataactgaatgctcccaaacaataattccaagcacatttttctaaggttctgatgattgtgttagtgataaagcagaaggatggggtttctatttgacagtctggtatttccatctctcaaatcaagctagcagagttaaatgttctggtcatatttaactcacatctcttttttccaaattattcaactatgccatggaaaataatatttgctttatcctatcattagacagtatgctgacaggcttataaaatgacaagatttttcatttcagtaaaccatatttaaatcatcatcgtattccttatctatctacttggaggtaatttggtttactgcattaatatgaattttatattttttgagtcttcactcaaaattggtcctatcatctattacccaaataaagactgtactcagagataatgtagtattaaagagaaatgtctaagcaacacaaataatctaggaaaattgtaaaagaaagtttgaggataatgctaaaatttgagttttggcctcaacttgagtgcattgtgccacatcctttgctgttaagttaaaatgcacctttggtcaaatcatttcctttgtctaccccctgctgtcatagtttcagtgctcatgtctatgtcgataaattgtgaactgctagatctgatttctcagtctatttttataatctattttctttggatatttcaatttggatatttcaaccttttaagttccagtgagcaagagtagaccaaaattcatatttgcattcaacatttggggactagggttttttttttattaccacaataaatatatgcagagtgatttctatgcgcgataagattataagagactgattgaatgggtgaactttcctttgcttcctcagtttcccaaggcagtgtgagggaagtttggtgatccatgcagctggtgcctgtgtcaggtaggagggtcccagggatggtgggggcaccgactgcctttccctccaccaggaggctagggggtgtcatagtccacttagtgttgctataatggaacacctgatagtgagccatttataaataagagaagttcatttagctcacagttttgtagcctgggaagttcaagagcatggccctggcttctgacaagggctttcacactgtgtcataacctggagaaggccaaggggaagctgacacgttcaaacagaggactgaacaagtgaaggaggctcactttgtaacaacccactgtcacgggaatccagtctcaaaagagcaagaactcactattgcaggaaggacaccaagccattcatgagcgatccaaacccacgacccaaacacctcccactagtccccacctccagcaccaccacattcacattgggaatcacatttcaacatggaatttgacaggggacaaactcaactatagcaaggagactttgcagaagtcaagcctctgcctggagttacagatggaccctctacattctactgcttacaggatctgaggtcctatagcacactgtacttggcctgccatgtcctgcagagaaagagcattatactcagaaatgaaggtgttgtcatttcttcaaatcctacctctcctcactgtaatcagtggaccctccattaccatcaaactgtagccatagtgaattgggggtgttgctggttaaccttccctgtttatacctcatcaaatctggccacttcataaaagtctgttctcaatcacatttcttaaatgtaccctttattatttcagcacatatctgcacaatcagtaatttttatgaaaaatcagaaacttctattgaaattaggtggtcctgttcttaatctcccttccagtttttggtgcatccattctttcagtatcacctttaacccattagttgttgactaatcatttgcagtgtttctgcagttgtgtctacaagactcaaactgaccccttgtcctggtcccagtgttcttccaattcccaccactcatctttgacatgaatgtcgtcaccatcacagtcgccccctagcgtcccagtaacagcctgcactgtggatggctgctgctggttcccgggagcacacctttctctagatgacttccttcctgactccccggtccagatggctctgtcaacttgatctatttttcaggaaatgttatttgattcttccatcaatctctggagcacagtgaccctgcctttgttttacctgccttggcaaggggcacagagcaggaaatactatataattcccttacaattccaagtagggcttctgacacaggtaaaatttgaggcatagtgccaaaaccatttctaagcaggttggtgctcagggtgggatactaccctgctgtgaagtgaaggcacagcagggaagcaggtgtgtcggaggcccatttcttggtattgtggctggagaaacctgtctgtgaccttgggcatttgtctccaagtctattggggtttgagactacagtgggacaatcaagaccagacctgacacaggagtaaaatctgaaagtcctcccagtcctgatcaagagtgaggaaaaatgagacggctgagcccacagaggcagggactcaggagctgatgttcaggggggctctttaaaagttgcattttgtaaacattgttaacgtgcttgctcaattattagaagacagtaagcatttggtaaacattgttaacgtgcttgctcaattatgagaagacagtgaaatcaacataatacaaactgaggccatttacgcggctaaacttttttgcacgtggccgttttaattgctcctgtctttctaaagcaagaggaaatcccattcattaatttctgtcaatcaacaagaaaaggatgacattttttagccatgtagcaatattttattgaggaaaaatctacccctttttggctcttactgtaataagtattcacccatttgatcattaagaaatagattctaagttccaaggacacaactctttcaagtcaaaggcattatgtcattatttaaattgtaatacatgtcagctttgggtcagaacatgtgtttcttaccagttgcctcatgtgtcgtacaagccctatttgggaattgctttcagggctttttcttcagtcagaggggcaaaggctgtaactcaaggaagaaggtgaattttgtcactaattactgtcattgttcagaaggcaataaacactttccttgaacaaggtaataggtgaatcctgcttcctgctccaaccaccagcagaagggtttctcccccacctctgggatcagctaggatagtgtcagtagtttgcttttgtttgcttatgtatgatgtacacgtttgtattattttctttagagaactaagtatatcagaaggcaacagcccataatataagttaaaattgcatgc

SEQ ID NO: 77 - protein, 462 aa, Homo sapiens
PKVSGNQHRVFRLKLPDPNRFALADMSVYNPDKERLVWACRGLEIGRGQPLGVGSTGHPYFNKVKDTENSNAYITFSKDGQNTAFSKDDRLNTSFDPKQIQMFIVGCTPCIGEHWDKAVPCAKNDQQTGLCPPIELKNTYIEDGDMADIGFGNMNFKALQDSRSDVSLDIVNETCKYPDFLKMQNDIYGDACFFYARREQCYARHFFVRGGKTGDDIPGAQIDNGTYKNQFYIPGADGQAQKTIGNAMYFPTVSGSLVSSDAQLFNRPFWLQRAQGHNNGILWANQMFITVVDNTRNTNFSISVYNQAGPLKDVADYNAEQFREYQRHVEEYEISLILQLCKVPLKAEVLAQINAMNSSLLEDWQLGFVPTPDNPIQDTYRYIDSLATRCPDKNPPKEKEDPYKGLHFWDVDLTERLSLDLDQYSLGRKFLFQAGLQHTTVNGTKAVSYKGSNRGTKRKRKN

SEQ ID NO: 78 - DNA, 3471 bp, Homo sapiens
cagattacacttggttgactactccggagcagccactaagagggatgaacaggcctgcgtggaaattgaatgagattcttggaagctcgaagtctggctgtggccatgggagatacagtagtggagcctgcccccttgaagccaacttctgagcccacttctggcccaccagggaataatggggggtccctgctaagtgtcatcacggagggggtcggggaactatcagtgattgaccctgaggtggcccagaaggcctgccaggaggtgttggagaaagtcaagcttttgcatggaggcgtggcagtctctagcagaggcaccccactggagttggtcaatggggatggtgtggacagtgagatccgttgcctagatgatccacctgcccagatcagggaggaggaagatgagatgggggccgctgtggcctcaggcacagccaaaggagcaagaagacggcggcagaacaactcagctaaacagtcttggctgctgaggctgtttgagtcaaaactgtttgacatctccatggccatttcatacctgtataactccaaggagcctggagtacaagcctacattggcaaccggctcttctgctttcgcaacgaggacgtggacttctatctgccccagttgcttaacatgtacatccacatggatgaggacgtgggtgatgccattaagccctacatagtccaccgttgccgccagagcattaacttttccctccagtgtgccctgttgcttggggcctattcttcagacatgcacatttccactcaacgacactcccgtgggaccaagctacggaagctgatcctctcagatgagctaaagccagctcacaggaagagggagctgccctccttgagcccggcccctgacacagggctgtctccctccaaaaggactcaccagcgctctaagtcagatgccactgccagcataagtctcagcagcaacctgaaacgaacagccagcaaccctaaagtggagaatgaggatgaggagctctcctccagcaccgagagtattgataattcattcagttcccctgttcgactggctcctgagagagaattcatcaagtccctgatggcgatcggcaagcggctggccacgctccccaccaaagagcagaaaacacagaggctgatctcagagctctccctgctcaaccataagctccctgcccgagtctggctgcccactgctggctttgaccaccacgtggtccgtgtaccccacacacaggctgttgtcctcaactccaaggacaaggctccctacctgatttatgtggaagtccttgaatgtgaaaactttgacaccaccagtgtccctgcccggatccccgagaaccgaattcggagtacgaggtccgtagaaaacttgcccgaatgtggtattacccatgagcagcgagctggcagcttcagcactgtgcccaactatgacaacgatgatgaggcctggtcggtggatgacataggcgagctgcaagtggagctccccgaagtgcataccaacagctgtgacaacatctcccagttctctgtggacagcatcaccagccaggagagcaaggagcctgtgttcattgcagcaggggacatccgccggcgcctttcggaacagctggctcataccccgacagccttcaaacgagacccagaagatccttctgcagttgctctcaaagagccctggcaggagaaagtacggcggatcagagagggctccccctacggccatctccccaattggcggctcctgtcagtcattgtcaagtgtggggatgaccttcggcaagagcttctggcctttcaggtgttgaagcaactgcagtccatttgggaacaggagcgagtgcccctttggatcaagccatacaagattcttgtgatttcggctgatagtggcatgattgaaccagtggtcaatgctgtgtccatccatcaggtgaagaaacagtcacagctctccttgctcgattacttcctacaggagcacggcagttacaccactgaggcattcctcagtgcacagcgcaattttgtgcaaagttgtgctgggtactgcttggtctgctacctgctgcaagtcaaggacagacacaatgggaatatccttttggacgcagaaggccacatcatccacatcgactttggcttcatcctctccagctcaccccgaaatctgggctttgagacgtcagcctttaagctgaccacagagtttgtggatgtgatgggcggcctggatggcgacatgttcaactactataagatgctgatgctgcaagggctgattgccgctcggaaacacatggacaaggtggtgcagatcgtggagatcatgcagcaaggttctcagcttccttgcttccatggctccagcaccattcgaaacctcaaagagaggttccacatgagcatgactgaggagcagctgcagctgctggtggagcagatggtggatggcagtatgcggtctatcaccaccaaactctatgacggcttccagtacctcaccaacggcatcatgtgacacgctcctcagcccaggagtggtggggggtccggggcaccctccctagagggcccttgtctgagaaaccccaaaccaggaaaccccacctacccaaccatccacccaagggaaatggaaggcaagaaacacgaaggatcatgtggtaactgcgagagcttgctgaggggtgggagagccagctgtggggtccagacttgttggggcttccctgcccctcctggtctgtgtcagtattaccaccagactgactccaggactcactgccctccagaaaacagaggtgacaaatgtgagggacactggggcctttcttctccttgtaggggtctctcagaggttctttccacaggccatcctcttattccgttctggggcccaggaagtggggaagagtaggttctcggtacttaggacttgatcctgtggttggccactggccatgctgctgcccagctctacccctcccagggacctacccctcccagggaccgacccctggcccaagctccccttgctggcgggcgctgcgtgggccctgcacttgctgaggttccccatcatgggcaaggaagggaattcccacagccctccagtgtactgagggtactggcctagccatgtggaattccctaccctgactccttccccaaacccagggaaaagagctctcaattttttatttttaatttttgtttgaaataaagtccttagttagccacttgtgtcatttccaggttttctgggggagtgcagggggagatgggtgatgaggtatgaacggatgcctcagtgtccaagatacaaaaggcaccacatagaagtttgctttttccctgcctgtcttggtcactaccacctcttccctgagaagggcgggccttccatgttctctcacccgcttcaactccacat

SEQ ID NO: 79 - protein, 828 aa, Homo sapiens
MRFLEARSLAVAMGDTVVEPAPLKPTSEPTSGPPGNNGGSLLSVITEGVGELSVIDPEVAQKACQEVLEKVKLLHGGVAVSSRGTPLELVNGDGVDSEIRCLDDPPAQIREEEDEMGAAVASGTAKGARRRRQNNSAKQSWLLRLFESKLFDISMAISYLYNSKEPGVQAYIGNRLFCFRNEDVDFYLPQLLNMYIHMDEDVGDAIKPYIVHRCRQSINFSLQCALLLGAYSSDMHISTQRHSRGTKLRKLILSDELKPAHRKRELPSLSPAPDTGLSPSKRTHQRSKSDATASISLSSNLKRTASNPKVENEDEELSSSTESIDNSFSSPVRLAPEREFIKSLMAIGKRLATLPTKEQKTQRLISELSLLNHKLPARVWLPTAGFDHHVVRVPHTQAVVLNSKDKAPYLIYVEVLECENFDTTSVPARIPENRIRSTRSVENLPECGITHEQRAGSFSTVPNYDNDDEAWSVDDIGELQVELPEVHTNSCDNISQFSVDSITSQESKEPVFIAAGDIRRRLSEQLAHTPTAFKRDPEDPSAVALKEPWQEKVRRIREGSPYGHLPNWRLLSVIVKCGDDLRQELLAFQVLKQLQSIWEQERVPLWIKPYKILVISADSGMIEPVVNAVSIHQVKKQSQLSLLDYFLQEHGSYTTEAFLSAQRNFVQSCAGYCLVCYLLQVKDRHNGNILLDAEGHIIHIDFGFILSSSPRNLGFETSAFKLTTEFVDVMGGLDGDMFNYYKMLMLQGLIAARKHMDKVVQIVEIMQQGSQLPCFHGSSTIRNLKERFHMSMTEEQLQLLVEQMVDGSMRSITTKLYDGFQYLTNGIM

SEQ ID NO: 80 - DNA, 3963 bp, Homo sapiens
cctgcgtgtccctctgcgctccgactggtgcgacttctccctgcgctagcgaggcagggttttggcctcgcctctcgcgagatcgcctcctgttgctgccgccgccgctcctggccactgactggcggcgcctgcgcagccgccatgttcggttgctatgctgcggcctaggagagggggtgtgcttgagggaggaggaagagatagaggaggaggagggggaggaagaggaggtggagaaggaggggggtgactgagctcctcttgcactctcacacacaaacgctgcccaggattacccgccagctcacgccgcgcagtgcgcttttccgctcctcgcgccccaccaccaacattgttctctcaggactcctgggtcccaggggtcggaattgggcctgagcgggagaggaaagagacttggctttggccgcggggtcggaggattggggccaggccccctcccccacgcacttttgggggtgtggattatctcatccctgcagggaggtaggagaggtcgccggctgcccgcctccctgccacctccccagcggcgccggcccgcggctgcccagcagcatgaggtggtgctggcggctccgggtcgtggcgcgaccgctgcggcggcggctgctcggggggcgctgaggtagccccccggagcggcacggaggacgcgcttctcctctgcgcgccggggcctcgaggctttttttctccagccgagaggacgcggctgtgatatacgaagactttgtgtggacagtaatgacctcacgtttccgattgcctgctggcagaacctacaatgtacgagcatcagagttggcccgagacagacagcatactgaagtggtttgcaacatccttcttctggataacactgtacaagctttcaaagtcaataaacatgatcaggggcaagtcttgttggatgtcgtcttcaagcatctagatttgactgagcaggactattttggtttacagttggctgatgattccacagataacccaaggtggctggatccaaacaaaccaataaggaagcagctaaagagaggatctccttacagtttgaactttagagtcaaattttttgtaagtgaccccaacaagttacaagaagaatatacaaggtaccagtattttttgcaaattaaacaagacattcttactggaagattaccctgtccttctaatactgctgcccttttagcttcatttgctgttcagtctgaacttggagactacgatcagtcagagaacttgtcaggctacctctcagattattctttcattcctaatcaacctcaagattttgaaaaagaaattgcaaaattacatcagcaacacataggcttatctcctgcagaagcagaatttaattacctaaacacagcacgtaccttagaactctatggagttgaattccactatgcaagggatcagagtaacaatgaaattatgattggagtgatgtcaggaggaattctgatttataagaacagggtacgaatgaatacctttccatggttgaagattgtaaaaatttcttttaagtgcaaacagttttttattcaacttagaaaagaattgcatgaatctagagaaacattattgggatttaatatggtgaattacagagcatgtaaaaatttgtggaaagcatgtgtagaacatcacacattcttccgtttggacagaccacttccacctcaaaagaatttttttgcacattattttacattaggttcaaaattccggtactgtgggagaactgaagtccaatcagttcagtatggcaaagaaaaggcaaataaagacagggtatttgcaagatccccaagtaagcccttggcacggaaattaatggattgggaagtagtaagcagaaattcaatatctgatgacaggttagaaacacaaagtcttccatcacgatctccaccgggaactcctaatcatcgaaattctacattcacgcaggaaggaacccggttacgaccatcttcagttggtcatttggtagaccatatggttcatacttccccaagcgaagtgtttgtaaatcagagatctccgtcatcaacacaagctaatagcattgttctggaatcatcaccatcacaagagacccctggagatgggaagcctccagctttaccacccaaacagtcaaagaaaaacagttggaaccaaattcattattcacattcgcaacaagatctagaaagtcatattaatgaaacatttgatattccatcttctcctgaaaaacccactcctaatggtggtattccacatgataatcttgtcctaatcagaatgaaacctgatgaaaatgggaggtttggattcaatgtaaagggaggatatgatcagaagatgcctgtgattgtgtctcgagtagcaccaggaacacctgctgacctctgtgtccctagactgaatgaaggggaccaagttgtactgatcaatggtcgggacattgcagaacacactcatgatcaggttgtgctgtttattaaagctagttgtgagagacattctggggaactcatgcttctagttcgacctaatgctgtatatgatgtagtggaagaaaagctagaaaatgagccagatttccagtatattcctgagaaagccccactagatagtgtgcatcaggatgaccattccctgcgggagtcaatgatccagctagctgaggggcttatcactggaacagtcctgacacagtttgatcaactgtatcggaaaaaacctggaatgacaatgtcctgtgccaaattacctcagaatatttccaaaaatagatacagagatatttcgccttatgatgccacacgggtcattttaaaaggtaatgaagactacatcaatgcgaactatataaatatggaaattccttcttccagcattataaatcagtacattgcttgtcaagggccattaccacacacttgtacagatttttggcagatgacttgggaacaaggctcctctatggttgtaatgttgaccacacaagttgaacgtggcagagttaaatgtcaccaatattggccagaacccacaggcagttcatcttatggatgctaccaagttacctgccactctgaagaaggaaacactgcctatatcttcaggaagatgaccctatttaaccaagagaaaaatgaaagtcgtccactcactcagatccagtacatagcctggcctgaccatggagtccctgatgattcgagtgactttctagattttgtttgtcatgtacgaaacaagagggctggcaaggaagaacccgttgttgtccattgcagtgctggaatcggaagaactggggttcttattactatggaaacagccatgtgtctcattgaatgcaatcagccagtttatccactagatattgtaagaacaatgagagatcagcgagccatgatgatccaaacacctagtcaatacagatttgtatgtgaagctattttgaaagtttatgaagaaggctttgttaaacccttaacaacatcaacaaataaataagaaagcaaaaagatctgggatatgtgttggaaaactgctttcccttatgttcactgtgccataatgctgctcgcaggaaatggcattttacaaaaaaaaaatgaagaactcaaaaaaactttgaaaacttcagcactgttgcactttatgttttaaaaaatgtcactctttcaaaatctataactcatgtatttgaagactgtttcatgctttgctccgaacaaatagtaaataactgagtatgttcagggtaatttatgaaattttgtggtggtgccatgcaatccccttttggtagaattgccacaaacaaggctcaaaattctcatcatctctgttatacacctgtatcatgaaagcaaaaagaagtaaacatcaggagtcagctctgaaaaaaaaaaaaaaaaaaaa

SEQ ID NO: 81 - protein, 926 aa, Homo sapiens
MTSRFRLPAGRTYNVRASELARDRQHTEVVCNILLLDNTVQAFKVNKHDQGQVLLDVVFKHLDLTEQDYFGLQLADDSTDNPRWLDPNKPIRKQLKRGSPYSLNFRVKFFVSDPNKLQEEYTRYQYFLQIKQDILTGRLPCPSNTAALLASFAVQSELGDYDQSENLSGYLSDYSFIPNQPQDFEKEIAKLHQQHIGLSPAEAEFNYLNTARTLELYGVEFHYARDQSNNEIMIGVMSGGILIYKNRVRMNTFPWLKIVKISFKCKQFFIQLRKELHESRETLLGFNMVNYRACKNLWKACVEHHTFFRLDRPLPPQKNFFAHYFTLGSKFRYCGRTEVQSVQYGKEKANKDRVFARSPSKPLARKLMDWEVVSRNSISDDRLETQSLPSRSPPGTPNHRNSTFTQEGTRLRPSSVGHLVDHMVHTSPSEVFVNQRSPSSTQANSIVLESSPSQETPGDGKPPALPPKQSKKNSWNQIHYSHSQQDLESHINETFDIPSSPEKPTPNGGIPHDNLVLIRMKPDENGRFGFNVKGGYDQKMPVIVSRVAPGTPADLCVPRLNEGDQVVLINGRDIAEHTHDQVVLFIKASCERHSGELMLLVRPNAVYDVVEEKLENEPDFQYIPEKAPLDSVHQDDHSLRESMIQLAEGLITGTVLTQFDQLYRKKPGMTMSCAKLPQNISKNRYRDISPYDATRVILKGNEDYINANYINMEIPSSSIINQYIACQGPLPHTCTDFWQMTWEQGSSMVVMLTTQVERGRVKCHQYWPEPTGSSSYGCYQVTCHSEEGNTAYIFRKMTLFNQEKNESRPLTQIQYIAWPDHGVPDDSSDFLDFVCHVRNKRAGKEEPVVVHCSAGIGRTGVLITMETAMCLIECNQPVYPLDIVRTMRDQRAMMIQTPSQYRFVCEAILKVYEEGFVKPLTTSTNK

SEQ ID NO: 82 - DNA, 1550 bp, Homo sapiens
tgccgccgtcccgcccgccagcgccccagcgaggaagcagcgcgcagcccgcggcccagcgcacccgcagcagcgcccgcagctcgtccgcgccatgttccaggcggccgagcgcccccaggagtgggccatggagggcccccgcgacgggctgaagaaggagcggctactggacgaccgccacgacagcggcctggactccatgaaagacgaggagtacgagcagatggtcaaggagctgcaggagatccgcctcgagccgcaggaggtgccgcgcggctcggagccctggaagcagcagctcaccgaggacggggactcgttcctgcacttggccatcatccatgaagaaaaggcactgaccatggaagtgatccgccaggtgaagggagacctggctttcctcaacttccagaacaacctgcagcagactccactccacttggctgtgatcaccaaccagccagaaattgctgaggcacttctgggagctggctgtgatcctgagctccgagactttcgaggaaatacccccctacaccttgcctgtgagcagggctgcctggccagcgtgggagtcctgactcagtcctgcaccaccccgcacctccactccatcctgaaggctaccaactacaatggccacacgtgtctacacttagcctctatccatggctacctgggcatcgtggagcttttggtgtccttgggtgctgatgtcaatgctcaggagccctgtaatggccggactgcccttcacctcgcagtggacctgcaaaatcctgacctggtgtcactcctgttgaagtgtggggctgatgtcaacagagttacctaccagggctattctccctaccagctcacctggggccgcccaagcacccggatacagcagcagctgggccagctgacactagaaaaccttcagatgctgccagagagtgaggatgaggagagctatgacacagagtcagagttcacggagttcacagaggacgagctgccctatgatgactgtgtgtttggaggccagcgtctgacgttatgagtgcaaaggggctgaaagaacatggacttgtatatttgtacaaaaaaaaagttttatttttctaaaaaaagaaaaaagaagaaaaaatttaaagggtgtacttatatccacactgcacactgcctagcccaaaacgtcttattgtggtaggatcagccctcattttgttgcttttgtgaactttttgtaggggacgagaaagatcattgaaattctgagaaaacttcttttaaacctcacctttgtggggtttttggagaaggttatcaaaaatttcatggaaggaccacattttatatttattgtgcttcgagtgactgaccccagtggtatcctgtgacatgtaacagccaggagtgttaagcgttcagtgatgtggggtgaaaagttactacctgtcaaggtttgtgttaccctcctgtaaatggtgtacataatgtattgttggtaattattttggtacttttatgatgtatatttattaaagagatttttacaaatg

SEQ ID NO: 83 - protein, 317 aa, Homo sapiens
MFQAAERPQEWAMEGPRDGLKKERLLDDRHDSGLDSMKDEEYEQMVKELQEIRLEPQEVPRGSEPWKQQLTEDGDSFLHLAIIHEEKALTMEVIRQVKGDLAFLNFQNNLQQTPLHLAVITNQPEIAEALLGAGCDPELRDFRGNTPLHLACEQGCLASVGVLTQSCTTPHLHSILKATNYNGHTCLHLASIHGYLGIVELLVSLGADVNAQEPCNGRTALHLAVDLQNPDLVSLLLKCGADVNRVTYQGYSPYQLTWGRPSTRIQQQLGQLTLENLQMLPESEDEESYDTESEFTEFTEDELPYDDCVFGGQRLTL

SEQ ID NO: 84 - DNA, 1550 bp, Homo sapiens
gtagtggtgccgacttcctgttgtttgaggccgggttgggggtgtgcgattgtgtgggacggtctggggcagcccagcagcggctgaccctctgcctgcggggaagggagtcgccaggcggccgtcatggcggtgtcggagagccagctcaagaaaatggtgtccaagtacaaatacagagacctaactgtacgtgaaactgtcaatgttattactctatacaaagatctcaaacctgttttggattcatatgtttttaacgatggcagttccagggaactaatgaacctcactggaacaatccctgtgccttatagaggtaatacatacaatattccaatatgcctatggctactggacacatacccatataatccccctatctgttttgttaagcctactagttcaatgactattaaaacaggaaagcatgttgatgcaaatgggaagatatatcttccttatctacatgaatggaaacacccacagtcagacttgttggggcttattcaggtcatgattgtggtatttggagatgaacctccagtcttctctcgtcctatttcggcatcctatccgccataccaggcaacggggccaccaaatacttcctacatgccaggcatgccaggtggaatctctccatacccatccggataccctcccaatcccagtggttacccaggctgtccttacccacctggtggtccatatcctgccacaacaagttctcagtacccttctcagcctcctgtgaccactgttggtcccagtagggatggcacaatcagcgaggacaccatccgagcctctctcatctctgcggtcagtgacaaactgagatggcggatgaaggaggaaatggatcgtgcccaggcagagctcaatgccttgaaacgaacagaagaagacctgaaaaagggtcaccagaaactggaagagatggttacccgtttagatcaagaagtagccgaggttgataaaaacatagaacttttgaaaaagaaggatgaagaactcagttctgctctggaaaaaatggaaaatcagtctgaaaacaatgatatcgatgaagttatcattcccacagctcccttatacaaacagatcctgaatctgtatgcagaagaaaacgctattgaagacactatcttttacttgggagaagccttgagaaggggcgtgatagacctggatgtcttcctgaagcatgtacgtcttctgtcccgtaaacagttccagctgagggcactaatgcaaaaagcaagaaagactgccggtctcagtgacctctactgacttctctgataccagctggaggttgagctcttcttaaagtattcttctcttccttttatcagtaggtgcccagaataagttattgcagtttatcattcaagtgtaaaatattttgaatcaataatatattttctgttttcttttggtaaagactggcttttattaatgcactttctatcctctgtaaactttttgtgctgaatgttgggactgctaaataaaatttgttgcataaaaaaaaaaaaaaaaaa

SEQ ID NO: 85 - protein, 390 aa, Homo sapiens
MAVSESQLKKMVSKYKYRDLTVRETVNVITLYKDLKPVLDSYVFNDGSSRELMNLTGTIPVPYRGNTYNIPICLWLLDTYPYNPPICFVKPTSSMTIKTGKHVDANGKIYLPYLHEWKHPQSDLLGLIQVMIVVFGDEPPVFSRPISASYPPYQATGPPNTSYMPGMPGGISPYPSGYPPNPSGYPGCPYPPGGPYPATTSSQYPSQPPVTTVGPSRDGTISEDTIRASLISAVSDKLRWRMKEEMDRAQAELNALKRTEEDLKKGHQKLEEMVTRLDQEVAEVDKNIELLKKKDEELSSALEKMENQSENNDIDEVIIPTAPLYKQILNLYAEENAIEDTIFYLGEALRRGVIDLDVFLKHVRLLSRKQFQLRALMQKARKTAGLSDLY

SEQ ID NO: 86 - DNA, 3225 bp, Homo sapiens
ggcggcagcgccctgccgacgccggggagggacgcaggcaggcggcgggcagcgggaggcggcaccccggtgctccccgcggctctcggcggagccccgccgcccgccgcgccatggcccgaagaccccggcacagcatatatagcagtgacgaggatgatgaggactttgagatgtgtgaccatgactatgatgggctgcttcccaagtctggaaagcgtcacttggggaaaacaaggtggacccgggaagaggatgaaaaactgaagaagctggtggaacagaatggaacagatgactggaaagttattgccaattatctcccgaatcgaacagatgtgcagtgccagcaccgatggcagaaagtactaaaccctgagctcatcaagggtccttggaccaaagaagaagatcagagagtgatagagcttgtacagaaatacggtccgaaacgttggtctgttattgccaagcacttaaaggggagaattggaaaacaatgtagggagaggtggcataaccacttgaatccagaagttaagaaaacctcctggacagaagaggaagacagaattatttaccaggcacacaagagactggggaacagatgggcagaaatcgcaaagctactgcctggacgaactgataatgctatcaagaaccactggaattctacaatgcgtcggaaggtcgaacaggaaggttatctgcaggagtcttcaaaagccagccagccagcagtggccacaagcttccagaagaacagtcatttgatgggttttgctcaggctccgcctacagctcaactccctgccactggccagcccactgttaacaacgactattcctattaccacatttctgaagcacaaaatgtctccagtcatgttccataccctgtagcgttacatgtaaatatagtcaatgtccctcagccagctgccgcagccattcagagacactataatgatgaagaccctgagaaggaaaagcgaataaaggaattagaattgctcctaatgtcaaccgagaatgagctaaaaggacagcaggtgctaccaacacagaaccacacatgcagctaccccgggtggcacagcaccaccattgccgaccacaccagacctcatggagacagtgcacctgtttcctgtttgggagaacaccactccactccatctctgccagcggatcctggctccctacctgaagaaagcgcctcgccagcaaggtgcatgatcgtccaccagggcaccattctggataatgttaagaacctcttagaatttgcagaaacactccaatttatagattctttcttaaacacttccagtaaccatgaaaactcagacttggaaatgccttctttaacttccacccccctcattggtcacaaattgactgttacaacaccatttcatagagaccagactgtgaaaactcaaaaggaaaatactgtttttagaaccccagctatcaaaaggtcaatcttagaaagctctccaagaactcctacaccattcaaacatgcacttgcagctcaagaaattaaatacggtcccctgaagatgctacctcagacaccctctcatctagtagaagatctgcaggatgtgatcaaacaggaatctgatgaatctggatttgttgctgagtttcaagaaaatggaccacccttactgaagaaaatcaaacaagaggtggaatctccaactgataaatcaggaaacttcttctgctcacaccactgggaaggggacagtctgaatacccaactgttcacgcagacctcgcctgtgcgagatgcaccgaatattcttacaagctccgttttaatggcaccagcatcagaagatgaagacaatgttctcaaagcatttacagtacctaaaaacaggtccctggcgagccccttgcagccttgtagcagtacctgggaacctgcatcctgtggaaagatggaggagcagatgacatcttccagtcaagctcgtaaatacgtgaatgcattctcagcccggacgctggtcatgtgagacatttccagaaaagcattatggttttcagaacagttcaagttgacttgggatatatcattcctcaacatgaaacttttcatgaatgggagaagaacctatttttgttgtggtacaacagttgagagcacgaccaagtgcatttagttgaatgaagtcttcttggatttcacccaactaaaaggatttttaaaaataaataacagtcttacctaaattattaggtaatgaattgtagccagttgttaatatcttaatgcagatttttttaaaaaaaaacataaaatgatttatctggtattttaaaggatccaacagatcagtattttttcctgtgatgggttttttgaaatttgacacattaaaaggtactccagtatttcacttttctcgatcactaaacatatgcatatatttttaaaaatcagtaaaagcattactctaagtgtagacttaataccatgtgacatttaatccagattgtaaatgctcatttatggttaatgacattgaaggtacatttattgtaccaaaccattttatgagttttctgttagcttgctttaaaaattattactgtaagaaatagttttataaaaaattatatttttattcagtaatttaattttgtaaatgccaaatgaaaaacgttttttgctgctatggtcttagcctgtagacatgctgctagtatcagaggggcagtagagcttggacagaaagaaaagaaacttggtgttaggtaattgactatgcactagtatttcagactttttaattttatatatatatacattttttttccttctgcaatacatttgaaaacttgtttgggagactctgcattttttattgtggtttttttgttattgttggtttatacaagcatgcgttgcacttcttttttgggagatgtgtgttgttcatgttctatgttttgttttgtgtgtagcctgactgttttataatttgggagttctcgatttgatccgcatcccctgtggtttctaagtgtatggtctcagaactgttgcatggatcctgtgtttgcaactggggagacagaaactgtggttgatagccagtcactgccttaagaacatttgatgcaagatggccagcactgaacttttgagatatgacggtgtacttactgccttgtagcaaaataaagatgtgcccttatttt

SEQ ID NO: 87 - protein, 640 aa, Homo sapiens
MARRPRHSIYSSDEDDEDFEMCDHDYDGLLPKSGKRHLGKTRWTREEDEKLKKLVEQNGTDDWKVIANYLPNRTDVQCQHRWQKVLNPELIKGPWTKEEDQRVIELVQKYGPKRWSVIAKHLKGRIGKQCRERWHNHLNPEVKKTSWTEEEDRIIYQAHKRLGNRWAEIAKLLPGRTDNAIKNHWNSTMRRKVEQEGYLQESSKASQPAVATSFQKNSHLMGFAQAPPTAQLPATGQPTVNNDYSYYHISEAQNVSSHVPYPVALHVNIVNVPQPAAAAIQRHYNDEDPEKEKRIKELELLLMSTENELKGQQVLPTQNHTCSYPGWHSTTIADHTRPHGDSAPVSCLGEHHSTPSLPADPGSLPEESASPARCMIVHQGTILDNVKNLLEFAETLQFIDSFLNTSSNHENSDLEMPSLTSTPLIGHKLTVTTPFHRDQTVKTQKENTVFRTPAIKRSILESSPRTPTPFKHALAAQEIKYGPLKMLPQTPSHLVEDLQDVIKQESDESGFVAEFQENGPPLLKKIKQEVESPTDKSGNFFCSHHWEGDSLNTQLFTQTSPVRDAPNILTSSVLMAPASEDEDNVLKAFTVPKNRSLASPLQPCSSTWEPASCGKMEEQMTSSSQARKYVNAFSARTLVM

SEQ ID NO: 88 - DNA, 3643 bp, Homo sapiens
ggagtatgagtcacgctcaggggagcaggtaccccttctcctaaagatgaagaggagcaaactggcactaagcaaggccatcgagagcggggacactgacctggtgttcacggtgttgctgcacctgaagaacgagctgaaccgaggagattttttcatgacccttcggaatcagcccatggccctcagtttgtaccgacagttctgtaagcatcaggagctagagacgctgaaggacctttacaatcaggatgacaatcaccaggaattgggcagcttccacatccgagccagctatgctgcagaagagcgtattgaggggcgagtagcagctctgcagacagccgccgatgccttctacaaggccaagaatgagtttgcagccaaggctacagaggatcaaatgcggctcctacggctgcagcggcgcctagaagacgagctggggggccagttcctagacctgtctctacatgacacagttaccaccctcattcttggcggtcacaacaagcgtgcagagcagctggcacgtgacttccgcatccctgacaagaggtgacacaactaaaaaaaaacaaaggtatttatggaattccactgagtggtaatggatgatgcagttcaaataactaaggacacatgttcaaagagcataattaactttttaaaagaagctaataagcatggattcctggttcattcttgttctgctcggcagtggtctgatatgtgtcagtgccaacaatgctaccacagttgcaccttctgtaggaattacaagattaattaactcatcaacggcagaaccagttaaagaagaggccaaaacttcaaatccaacttcttcactaacttctctttctgtggcaccaacattcagcccaaatataactctgggacccacctatttaaccactgtcaattcttcagactctgacaatgggaccacaagaacagcaagcaccaattctataggcattacaatttcaccaaatggaacgtggcttccagataaccagttcacggatgccagaacagaaccctgggaggggaattccagcaccgcagcaaccactccagaaactttccctccttcaggtaattctgactcgaaggacagaagagatgagacaccaattattgcggtgatggtggccctgtcctctctgctagtgatcgtgtttattatcatagttttgtacatgttaaggtttaagaaatacaagcaagctgggagccattccaattctttccgcttatccaacggccgcactgaggatgtggagccccagagtgtgccacttctggccagatccccaagcaccaacaggaaatacccacccctgcccgtggacaagctggaagaggaaattaaccggagaatggcagacgacaataagctcttcagggaggaattcaacgctctccctgcatgtcctatccaggccacctgtgaggctgcttccaaggaggaaaacaaggaaaaaaatcgatatgtaaacatcttgccttatgaccactctagagtccacctgacaccggttgaaggggttccagattctgattacatcaatgcttcattcatcaacggttaccaagaaaagaacaaattcattgctgcacaaggaccaaaagaagaaacggtgaatgatttctggcggatgatctgggaacaaaacacagccaccatcgtcatggttaccaacctgaaggagagaaaggagtgcaagtgcgcccagtactggccagaccaaggctgctggacctatgggaatattcgggtgtctgtagaggatgtgactgtcctggtggactacacagtacggaagttctgcatccagcaggtgggcgacatgaccaacagaaagccacagcgcctcatcactcagttccactttaccagctggccagactttggggtgccttttaccccgatcggcatgctcaagttcctcaagaaggtgaaggcctgtaaccctcagtatgcaggggccatcgtggtccactgcagtgcaggtgtagggcgtacaggtacctttgtcgtcattgatgccatgctggacatgatgcatacagaacggaaggtggacgtgtatggctttgtgagccggatccgggcacagcgctgccagatggtgcaaaccgatatgcagtatgtcttcatataccaagcccttctggagcattatctctatggagatacagaactggaagtgacctctctagaaacccacctgcagaaaatttacaacaaaatcccagggaccagcaacaatggattagaggaggagtttaagaagttaacatcaatcaaaatccagaatgacaagatgcggactggaaaccttccagccaacatgaagaagaaccgtgttttacagatcattccatatgaattcaacagagtgatcattccagttaagcggggcgaagagaatacagactatgtgaacgcatcctttattgatggctaccggcagaaggactcctatatcgccagccagggccctcttctccacacaattgaggacttctggcgaatgatctgggagtggaaatcctgctctatcgtgatgctaacagaactggaggagagaggccaggagaagtgtgcccagtactggccatctgatggactggtgtcctatggagatattacagtggaactgaagaaggaggaggaatgtgagagctacaccgtccgagacctcctggtcaccaacaccagggagaataagagccggcagatccggcagttccacttccatggctggcctgaagtgggcatccccagtgacggaaagggcatgatcagcatcatcgccgccgtgcagaagcagcagcagcagtcagggaaccaccccatcaccgtgcactgcagcgccggggcaggaaggacggggaccttctgtgccctgagcaccgtcctggagcgtgtgaaagcagaggggattttggatgtcttccagactgtcaagagcctgcggctacagaggccacacatggtccagacactggaacagtatgagttctgctacaaggtggtgcaggagtatattgatgcattctcagattatgccaacttcaagtaagcggcaacaagggtccgtggaccaggaggattgcctttaatattttgtaatattctgttttgttaatataccccaaattgtgtatatatcttataactgttttagaaattggtacataggcttctattacctattaggtggaaattttatatgtaaatgtgttagcactgatagtcctttttccaatgttttattggggaattaaatagtgtgatgtttggattgatatcgtgaaatcctcagccgagaaattgggctggattgtgctttggttaatacatctttccctaaagaagataaacacaaaatccattccaggtagctcggcaccaactaagaaaaaaagcacaaagttctcagagctctcgaggaaagtggttgtccccgtaccaccatgcactgtaaatatccctcccctctctccctggtcccctcccccatccccaccactgatatcatggggagtaataggaccagagcggtatctctggcaccacactagggactatcaggtaataaaagctttgactccctgaaaaaaaaaaaaa

SEQ ID NO: 89 - protein, 802 aa, Homo sapiens
MDSWFILVLLGSGLICVSANNATTVAPSVGITRLINSSTAEPVKEEAKTSNPTSSLTSLSVAPTFSPNITLGPTYLTTVNSSDSDNGTTRTASTNSIGITISPNGTWLPDNQFTDARTEPWEGNSSTAATTPETFPPSGNSDSKDRRDETPIIAVMVALSSLLVIVFIIIVLYMLRFKKYKQAGSHSNSFRLSNGRTEDVEPQSVPLLARSPSTNRKYPPLPVDKLEEEINRRMADDNKLFREEFNALPACPIQATCEAASKEENKEKNRYVNILPYDHSRVHLTPVEGVPDSDYINASFINGYQEKNKFIAAQGPKEETVNDFWRMIWEQNTATIVMVTNLKERKECKCAQYWPDQGCWTYGNIRVSVEDVTVLVDYTVRKFCIQQVGDMTNRKPQRLITQFHFTSWPDFGVPFTPIGMLKFLKKVKACNPQYAGAIVVHCSAGVGRTGTFVVIDAMLDMMHTERKVDVYGFVSRIRAQRCQMVQTDMQYVFIYQALLEHYLYGDTELEVTSLETHLQKIYNKIPGTSNNGLEEEFKKLTSIKIQNDKMRTGNLPANMKKNRVLQIIPYEFNRVIIPVKRGEENTDYVNASFIDGYRQKDSYIASQGPLLHTIEDFWRMIWEWKSCSIVMLTELEERGQEKCAQYWPSDGLVSYGDITVELKKEEECESYTVRDLLVTNTRENKSRQIRQFHFHGWPEVGIPSDGKGMISIIAAVQKQQQQSGNHPITVHCSAGAGRTGTFCALSTVLERVKAEGILDVFQTVKSLRLQRPHMVQTLEQYEFCYKVVQEYIDAFSDYANFK

SEQ ID NO: 90 - DNA, 3279 bp, Homo sapiens
gcgctcggaccccggccgctgccgccatcactgtcgcccgcccagtcgcccctcagccgcttcccctcgccatggaggcgaggccgccgccgccgccgcggggctcggagccgcgggccgggcggcggccctgagggctagtggcggcccgaaacgccgccgcggagccgaggcggagccgctgtcctcgtccccagcggtcccgcccaacgcccgactctgtgacacaactaaaaaaaaacaaaggtatttatggaattccactgagtggtaatggatgatgcagttcaaataactaaggacacatgttcaaagagcataattaactttttaaaagaagctaataagcatggattcctggttcattcttgttctgctcggcagtggtctgatatgtgtcagtgccaacaatgctaccacagttgcaccttctgtaggaattacaagattaattaactcatcaacggcagaaccagttaaagaagaggccaaaacttcaaatccaacttcttcactaacttctctttctgtggcaccaacattcagcccaaatataactctgggacccacctatttaaccactgtcaattcttcagactctgacaatgggaccacaagaacagcaagcaccaattctataggcattacaatttcaccaaatggaacgtggcttccagataaccagttcacggatgccagaacagaaccctgggaggggaattccagcaccgcagcaaccactccagaaactttccctccttcagatgagacaccaattattgcggtgatggtggccctgtcctctctgctagtgatcgtgtttattatcatagttttgtacatgttaaggtttaagaaatacaagcaagctgggagccattccaattctttccgcttatccaacggccgcactgaggatgtggagccccagagtgtgccacttctggccagatccccaagcaccaacaggaaatacccacccctgcccgtggacaagctggaagaggaaattaaccggagaatggcagacgacaataagctcttcagggaggaattcaacgctctccctgcatgtcctatccaggccacctgtgaggctgcttccaaggaggaaaacaaggaaaaaaatcgatatgtaaacatcttgccttatgaccactctagagtccacctgacaccggttgaaggggttccagattctgattacatcaatgcttcattcatcaacggttaccaagaaaagaacaaattcattgctgcacaaggaccaaaagaagaaacggtgaatgatttctggcggatgatctgggaacaaaacacagccaccatcgtcatggttaccaacctgaaggagagaaaggagtgcaagtgcgcccagtactggccagaccaaggctgctggacctatgggaatattcgggtgtctgtagaggatgtgactgtcctggtggactacacagtacggaagttctgcatccagcaggtgggcgacatgaccaacagaaagccacagcgcctcatcactcagttccactttaccagctggccagactttggggtgccttttaccccgatcggcatgctcaagttcctcaagaaggtgaaggcctgtaaccctcagtatgcaggggccatcgtggtccactgcagtgcaggtgtagggcgtacaggtacctttgtcgtcattgatgccatgctggacatgatgcatacagaacggaaggtggacgtgtatggctttgtgagccggatccgggcacagcgctgccagatggtgcaaaccgatatgcagtatgtcttcatataccaagcccttctggagcattatctctatggagatacagaactggaagtgacctctctagaaacccacctgcagaaaatttacaacaaaatcccagggaccagcaacaatggattagaggaggagtttaagaagttaacatcaatcaaaatccagaatgacaagatgcggactggaaaccttccagccaacatgaagaagaaccgtgttttacagatcattccatatgaattcaacagagtgatcattccagttaagcggggcgaagagaatacagactatgtgaacgcatcctttattgatggctaccggcagaaggactcctatatcgccagccagggccctcttctccacacaattgaggacttctggcgaatgatctgggagtggaaatcctgctctatcgtgatgctaacagaactggaggagagaggccaggagaagtgtgcccagtactggccatctgatggactggtgtcctatggagatattacagtggaactgaagaaggaggaggaatgtgagagctacaccgtccgagacctcctggtcaccaacaccagggagaataagagccggcagatccggcagttccacttccatggctggcctgaagtgggcatccccagtgacggaaagggcatgatcagcatcatcgccgccgtgcagaagcagcagcagcagtcagggaaccaccccatcaccgtgcactgcagcgccggggcaggaaggacggggaccttctgtgccctgagcaccgtcctggagcgtgtgaaagcagaggggattttggatgtcttccagactgtcaagagcctgcggctacagaggccacacatggtccagacactggaacagtatgagttctgctacaaggtggtgcaggagtatattgatgcattctcagattatgccaacttcaagtaagcggcaacaagggtccgtggaccaggaggattgcctttaatattttgtaatattctgttttgttaatataccccaaattgtgtatatatcttataactgttttagaaattggtacataggcttctattacctattaggtggaaattttatatgtaaatgtgttagcactgatagtcctttttccaatgttttattggggaattaaatagtgtgatgtttggattgatatcgtgaaatcctcagccgagaaattgggctggattgtgctttggttaatacatctttccctaaagaagataaacacaaaatccattccaggtagctcggcaccaactaagaaaaaaagcacaaagttctcagagctctcgaggaaagtggttgtccccgtaccaccatgcactgtaaatatccctcccctctctccctggtcccctcccccatccccaccactgatatcatggggagtaataggaccagagcggtatctctggcaccacactagggactatcaggtaataaaagctttgactccctgaaaaaaaaaaaaa

SEQ ID NO: 91 - protein, 793 aa, Homo sapiens
MDSWFILVLLGSGLICVSANNATTVAPSVGITRLINSSTAEPVKEEAKTSNPTSSLTSLSVAPTFSPNITLGPTYLTTVNSSDSDNGTTRTASTNSIGITISPNGTWLPDNQFTDARTEPWEGNSSTAATTPETFPPSDETPIIAVMVALSSLLVIVFIIIVLYMLRFKKYKQAGSHSNSFRLSNGRTEDVEPQSVPLLARSPSTNRKYPPLPVDKLEEEINRRMADDNKLFREEFNALPACPIQATCEAASKEENKEKNRYVNILPYDHSRVHLTPVEGVPDSDYINASFINGYQEKNKFIAAQGPKEETVNDFWRMIWEQNTATIVMVTNLKERKECKCAQYWPDQGCWTYGNIRVSVEDVTVLVDYTVRKFCIQQVGDMTNRKPQRLITQFHFTSWPDFGVPFTPIGMLKFLKKVKACNPQYAGAIVVHCSAGVGRTGTFVVIDAMLDMMHTERKVDVYGFVSRIRAQRCQMVQTDMQYVFIYQALLEHYLYGDTELEVTSLETHLQKIYNKIPGTSNNGLEEEFKKLTSIKIQNDKMRTGNLPANMKKNRVLQIIPYEFNRVIIPVKRGEENTDYVNASFIDGYRQKDSYIASQGPLLHTIEDFWRMIWEWKSCSIVMLTELEERGQEKCAQYWPSDGLVSYGDITVELKKEEECESYTVRDLLVTNTRENKSRQIRQFHFHGWPEVGIPSDGKGMISIIAAVQKQQQQSGNHPITVHCSAGAGRTGTFCALSTVLERVKAEGILDVFQTVKSLRLQRPHMVQTLEQYEFCYKVVQEYIDAFSDYANFK

SEQ ID NO: 92 - DNA, 3148 bp, Homo sapiens
gtgacacaactaaaaaaaaacaaaggtatttatggaattccactgagtggtaatggatgatgcagttcaaataactaaggacacatgttcaaagagcataattaactttttaaaagaagctagacttcttcagaagcttgccagtttttcaagctgatttctctcactggcaactcttcagagtgctgttcctactccaccctcccctggtgataagcatggattcctggttcattcttgttctgctcggcagtggtctgatatgtgtcagtgccaacaatgctaccacagttgcaccttctgtaggaattacaagattaattaactcatcaacggcagaaccagttaaagaagaggccaaaacttcaaatccaacttcttcactaacttctctttctgtggcaccaacattcagcccaaatataactctgggacccacctatttaaccactgtcaattcttcagactctgacaatgggaccacaagaacagcaagcaccaattctataggcattacaatttcaccaaatggaacgtggcttccagataaccagttcacggatgccagaacagaaccctgggaggggaattccagcaccgcagcaaccactccagaaactttccctccttcagatgagacaccaattattgcggtgatggtggccctgtcctctctgctagtgatcgtgtttattatcatagttttgtacatgttaaggtttaagaaatacaagcaagctgggagccattccaattctttccgcttatccaacggccgcactgaggatgtggagccccagagtgtgccacttctggccagatccccaagcaccaacaggaaatacccacccctgcccgtggacaagctggaagaggaaattaaccggagaatggcagacgacaataagctcttcagggaggaattcaacgctctccctgcatgtcctatccaggccacctgtgaggctgcttccaaggaggaaaacaaggaaaaaaatcgatatgtaaacatcttgccttatgaccactctagagtccacctgacaccggttgaaggggttccagattctgattacatcaatgcttcattcatcaacggttaccaagaaaagaacaaattcattgctgcacaaggaccaaaagaagaaacggtgaatgatttctggcggatgatctgggaacaaaacacagccaccatcgtcatggttaccaacctgaaggagagaaaggagtgcaagtgcgcccagtactggccagaccaaggctgctggacctatgggaatattcgggtgtctgtagaggatgtgactgtcctggtggactacacagtacggaagttctgcatccagcaggtgggcgacatgaccaacagaaagccacagcgcctcatcactcagttccactttaccagctggccagactttggggtgccttttaccccgatcggcatgctcaagttcctcaagaaggtgaaggcctgtaaccctcagtatgcaggggccatcgtggtccactgcagtgcaggtgtagggcgtacaggtacctttgtcgtcattgatgccatgctggacatgatgcatacagaacggaaggtggacgtgtatggctttgtgagccggatccgggcacagcgctgccagatggtgcaaaccgatatgcagtatgtcttcatataccaagcccttctggagcattatctctatggagatacagaactggaagtgacctctctagaaacccacctgcagaaaatttacaacaaaatcccagggaccagcaacaatggattagaggaggagtttaagaagttaacatcaatcaaaatccagaatgacaagatgcggactggaaaccttccagccaacatgaagaagaaccgtgttttacagatcattccatatgaattcaacagagtgatcattccagttaagcggggcgaagagaatacagactatgtgaacgcatcctttattgatggctaccggcagaaggactcctatatcgccagccagggccctcttctccacacaattgaggacttctggcgaatgatctgggagtggaaatcctgctctatcgtgatgctaacagaactggaggagagaggccaggagaagtgtgcccagtactggccatctgatggactggtgtcctatggagatattacagtggaactgaagaaggaggaggaatgtgagagctacaccgtccgagacctcctggtcaccaacaccagggagaataagagccggcagatccggcagttccacttccatggctggcctgaagtgggcatccccagtgacggaaagggcatgatcagcatcatcgccgccgtgcagaagcagcagcagcagtcagggaaccaccccatcaccgtgcactgcagcgccggggcaggaaggacggggaccttctgtgccctgagcaccgtcctggagcgtgtgaaagcagaggggattttggatgtcttccagactgtcaagagcctgcggctacagaggccacacatggtccagacactggaacagtatgagttctgctacaaggtggtgcaggagtatattgatgcattctcagattatgccaacttcaagtaagcggcaacaagggtccgtggaccaggaggattgcctttaatattttgtaatattctgttttgttaatataccccaaattgtgtatatatcttataactgttttagaaattggtacataggcttctattacctattaggtggaaattttatatgtaaatgtgttagcactgatagtcctttttccaatgttttattggggaattaaatagtgtgatgtttggattgatatcgtgaaatcctcagccgagaaattgggctggattgtgctttggttaatacatctttccctaaagaagataaacacaaaatccattccaggtagctcggcaccaactaagaaaaaaagcacaaagttctcagagctctcgaggaaagtggttgtccccgtaccaccatgcactgtaaatatccctcccctctctccctggtcccctcccccatccccaccactgatatcatggggagtaataggaccagagcggtatctctggcaccacactagggactatcaggtaataaaagctttgactccctgaaaaaaaaaaaaa

SEQ ID NO: 93 - DNA, 1644 bp, Homo sapiens
ggcgagatggcggccaccgagggggtcggggaggctgcgcaagggggcgagcccgggcagccggcgcaacccccgccccagccgcacccaccgccgccccagcagcagcacaaggaagagatggcggccgaggctggggaagccgtggcgtcccccatggacgacgggtttgtgagcctggactcgccctcctatgtcctgtacagggacagagcagaatgggctgatatagatccggtgccgcagaatgatggccccaatcccgtggtccagatcatttatagtgacaaatttagagatgtttatgattacttccgagctgtcctgcagcgtgatgaaagaagtgaacgagcttttaagctaacccgggatgctattgagttaaatgcagccaattatacagtgtggcatttccggagagttcttttgaagtcacttcagaaggatctacatgaggaaatgaactacatcactgcaataattgaggagcagcccaaaaactatcaagtttggcatcataggcgagtattagtggaatggctaagagatccatctcaggagcttgaatttattgctgatattcttaatcaggatgcaaagaattatcatgcctggcagcatcgacaatgggttattcaggaatttaaactttgggataatgagctgcagtatgtggaccaacttctgaaagaggatgtgagaaataactctgtctggaaccaaagatacttcgttatttctaacaccactggctacaatgatcgtgctgtattggagagagaagtccaatacactctggaaatgattaaactagtaccacataatgaaagtgcatggaactatttgaaagggattttgcaggatcgtggtctttccaaatatcctaatctgttaaatcaattacttgatttacaaccaagtcatagttccccctacctaattgcctttcttgtggatatctatgaagacatgctagaaaatcagtgtgacaataaggaagacattcttaataaagcattagagttatgtgaaatcctagctaaagaaaaggacactataagaaaggaatattggagatacattggaagatcccttcaaagcaaacacagcacagaaaatgactcaccaacaaatgtacagcaataacaccatccagaagaacttgatggaatgcttttattttttattaagggaccctgcaggagtttcacacgagagtggtccttccctttgcctgtggtgtaaaagtgcatcacacaggtattgctttttaacaagaactgatgctccttgggtgctgctgctactcagactagctctaagtaatgtgattcttctaaagcaaagtcattggatgggaggaggaagaaaaagtcccataaaggaacttttgtagtcttatcaacatataatctaatcccttagcatcagctcctccctcagtggtacatgcgtcaagatttgtagcagtaataactgcaggtcacttgtatgtaatggatgtgaggtagccgaagtttggttcagtaagcagggaatacagtcgttccatcagagctggtctgcacactcacattatcttgctatcactgtaaccaactaatgccaaaagaacggttttgtaataaaattatagctgtatct

SEQ ID NO: 94 - protein, 379 aa, Homo sapiens
MAATEGVGEAAQGGEPGQPAQPPPQPHPPPPQQQHKEEMAAEAGEAVASPMDDGFVSLDSPSYVLYRDRAEWADIDPVPQNDGPNPVVQIIYSDKFRDVYDYFRAVLQRDERSERAFKLTRDAIELNAANYTVWHFRRVLLKSLQKDLHEEMNYITAIIEEQPKNYQVWHHRRVLVEWLRDPSQELEFIADILNQDAKNYHAWQHRQWVIQEFKLWDNELQYVDQLLKEDVRNNSVWNQRYFVISNTTGYNDRAVLEREVQYTLEMIKLVPHNESAWNYLKGILQDRGLSKYPNLLNQLLDLQPSHSSPYLIAFLVDIYEDMLENQCDNKEDILNKALELCEILAKEKDTIRKEYWRYIGRSLQSKHSTENDSPTNVQQ

SEQ ID NO: 95 - DNA, 1106 bp, Homo sapiens
gacttaacttccctcccagctgtcccagatgacgccatctgaaatttcttggaaacacgatcactttaacggaatattgctgttttggggaagtgttttacagctgctgggcacgctgtatttgccttacttaagcccctggtaattgctgtattccgaagacatgctgatgggaattaccaggcggcgttggtctctaaactgagccctctgtcccaactagctacgcgtcactggttagcgtgattgaaactaaatcgtatgaaaatcctcttctctagtcgcactagccacgtttcgagtgcttaatgtggctagtggcaccggtttggacagcacagctgtaaaatgttcccatcctcacagtaagctgttaccgttccaggagatgggactgaattagaattcaaacaaattttccagcgcttctgagttttacctcagtcacataataaggaatgcatccctgtgtaagtgcattttggtcttctgttttgcagacttatttaccaagcattggaggaatatcgtaggtaaaaatgcctattggatccaaagagaggccaacattttttgaaatttttaagacacgctgcaacaaagcaggtattgacaaattttatataactttataaattacaccgagaaagtgttttctaaaaaatgcttgctaaaaacccagtacgtcacagtgttgcttagaaccataaactgttccttatgtgtgtataaatccagttaacaacataatcatcgtttgcaggttaaccacatgataaatatagaacgtctagtggataaagaggaaactggccccttgactagcagtaggtaacaattactaacaaatcagaagcattaatgttactttatggcagaagttgtccaactttttggtttcagtactccttatactcttaaaaatgatctaggacccccggagtgcttttgtttatgtagcttaccatattagaaatttaaaactaagaatttaaggctgggcgtggtggctcacgcctgtaatcccagcactttgggaggcccgaggtgggcggatcacttgaggccagaagtttgagaccagcctggccaacatggtgaaaccc

SEQ ID NO: 96 - protein, 22 aa, Homo sapiens
MPIGSKERPTFFEIFKTRCNKA

SEQ ID NO: 97 - DNA, 2400 bp, Homo sapiens
gtgcttttgctgtgagcagccccaagcagctgggcgctccatcagaggcaactatgacttttgcaaagcaaacgtgcaaccccaagcagcggtctcccgggccggggctgcgcggccgccgctgtgctggcttttaacggtgggagggcaccatcctcttgctctgctctcgttctccagaaggctgtcccggggcccccactctccgtcccgctccggggacagtggctcgcctgctatgcgcggcagcccgcgccggggccggcaccagcagcgcccgggcggatgcagcgagcccacggaggggcatgcttccacgcaccaagtataaccgcttcaggaatgactcggtgacatcggtcgatgaccttctccacagcctgtcggtgagcggcggcggaggcaaggtttcggcggcgcgcgcgaccccggcggcggctccctacttggtgtccggcgaggcgctgcgcaaggcgcccgtcgatgggcccggcagcctgggccacctgctccacaaggtgtcccacctgaaactctccagctcgggcctccgcggcctgtcgtcggccgcccgggagcgggcgggcgcgcggctctcgggcagctgcagcgcgcccagcctggccgccccggacggcagtgcgccctcggcgccccgcgccccggccatgagcgccgccaggaagggccggcccggcgacgagccgctgcccaggccccctcggggggcgccgcacgccagcgaccaggtgctggggcccggagtcacctacgtggtcaagtacttggggtgcattgaagttctgcgctcaatgaggtctcttgacttcagtacaagaacacaaattaccagggaagccatcagccgcgtctgtgaagctgtgcctggtgcgaagggagccttcaagaagagaaagcctccaagcaaaatgctgtccagcatcttgggaaagagcaacctccagtttgcgggaatgagcatctctctgaccatctccacggccagtctgaacctgcgaactccggactccaaacagatcatagcgaatcaccacatgcggtccatctccttcgcctctgggggagacccggacacgactgactatgttgcatatgtgactaaggaccctgttaatcgcagagcttgtcacattttggaatgctgtgatgggctggcccaggatgtcatcggctccatcggacaagcctttgagctccggtttaagcaatatttacagtgtcctaccaagattcccgctctccatgatcgaatgcagagtctggatgagccatggacggaagaggagggagatggctcagaccacccatactacaacagcatcccaagcaagatgcctcctccagggggctttcttgatactagactgaaacccagaccccatgctcctgacacagcccagtttgcaggaaaagagcagacttattaccagggaagacacttaggagacacttttggcgaagactggcagcaaacacctttaaggcaagggtcctcggacatctacagcacgccagaagggaaactgcacgtggcccccacgggagaagcacccacctacgtcaacactcagcagatcccaccacaggcctggccggctgcggtcagcagtgctgagagcagcccaaggaaagacctctttgacatgaaaccttttgaagatgctctcaagaaccagcccttggggcccgtgttaagcaaggcagcctccgtggagtgcatcagccctgtgtcacctagagccccagatgccaagatgctggaggaactgcaagccgagacttggtaccaaggagagatgagcaggaaggaggcagaggggctgctggagaaagacggagacttcctggtcaggaagagcaccaccaacccgggctcctttgtcctcacgggcatgcacaatggccaggccaagcacctgctgctcgtggacccagaaggcacgatccagacaaaggacagagtctttgacagtatcagccacctcatcaaccaccacctagaaagcagcctgcccattgtctctgcagggagtgagctgtgtctccagcagccagtggagaggaagcagtgacatggccagcactgctcccggcactgcgcaccaggtcaggaggacctggagtggactagaatcggggctgctggaactgggacagctgcctgtggctcagagccttcttcaaaagcttcaaaaggaaggcttcctttaaggtcaagtttcataaacttggttctgaatttctcatatgcatattaaaggtgtacatacctatacatcctgtacaaattatccctctatatttatattttttaagactaagaaagacgtaagactaatgttctgtgctgtatgtttttaatgaaaaaaaaaaaaaaaa

SEQ ID NO: 98 - protein, 594 aa, Homo sapiens
MLPRTKYNRFRNDSVTSVDDLLHSLSVSGGGGKVSAARATPAAAPYLVSGEALRKAPVDGPGSLGHLLHKVSHLKLSSSGLRGLSSAARERAGARLSGSCSAPSLAAPDGSAPSAPRAPAMSAARKGRPGDEPLPRPPRGAPHASDQVLGPGVTYVVKYLGCIEVLRSMRSLDFSTRTQITREAISRVCEAVPGAKGAFKKRKPPSKMLSSILGKSNLQFAGMSISLTISTASLNLRTPDSKQIIANHHMRSISFASGGDPDTTDYVAYVTKDPVNRRACHILECCDGLAQDVIGSIGQAFELRFKQYLQCPTKIPALHDRMQSLDEPWTEEEGDGSDHPYYNSIPSKMPPPGGFLDTRLKPRPHAPDTAQFAGKEQTYYQGRHLGDTFGEDWQQTPLRQGSSDIYSTPEGKLHVAPTGEAPTYVNTQQIPPQAWPAAVSSAESSPRKDLFDMKPFEDALKNQPLGPVLSKAASVECISPVSPRAPDAKMLEELQAETWYQGEMSRKEAEGLLEKDGDFLVRKSTTNPGSFVLTGMHNGQAKHLLLVDPEGTIQTKDRVFDSISHLINHHLESSLPIVSAGSELCLQQPVERKQ

SEQ ID NO: 99 - DNA, 2244 bp, Homo sapiens
agtcctgcgatttcggtgtagaggagcaggggctgcgggacctggtgtgggtggagtgggacaagcggtggagaagggtacgccagggtcgctgagagactctgttctccctggagggactggttgccatgagagcagccgtctgaggggacgcagcctgcactacgcgccccaagaggctgtgcgtggcgagcaggtcacgtgacgggagcgcgggctttggaaggcggctgaacgtcaggccacccgccgctaagctgagaagggagagcgagcttaggaccgcctgcccggggcaaccccgaaccaagctttagccgccgaggccgcgtgtcccaaaggccagtcatccctcctctgtgttgccatgggaattcaaggcctggccaaactaattgctgatgtggcccccagtgccatccgggagaatgacatcaagagctactttggccgtaaggtggccattgatgcctctatgagcatttatcagttcctgattgctgttcgccagggtggggatgtgctgcagaatgaggagggtgagaccaccagccacctgatgggcatgttctaccgcaccattcgcatgatggagaacggcatcaagcccgtgtatgtctttgatggcaagccgccacagctcaagtcaggcgagctggccaaacgcagtgagcggcgggctgaggcagagaagcagctgcagcaggctcaggctgctggggccgagcaggaggtggaaaaattcactaagcggctggtgaaggtcactaagcagcacaatgatgagtgcaaacatctgctgagcctcatgggcatcccttatcttgatgcacccagtgaggcagaggccagctgtgctgccctggtgaaggctggcaaagtctatgctgcggctaccgaggacatggactgcctcaccttcggcagccctgtgctaatgcgacacctgactgccagtgaagccaaaaagctgccaatccaggaattccacctgagccggattctgcaggagctgggcctgaaccaggaacagtttgtggatctgtgcatcctgctaggcagtgactactgtgagagtatccggggtattgggcccaagcgggctgtggacctcatccagaagcacaagagcatcgaggagatcgtgcggcgacttgaccccaacaagtaccctgtgccagaaaattggctccacaaggaggctcaccagctcttcttggaacctgaggtgctggacccagagtctgtggagctgaagtggagcgagccaaatgaagaagagctgatcaagttcatgtgtggtgaaaagcagttctctgaggagcgaatccgcagtggggtcaagaggctgagtaagagccgccaaggcagcacccagggccgcctggatgatttcttcaaggtgaccggctcactctcttcagctaagcgcaaggagccagaacccaagggatccactaagaagaaggcaaagactggggcagcagggaagtttaaaaggggaaaataaatgtgtttccccattatacctccttcaccccagaatatttgccgtcttgtacccttaagagctacagctagagaaaccttcacggggtggagagaggattctaaggcttttctagcgtgacccttttcagtagtgctagtcccttttttacttgatcttaatggcaagaaggccacagaggtacttttcctttttttagctcaggaaaatatgtcaggctcaaaccacttctcaggcagtttaatggacactaagtccattgttacatgaaagtgatagatagcaacaagttttggagaagagagagggagataaaagggggagacaaaagatgtacagaaatgatttcctggctggcaactggtggccagtgggaggtgatggtggacctagactgtgcttttctgtcttgttcagccttgacccaccttgagagagagccaccaggaaggcgcatctagcagtgggaggaactactgagagaagatgggcagaaagctggagcccctggagttggctgtgtctgtgtttgtgactgattactggctgtgtcttgggtgggcagaaactcgaacttgctatgtaatttgtgtctagttattcagaggagtaagatggtgatgttcacctggcaatcagctgagttgagactttggaataagacactggttttcatgcgctgtttttgttttaaagttatgaagaaaaaagtcaataaaattctaaaagtaacc

SEQ ID NO: 100 - DNA, 1020 bp, Homo sapiens
gcggcgcggcgagcacgacgttccacgggacccgcggagccgcgtcgtgatcgccgccggcctcccgcacccgcaccctctccgctcgcgccctgctcagcgcgtcctcccgcggcggcccgcgggacggcgtgacccgccgggctctcggtgccccggggccgcgcgccatgggcagcccccgctccgcgctgagctgcctgctgttgcacttgctggtcctctgcctccaagcccaggtaactgttcagtcctcacctaattttacacagcatgtgagggagcagagcctggtgacggatcagctcagccgccgcctcatccggacctaccaactctacagccgcaccagcgggaagcacgtgcaggtcctggccaacaagcgcatcaacgccatggcagaggacggcgaccccttcgcaaagctcatcgtggagacggacacctttggaagcagagttcgagtccgaggagccgagacgggcctctacatctgcatgaacaagaaggggaagctgatcgccaagagcaacggcaaaggcaaggactgcgtcttcacggagattgtgctggagaacaactacacagcgctgcagaatgccaagtacgagggctggtacatggccttcacccgcaagggccggccccgcaagggctccaagacgcggcagcaccagcgtgaggtccacttcatgaagcggctgccccggggccaccacaccaccgagcagagcctgcgcttcgagttcctcaactacccgcccttcacgcgcagcctgcgcggcagccagaggacttgggcccccgagccccgataggtgctgcctggccctccccacaatgccagaccgcagagaggctcatcctgtagggcacccaaaactcaagcaagatgagctgtgcgctgctctgcaggctggggaggtgctgggggagccctgggttccggttgttgatattgtttgctgttgggtttttgctgtttttttttttttttttttttttaaaacaaaagaggct

SEQ ID NO: 101 - protein, 215 aa, Homo sapiens
MGSPRSALSCLLLHLLVLCLQAQVTVQSSPNFTQHVREQSLVTDQLSRRLIRTYQLYSRTSGKHVQVLANKRINAMAEDGDPFAKLIVETDTFGSRVRVRGAETGLYICMNKKGKLIAKSNGKGKDCVFTEIVLENNYTALQNAKYEGWYMAFTRKGRPRKGSKTRQHQREVHFMKRLPRGHHTTEQSLRFEFLNYPPFTRSLRGSQRTWAPEPR

SEQ ID NO: 102 - DNA, 1107 bp, Homo sapiens
gcggcgcggcgagcacgacgttccacgggacccgcggagccgcgtcgtgatcgccgccggcctcccgcacccgcaccctctccgctcgcgccctgctcagcgcgtcctcccgcggcggcccgcgggacggcgtgacccgccgggctctcggtgccccggggccgcgcgccatgggcagcccccgctccgcgctgagctgcctgctgttgcacttgctggtcctctgcctccaagcccaggaaggcccgggcaggggccctgcgctgggcagggagctcgcttccctgttccgggctggccgggagccccagggtgtctcccaacaggtaactgttcagtcctcacctaattttacacagcatgtgagggagcagagcctggtgacggatcagctcagccgccgcctcatccggacctaccaactctacagccgcaccagcgggaagcacgtgcaggtcctggccaacaagcgcatcaacgccatggcagaggacggcgaccccttcgcaaagctcatcgtggagacggacacctttggaagcagagtccgagtccgaggagccgagacgggcctctacatctgcatgaacaagaaggggaagctgatcgccaagagcaacggcaaaggcaaggactgcgtcttcacggagattgtgctggagaacaactacacagcgctgcagaatgccaagtacgagggctggtacatggccttcacccgcaagggccggccccgcaagggctccaagacgcggcagcaccagcgtgaggtccacttcatgaagcggctgccccggggccaccacaccaccgagcagagcctgcgcttcgagttcctcaactacccgcccttcacgcgcagcctgcgcggcagccagaggacttgggcccccgagccccgataggtgctgcctggccctccccacaatgccagaccgcagagaggctcatcctgtagggcacccaaaactcaagcaagatgagctgtgcgctgctctgcaggctggggaggtgctgggggagccctgggttccggttgttgatattgtttgctgttgggtttttgctgtttttttttttttttttttttttaaaacaaaagaggct

SEQ ID NO: 103 - protein, 244 aa, Homo sapiens
MGSPRSALSCLLLHLLVLCLQAQEGPGRGPALGRELASLFRAGREPQGVSQQVTVQSSPNFTQHVREQSLVTDQLSRRLIRTYQLYSRTSGKHVQVLANKRINAMAEDGDPFAKLIVETDTFGSRVRVRGAETGLYICMNKKGKLIAKSNGKGKDCVFTEIVLENNYTALQNAKYEGWYMAFTRKGRPRKGSKTRQHQREVHFMKRLPRGHHTTEQSLRFEFLNYPPFTRSLRGSQRTWAPEPR

SEQ ID NO: 104 - DNA, 1074 bp, Homo sapiens
gcggcgcggcgagcacgacgttccacgggacccgcggagccgcgtcgtgatcgccgccggcctcccgcacccgcaccctctccgctcgcgccctgctcagcgcgtcctcccgcggcggcccgcgggacggcgtgacccgccgggctctcggtgccccggggccgcgcgccatgggcagcccccgctccgcgctgagctgcctgctgttgcacttgctggtcctctgcctccaagcccaggaaggcccgggcaggggccctgcgctgggcagggagctcgcttccctgttccgggctggccgggagccccagggtgtctcccaacagcatgtgagggagcagagcctggtgacggatcagctcagccgccgcctcatccggacctaccaactctacagccgcaccagcgggaagcacgtgcaggtcctggccaacaagcgcatcaacgccatggcagaggacggcgaccccttcgcaaagctcatcgtggagacggacacctttggaagcagagtccgagtccgaggagccgagacgggcctctacatctgcatgaacaagaaggggaagctgatcgccaagagcaacggcaaaggcaaggactgcgtcttcacggagattgtgctggagaacaactacacagcgctgcagaatgccaagtacgagggctggtacatggccttcacccgcaagggccggccccgcaagggctccaagacgcggcagcaccagcgtgaggtccacttcatgaagcggctgccccggggccaccacaccaccgagcagagcctgcgcttcgagttcctcaactacccgcccttcacgcgcagcctgcgcggcagccagaggacttgggcccccgagccccgataggtgctgcctggccctccccacaatgccagaccgcagagaggctcatcctgtagggcacccaaaactcaagcaagatgagctgtgcgctgctctgcaggctggggaggtgctgggggagccctgggttccggttgttgatattgtttgctgttgggtttttgctgtttttttttttttttttttttttaaaacaaaagaggct

SEQ ID NO: 105 - protein, 233 aa, Homo sapiens
MGSPRSALSCLLLHLLVLCLQAQEGPGRGPALGRELASLFRAGREPQGVSQQHVREQSLVTDQLSRRLIRTYQLYSRTSGKHVQVLANKRINAMAEDGDPFAKLIVETDTFGSRVRVRGAETGLYICMNKKGKLIAKSNGKGKDCVFTEIVLENNYTALQNAKYEGWYMAFTRKGRPRKGSKTRQHQREVHFMKRLPRGHHTTEQSLRFEFLNYPPFTRSLRGSQRTWAPEPR

SEQ ID NO: 106 - DNA, 987 bp, Homo sapiens
gcggcgcggcgagcacgacgttccacgggacccgcggagccgcgtcgtgatcgccgccggcctcccgcacccgcaccctctccgctcgcgccctgctcagcgcgtcctcccgcggcggcccgcgggacggcgtgacccgccgggctctcggtgccccggggccgcgcgccatgggcagcccccgctccgcgctgagctgcctgctgttgcacttgctggtcctctgcctccaagcccagcatgtgagggagcagagcctggtgacggatcagctcagccgccgcctcatccggacctaccaactctacagccgcaccagcgggaagcacgtgcaggtcctggccaacaagcgcatcaacgccatggcagaggacggcgaccccttcgcaaagctcatcgtggagacggacacctttggaagcagagtccgagtccgaggagccgagacgggcctctacatctgcatgaacaagaaggggaagctgatcgccaagagcaacggcaaaggcaaggactgcgtcttcacggagattgtgctggagaacaactacacagcgctgcagaatgccaagtacgagggctggtacatggccttcacccgcaagggccggccccgcaagggctccaagacgcggcagcaccagcgtgaggtccacttcatgaagcggctgccccggggccaccacaccaccgagcagagcctgcgcttcgagttcctcaactacccgcccttcacgcgcagcctgcgcggcagccagaggacttgggcccccgagccccgataggtgctgcctggccctccccacaatgccagaccgcagagaggctcatcctgtagggcacccaaaactcaagcaagatgagctgtgcgctgctctgcaggctggggaggtgctgggggagccctgggttccggttgttgatattgtttgctgttgggtttttgctgtttttttttttttttttttttttaaaacaaaagaggct

SEQ ID NO: 107 - protein, 204 aa, Homo sapiens
MGSPRSALSCLLLHLLVLCLQAQHVREQSLVTDQLSRRLIRTYQLYSRTSGKHVQVLANKRINAMAEDGDPFAKLIVETDTFGSRVRVRGAETGLYICMNKKGKLIAKSNGKGKDCVFTEIVLENNYTALQNAKYEGWYMAFTRKGRPRKGSKTRQHQREVHFMKRLPRGHHTTEQSLRFEFLNYPPFTRSLRGSQRTWAPEPR

SEQ ID NO: 108 - DNA, 4437 bp, Homo sapiens
gcgcggcggccgtggttgcggcgcgggaagtttggatcctggttccgtccgctaggagtctgcgtgcgaggattatggctgctgttcctcaaaataatctacaggagcaactagaacgtcactcagccagaacacttaataataaattaagtctttcaaaaccaaaattttcaggtttcacttttaaaaagaaaacatcttcagataacaatgtatctgtaactaatgtgtcagtagcaaaaacacctgtattaagaaataaagatgttaatgttaccgaagacttttccttcagtgaacctctacccaacaccacaaatcagcaaagggtcaaggacttctttaaaaatgctccagcaggacaggaaacacagagaggtggatcaaaatcattattgccagatttcttgcagactccgaaggaagttgtatgcactacccaaaacacaccaactgtaaagaaatcccgggatactgctctcaagaaattagaatttagttcttcaccagattctttaagtaccatcaatgattgggatgatatggatgactttgatacttctgagacttcaaaatcatttgttacaccaccccaaagtcactttgtaagagtaagcactgctcagaaatcaaaaaagggtaagagaaacttttttaaagcacagctttatacaacaaacacagtaaagactgatttgcctccaccctcctctgaaagcgagcaaatagatttgactgaggaacagaaggatgactcagaatggttaagcagcgatgtgatttgcatcgatgatggccccattgctgaagtgcatataaatgaagatgctcaggaaagtgactctctgaaaactcatttggaagatgaaagagataatagcgaaaagaagaagaatttggaagaagctgaattacattcaactgagaaagttccatgtattgaatttgatgatgatgattatgatacggattttgttccaccttctccagaagaaattatttctgcttcttcttcctcttcaaaatgccttagtacgttaaaggaccttgacacatctgacagaaaagaggatgttcttagcacatcaaaagatcttttgtcaaaacctgagaaaatgagtatgcaggagctgaatccagaaaccagcacagactgtgacgctagacagataagtttacagcagcagcttattcatgtgatggagcacatctgtaaattaattgatactattcctgatgataaactgaaacttttggattgtgggaacgaactgcttcagcagcggaacataagaaggaaacttctaacggaagtagattttaataaaagtgatgccagtcttcttggctcattgtggagatacaggcctgattcacttgatggccctatggagggtgattcctgccctacagggaattctatgaaggagttaaatttttcacaccttccctcaaattctgtttctcctggggactgtttactgactaccaccctaggaaagacaggattctctgccaccaggaagaatctttttgaaaggcctttattcaatacccatttacagaagtcctttgtaagtagcaactgggctgaaacaccaagactaggaaaaaaaaatgaaagctcttatttcccaggaaatgttctcacaagcactgctgtgaaagatcagaataaacatactgcttcaataaatgacttagaaagagaaacccaaccttcctatgatattgataattttgacatagatgactttgatgatgatgatgactgggaagacataatgcataatttagcagccagcaaatcttccacagctgcctatcaacccatcaaggaaggtcggccaattaaatcagtatcagaaagactttcctcagccaagacagactgtcttccagtgtcatctactgctcaaaatataaacttctcagagtcaattcagaattatactgacaagtcagcacaaaatttagcatccagaaatctgaaacatgagcgtttccaaagtcttagttttcctcatacaaaggaaatgatgaagatttttcataaaaaatttggcctgcataattttagaactaatcagctagaggcgatcaatgctgcactgcttggtgaagactgttttatcctgatgccgactggaggtggtaagagtttgtgttaccagctccctgcctgtgtttctcctggggtcactgttgtcatttctcccttgagatcacttatcgtagatcaagtccaaaagctgacttccttggatattccagctacatatctgacaggtgataagactgactcagaagctacaaatatttacctccagttatcaaaaaaagacccaatcataaaacttctatatgtcactccagaaaagatctgtgcaagtaacagactcatttctactctggagaatctctatgagaggaagctcttggcacgttttgttattgatgaagcacattgtgtcagtcagtggggacatgattttcgtcaagattacaaaagaatgaatatgcttcgccagaagtttccttctgttccggtgatggctcttacggccacagctaatcccagggtacagaaggacatcctgactcagctgaagattctcagacctcaggtgtttagcatgagctttaacagacataatctgaaatactatgtattaccgaaaaagcctaaaaaggtggcatttgattgcctagaatggatcagaaagcaccacccatatgattcagggataatttactgcctctccaggcgagaatgtgacaccatggctgacacgttacagagagatgggctcgctgctcttgcttaccatgctggcctcagtgattctgccagagatgaagtgcagcagaagtggattaatcaggatggctgtcaggttatctgtgctacaattgcatttggaatggggattgacaaaccggacgtgcgatttgtgattcatgcatctctccctaaatctgtggagggttactaccaagaatctggcagagctggaagagatggggaaatatctcactgcctgcttttctatacctatcatgatgtgaccagactgaaaagacttataatgatggaaaaagatggaaaccatcatacaagagaaactcacttcaataatttgtatagcatggtacattactgtgaaaatataacggaatgcaggagaatacagcttttggcctactttggtgaaaatggatttaatcctgatttttgtaagaaacacccagatgtttcttgtgataattgctgtaaaacaaaggattataaaacaagagatgtgactgacgatgtgaaaagtattgtaagatttgttcaagaacatagttcatcacaaggaatgagaaatataaaacatgtaggtccttctggaagatttactatgaatatgctggtcgacattttcttggggagtaagagtgcaaaaatccagtcaggtatatttggaaaaggatctgcttattcacgacacaatgccgaaagactttttaaaaagctgatacttgacaagattttggatgaagacttatatatcaatgccaatgaccaggcgatcgcttatgtgatgctcggaaataaagcccaaactgtactaaatggcaatttaaaggtagactttatggaaacagaaaattccagcagtgtgaaaaaacaaaaagcgttagtagcaaaagtgtctcagagggaagagatggttaaaaaatgtcttggagaacttacagaagtctgcaaatctctggggaaagtttttggtgtccattacttcaatatttttaataccgtcactctcaagaagcttgcagaatctttatcttctgatcctgaggttttgcttcaaattgatggtgttactgaagacaaactggaaaaatatggtgcggaagtgatttcagtattacagaaatactctgaatggacatcgccagctgaagacagttccccagggataagcctgtccagcagcagaggccccggaagaagtgccgctgaggagcttgacgaggaaatacccgtatcttcccactactttgcaagtaaaaccagaaatgaaaggaagaggaaaaagatgccagcctcccaaaggtctaagaggagaaaaactgcttccagtggttccaaggcaaagggggggtctgccacatgtagaaagatatcttccaaaacgaaatcctccagcatcattggatccagttcagcctcacatacttctcaagcgacatcaggagccaatagcaaattggggattatggctccaccgaagcctataaatagaccgtttcttaagccttcatatgcattctcataacaaccgaatctcaatgtacatagaccctctttcttgtttgtcagcatctgaccatctgtgactataaagctgttattcttgttataccaaaaaaaaaaaaaaaaaaaaa

SEQ ID NO: 109 - protein, 1417 aa, Homo sapiens
MAAVPQNNLQEQLERHSARTLNNKLSLSKPKFSGFTFKKKTSSDNNVSVTNVSVAKTPVLRNKDVNVTEDFSFSEPLPNTTNQQRVKDFFKNAPAGQETQRGGSKSLLPDFLQTPKEVVCTTQNTPTVKKSRDTALKKLEFSSSPDSLSTINDWDDMDDFDTSETSKSFVTPPQSHFVRVSTAQKSKKGKRNFFKAQLYTTNTVKTDLPPPSSESEQIDLTEEQKDDSEWLSSDVICIDDGPIAEVHINEDAQESDSLKTHLEDERDNSEKKKNLEEAELHSTEKVPCIEFDDDDYDTDFVPPSPEEIISASSSSSKCLSTLKDLDTSDRKEDVLSTSKDLLSKPEKMSMQELNPETSTDCDARQISLQQQLIHVMEHICKLIDTIPDDKLKLLDCGNELLQQRNIRRKLLTEVDFNKSDASLLGSLWRYRPDSLDGPMEGDSCPTGNSMKELNFSHLPSNSVSPGDCLLTTTLGKTGFSATRKNLFERPLFNTHLQKSFVSSNWAETPRLGKKNESSYFPGNVLTSTAVKDQNKHTASINDLERETQPSYDIDNFDIDDFDDDDDWEDIMHNLAASKSSTAAYQPIKEGRPIKSVSERLSSAKTDCLPVSSTAQNINFSESIQNYTDKSAQNLASRNLKHERFQSLSFPHTKEMMKIFHKKFGLHNFRTNQLEAINAALLGEDCFILMPTGGGKSLCYQLPACVSPGVTVVISPLRSLIVDQVQKLTSLDIPATYLTGDKTDSEATNIYLQLSKKDPIIKLLYVTPEKICASNRLISTLENLYERKLLARFVIDEAHCVSQWGHDFRQDYKRMNMLRQKFPSVPVMALTATANPRVQKDILTQLKILRPQVFSMSFNRHNLKYYVLPKKPKKVAFDCLEWIRKHHPYDSGIIYCLSRRECDTMADTLQRDGLAALAYHAGLSDSARDEVQQKWINQDGCQVICATIAFGMGIDKPDVRFVIHASLPKSVEGYYQESGRAGRDGEISHCLLFYTYHDVTRLKRLIMMEKDGNHHTRETHFNNLYSMVHYCENITECRRIQLLAYFGENGFNPDFCKKHPDVSCDNCCKTKDYKTRDVTDDVKSIVRFVQEHSSSQGMRNIKHVGPSGRFTMNMLVDIFLGSKSAKIQSGIFGKGSAYSRHNAERLFKKLILDKILDEDLYINANDQAIAYVMLGNKAQTVLNGNLKVDFMETENSSSVKKQKALVAKVSQREEMVKKCLGELTEVCKSLGKVFGVHYFNIFNTVTLKKLAESLSSDPEVLLQIDGVTEDKLEKYGAEVISVLQKYSEWTSPAEDSSPGISLSSSRGPGRSAAEELDEEIPVSSHYFASKTRNERKRKKMPASQRSKRRKTASSGSKAKGGSATCRKISSKTKSSSIIGSSSASHTSQATSGANSKLGIMAPPKPINRPFLKPSYAFS

SEQ ID NO: 110 - DNA, 3135 bp, Homo sapiens
ggccgtcggcggaggcgccattttgtgtagccgccgaaccttgttggaggttctggggcgcagaaccgctactgctgcttcggtctctccttgggaaaaaataaaatttgaaccttttggagctgtgtgctaaatcttcagtgggacaatgggttcagacaaaagagtgagtagaacagagcgtagtggaagatacggttccatcatagacagggatgaccgtgatgagcgtgaatcccgaagcaggcggagggactcagattacaaaagatctagtgatgatcggaggggtgatagatatgatgactaccgagactatgacagtccagagagagagcgtgaaagaaggaacagtgaccgatccgaagatggctaccattcagatggtgactatggtgagcacgactataggcatgacatcagtgacgagagggagagcaagaccatcatgctgcgcggccttcccatcaccatcacagagagcgatattcgagaaatgatggagtccttcgaaggccctcagcctgcggatgtgaggctgatgaagaggaaaacaggtgtaagccgtggtttcgccttcgtggagttttatcacttgcaagatgctaccagctggatggaagccaatcagaaaaagttggtgattcaaggaaagcacattgcaatgcattatagcaatcccagacctaagtttgaagattggctttgtaacaagtgctgccttaacaatttcaggaaaagactaaaatgcttccgatgtggagcagacaagtttgactctgaacaggaagtgcctcctggaaccacagagtcggttcagtctgtggattactactgtgatacgatcattcttcggaacatagctccgcacactgtggtggattccatcatgacagcactgtctccttacgcgtctttagctgtcaataacatccgcctcataaaagacaaacagacccagcagaacagaggcttcgcatttgtgcagctgtcctctgcaatggatgcttctcagctgcttcagatattacagagtctccatcctcctttgaaaattgatggcaaaactattggggttgattttgcaaaaagtgccagaaaagacttggtcctctcagatggtaaccgcgtcagcgccttctctgtagctagtacggctattgctgctgctcagtggtcatccacccagtctcaaagtggtgaaggaggcagtgttgactacagttatctgcaaccaggtcaagatggctatgcccaatatgctcagtattcacaggattatcagcagttttatcaacaacaagctggaggattggaatctgatgcatcatctgcatcaggcacagcagtgaccaccacctcagcggctgtagtgtcccagagtcctcagctgtataatcaaacctccaatccacctggctctccgactgaggaagcacagcctagcactagcacaagtacacaggccccagccgcttcccctactggtgtagttcctggtaccaaatatgcagtacctgacacgtccacttaccagtatgatgaatcttcaggatattactatgatccgacaacagggctctattatgaccccaactcgcaatactactataattccttgacccagcagtacctttactgggatggggaaaaagagacctacgtgccagctgcagagtctagctcccaccagcagtcgggcctgcctcctgcaaaagaggggaaagagaagaaggagaaacccaagagcaaaacagcccagcagattgccaaagacatggaacgctgggctaagagtttgaataagcagaaagaaaactttaaaaatagctttcagcctgtcaattccttgagggaagaagaaaggagagaatctgctgcagcagacgctggctttgctctctttgagaagaagggagccttagctgaaaggcagcagctcatcccagaattggtgcgaaatggagatgaggagaatcccctcaaaaggggtctggttgctgcttacagtggtgacagtgacaatgaggaggagctggtggagagacttgagagtgaggaagagaagctagctgactggaagaagatggcctgtctgctctgccggcgccagttcccgaacaaagatgccctagtcaggcaccagcaactctcagaccttcacaagcaaaacatggacatctaccgacgatccaggctgagcgagcaggagctggaagccttggagctaagggagagagagatgaaataccgagaccgagctgcagaaagacgggagaagtacggcattccagaacctccagagcccaagcgcaagaagcagtttgatgccggcactgtgaattacgagcaacccaccaaagatggcattgaccacagtaacattggcaacaagatgctgcaggccatgggctggcgggaaggctctggcttgggacgaaagtgtcaaggcattacggctcccattgaggctcaagttcggctaaagggagctggcctaggagccaaaggcagcgcatatggtttgtcgggcgccgattcctacaaagatgctgtccggaaagccatgtttgcccggttcactgagatggagtgagagagagagagagagagagatgacaaggagcacaagaagtggtccatctcccgaattcgctgttaccgcctgtctctttaagggcatgccttgtgctgttaatagatcttagggtgaaccacttcattctgcagggttctccctcccaccttaaagaagttccccttatgtgggttgcctggtgaatggccttccttcccgccagagggcttgtgaacagaccggagaggacagtggattgtttatactccagtgtacatagtgtaatgtagcgtgtttacatgtgtagcctatgttgtggtccatcagcccctcacattcctaggggtttgagatgctgtaggtggtatgtgacaccaaagccacctctgtcatttgttgtgatgtcttttcttggcaaaagccttgtgtatatttgtatattacacatttgtacagaattttggaagattttcagtctagttgccaaatctggctcctttacaaaagaaataccttgagaaaaaaaaaaaaaaaaaaaaaaaaaaaaaaaaaaaaaa

SEQ ID NO: 111 - protein, 815 aa, Homo sapiens
MGSDKRVSRTERSGRYGSIIDRDDRDERESRSRRRDSDYKRSSDDRRGDRYDDYRDYDSPERERERRNSDRSEDGYHSDGDYGEHDYRHDISDERESKTIMLRGLPITITESDIREMMESFEGPQPADVRLMKRKTGVSRGFAFVEFYHLQDATSWMEANQKKLVIQGKHIAMHYSNPRPKFEDWLCNKCCLNNFRKRLKCFRCGADKFDSEQEVPPGTTESVQSVDYYCDTIILRNIAPHTVVDSIMTALSPYASLAVNNIRLIKDKQTQQNRGFAFVQLSSAMDASQLLQILQSLHPPLKIDGKTIGVDFAKSARKDLVLSDGNRVSAFSVASTAIAAAQWSSTQSQSGEGGSVDYSYLQPGQDGYAQYAQYSQDYQQFYQQQAGGLESDASSASGTAVTTTSAAVVSQSPQLYNQTSNPPGSPTEEAQPSTSTSTQAPAASPTGVVPGTKYAVPDTSTYQYDESSGYYYDPTTGLYYDPNSQYYYNSLTQQYLYWDGEKETYVPAAESSSHQQSGLPPAKEGKEKKEKPKSKTAQQIAKDMERWAKSLNKQKENFKNSFQPVNSLREEERRESAAADAGFALFEKKGALAERQQLIPELVRNGDEENPLKRGLVAAYSGDSDNEEELVERLESEEEKLADWKKMACLLCRRQFPNKDALVRHQQLSDLHKQNMDIYRRSRLSEQELEALELREREMKYRDRAAERREKYGIPEPPEPKRKKQFDAGTVNYEQPTKDGIDHSNIGNKMLQAMGWREGSGLGRKCQGITAPIEAQVRLKGAGLGAKGSAYGLSGADSYKDAVRKAMFARFTEME

SEQ ID NO: 112 - DNA, 5698 bp, Homo sapiens
aggttcaagtggagctctcctaaccgacgcgcgtctgtggagaagcggcttggtcgggggtggtctcgtggggtcctgcctgtttagtcgctttcagggttcttgagccccttcacgaccgtcaccatggaagtgtcaccattgcagcctgtaaatgaaaatatgcaagtcaacaaaataaagaaaaatgaagatgctaagaaaagactgtctgttgaaagaatctatcaaaagaaaacacaattggaacatattttgctccgcccagacacctacattggttctgtggaattagtgacccagcaaatgtgggtttacgatgaagatgttggcattaactatagggaagtcacttttgttcctggtttgtacaaaatctttgatgagattctagttaatgctgcggacaacaaacaaagggacccaaaaatgtcttgtattagagtcacaattgatccggaaaacaatttaattagtatatggaataatggaaaaggtattcctgttgttgaacacaaagttgaaaagatgtatgtcccagctctcatatttggacagctcctaacttctagtaactatgatgatgatgaaaagaaagtgacaggtggtcgaaatggctatggagccaaattgtgtaacatattcagtaccaaatttactgtggaaacagccagtagagaatacaagaaaatgttcaaacagacatggatggataatatgggaagagctggtgagatggaactcaagcccttcaatggagaagattatacatgtatcacctttcagcctgatttgtctaagtttaaaatgcaaagcctggacaaagatattgttgcactaatggtcagaagagcatatgatattgctggatccaccaaagatgtcaaagtctttcttaatggaaataaactgccagtaaaaggatttcgtagttatgtggacatgtatttgaaggacaagttggatgaaactggtaactccttgaaagtaatacatgaacaagtaaaccacaggtgggaagtgtgtttaactatgagtgaaaaaggctttcagcaaattagctttgtcaacagcattgctacatccaagggtggcagacatgttgattatgtagctgatcagattgtgactaaacttgttgatgttgtgaagaagaagaacaagggtggtgttgcagtaaaagcacatcaggtgaaaaatcacatgtggatttttgtaaatgccttaattgaaaacccaacctttgactctcagacaaaagaaaacatgactttacaacccaagagctttggatcaacatgccaattgagtgaaaaatttatcaaagctgccattggctgtggtattgtagaaagcatactaaactgggtgaagtttaaggcccaagtccagttaaacaagaagtgttcagctgtaaaacataatagaatcaagggaattcccaaactcgatgatgccaatgatgcagggggccgaaactccactgagtgtacgcttatcctgactgagggagattcagccaaaactttggctgtttcaggccttggtgtggttgggagagacaaatatggggttttccctcttagaggaaaaatactcaatgttcgagaagcttctcataagcagatcatggaaaatgctgagattaacaatatcatcaagattgtgggtcttcagtacaagaaaaactatgaagatgaagattcattgaagacgcttcgttatgggaagataatgattatgacagatcaggaccaagatggttcccacatcaaaggcttgctgattaattttatccatcacaactggccctctcttctgcgacatcgttttctggaggaatttatcactcccattgtaaaggtatctaaaaacaagcaagaaatggcattttacagccttcctgaatttgaagagtggaagagttctactccaaatcataaaaaatggaaagtcaaatattacaaaggtttgggcaccagcacatcaaaggaagctaaagaatactttgcagatatgaaaagacatcgtatccagttcaaatattctggtcctgaagatgatgctgctatcagcctggcctttagcaaaaaacagatagatgatcgaaaggaatggttaactaatttcatggaggatagaagacaacgaaagttacttgggcttcctgaggattacttgtatggacaaactaccacatatctgacatataatgacttcatcaacaaggaacttatcttgttctcaaattctgataacgagagatctatcccttctatggtggatggtttgaaaccaggtcagagaaaggttttgtttacttgcttcaaacggaatgacaagcgagaagtaaaggttgcccaattagctggatcagtggctgaaatgtcttcttatcatcatggtgagatgtcactaatgatgaccattatcaatttggctcagaattttgtgggtagcaataatctaaacctcttgcagcccattggtcagtttggtaccaggctacatggtggcaaggattctgctagtccacgatacatctttacaatgctcagctctttggctcgattgttatttccaccaaaagatgatcacacgttgaagtttttatatgatgacaaccagcgtgttgagcctgaatggtacattcctattattcccatggtgctgataaatggtgctgaaggaatcggtactgggtggtcctgcaaaatccccaactttgatgtgcgtgaaattgtaaataacatcaggcgtttgatggatggagaagaacctttgccaatgcttccaagttacaagaacttcaagggtactattgaagaactggctccaaatcaatatgtgattagtggtgaagtagctattcttaattctacaaccattgaaatctcagagcttcccgtcagaacatggacccagacatacaaagaacaagttctagaacccatgttgaatggcaccgagaagacacctcctctcataacagactatagggaataccatacagataccactgtgaaatttgttgtgaagatgactgaagaaaaactggcagaggcagagagagttggactacacaaagtcttcaaactccaaactagtctcacatgcaactctatggtgctttttgaccacgtaggctgtttaaagaaatatgacacggtgttggatattctaagagacttttttgaactcagacttaaatattatggattaagaaaagaatggctcctaggaatgcttggtgctgaatctgctaaactgaataatcaggctcgctttatcttagagaaaatagatggcaaaataatcattgaaaataagcctaagaaagaattaattaaagttctgattcagaggggatatgattcggatcctgtgaaggcctggaaagaagcccagcaaaaggttccagatgaagaagaaaatgaagagagtgacaacgaaaaggaaactgaaaagagtgactccgtaacagattctggaccaaccttcaactatcttcttgatatgcccctttggtatttaaccaaggaaaagaaagatgaactctgcaggctaagaaatgaaaaagaacaagagctggacacattaaaaagaaagagtccatcagatttgtggaaagaagacttggctacatttattgaagaattggaggctgttgaagccaaggaaaaacaagatgaacaagtcggacttcctgggaaaggggggaaggccaaggggaaaaaaacacaaatggctgaagttttgccttctccgcgtggtcaaagagtcattccacgaataaccatagaaatgaaagcagaggcagaaaagaaaaataaaaagaaaattaagaatgaaaatactgaaggaagccctcaagaagatggtgtggaactagaaggcctaaaacaaagattagaaaagaaacagaaaagagaaccaggtacaaagacaaagaaacaaactacattggcatttaagccaatcaaaaaaggaaagaagagaaatccctggtctgattcagaatcagataggagcagtgacgaaagtaattttgatgtccctccacgagaaacagagccacggagagcagcaacaaaaacaaaattcacaatggatttggattcagatgaagatttctcagattttgatgaaaaaactgatgatgaagattttgtcccatcagatgctagtccacctaagaccaaaacttccccaaaacttagtaacaaagaactgaaaccacagaaaagtgtcgtgtcagaccttgaagctgatgatgttaagggcagtgtaccactgtcttcaagccctcctgctacacatttcccagatgaaactgaaattacaaacccagttcctaaaaagaatgtgacagtgaagaagacagcagcaaaaagtcagtcttccacctccactaccggtgccaaaaaaagggctgccccaaaaggaactaaaagggatccagctttgaattctggtgtctctcaaaagcctgatcctgccaaaaccaagaatcgccgcaaaaggaagccatccacttctgatgattctgactctaattttgagaaaattgtttcgaaagcagtcacaagcaagaaatccaagggggagagtgatgacttccatatggactttgactcagctgtggctcctcgggcaaaatctgtacgggcaaagaaacctataaagtacctggaagagtcagatgaagatgatctgttttaaaatgtgaggcgattattttaagtaattatcttaccaagcccaagactggttttaaagttacctgaagctcttaacttcctcccctctgaatttagtttggggaaggtgtttttagtacaagacatcaaagtgaagtaaagcccaagtgttctttagctttttataatactgtctaaatagtgaccatctcatgggcattgttttcttctctgctttgtctgtgttttgagtctgctttcttttgtctttaaaacctgatttttaagttcttctgaactgtagaaatagctatctgatcacttcagcgtaaagcagtgtgtttattaaccatccactaagctaaaactagagcagtttgatttaaaagtgtcactcttcctccttttctactttcagtagatatgagatagagcataattatctgttttatcttagttttatacataatttaccatcagatagaactttatggttctagtacagatactctactacactcagcctcttatgtgccaagtttttctttaagcaatgagaaattgctcatgttcttcatcttctcaaatcatcagaggccaaagaaaaacactttggctgtgtctataacttgacacagtcaatagaatgaagaaaattagagtagttatgtgattatttcagctcttgacctgtcccctctggctgcctctgagtctgaatctcccaaagagagaaaccaatttctaagaggactggattgcagaagactcggggacaacatttgatccaagatcttaaatgttatattgataaccatgctcagcaatgagctattagattcattttgggaaatctccataatttcaatttgtaaactttgttaagacctgtctacattgttatatgtgtgtgacttgagtaatgttatcaacgtttttgtaaatatttactatgtttttctattagctaaattccaacaattttgtactttaataaa

SEQ ID NO: 113 - protein, 1531 aa, Homo sapiens [sequence omitted]

SEQ ID NO: 114 - DNA, 2967 bp, Homo sapiens
tagctccgcgcgggggcttcctcggctccttgctgttgccgccgccgcagctgctgccgcggttggtggggttgggtgagaggaggagctgtcgcggaccctgtagagtcggtctctgttgctctttttgcctgaggagtcttccatcctacgtcgagctctgactcccgtgctgtcgagagggagtccccggggacacctcggcacgcagcggagatgcctctttttgccaccaatcccttcgatcaggatgttgagaaagcaaccagcgagatgaatactgctgaggactggggcctcattttggatatctgtgataaagttggtcagtctcgcactggacctaaggattgtcttcggtctattatgagaagagtgaaccacaaagatcctcacgttgctatgcaggctttgactcttctaggagcatgtgtatcaaactgtggcaaaatttttcatttagaagtatgttcaagagattttgctagtgaagtaagcaacgtattaaataagggtcatcctaaagtatgtgaaaaattaaaggctcttatggttgaatggacagatgaatttaagaatgatccacagcttagtctaatatcagcaatgattaagaaccttaaggaacaaggagttacgttcccagctattggctctcaggctgcagaacaagcaaaagcaagcccagctcttgtagccaaggatcctggtactgtggctaacaaaaaagaagaagaagatttagcaaaagccattgagttgtctctcaaggaacaaaggcagcagtcaaccaccctttccactttgtatccaagcacatccagtctcttaactaaccaccaacatgaaggccgaaaagttcgtgctatatatgactttgaagctgctgaagacaatgaacttacttttaaagctggagaaattattacagttcttgatgacagtgatcctaactggtggaaaggtgaaacccatcaaggcatagggttatttccttctaattttgtgactgcagatctcactgctgaaccagaaatgattaaaacagagaagaagacggtacaatttagtgatgatgttcaggtagagacaatagaaccagagccggaaccagcctttattgatgaagataaaatggaccagttgctacagatgctgcaaagtacagaccccagtgatgatcagccagacctaccagagctgcttcatcttgaagcaatgtgtcaccagatgggacctctcattgatgaaaagctggaagatattgatagaaaacattcagaactctcagaacttaatgtgaaagtgatggaggccctttccttatataccaagttaatgaacgaagatccgatgtattccatgtatgcaaagttacagaatcagccatattatatgcagtcatctggtgtttctggttctcaggtgtatgcagggcctcctccaagtggtgcctacctggttgcagggaacgcgcagatgagccacctccagagctacagtcttcccccggagcagctgtcttctctcagccaggcagtggtcccaccatccgcaaacccagcccttcctagtcagcagactcaggccgcttacccaaatacaatggtcagttccgttcaaggaaacacatatcccagccaggcgccagtatatagtcctcctcctgccgctactgctgctgctgcaactgccgatgtcactctgtaccagaatgcaggacctaatatgccccaggtgccaaactataacttaacatcatcaactctgcctcagcccggaggcagccaacagccacctcagccacagcaaccatattctcagaaggctctgctataggacccggtgttcctcttggtggcagatacctgctaaatgccactgacaatgttatgagattcattactatcttaagatgtgtttatcctcagcttataggaatctctccaggtcaacaggttcaaatattcaagaaggtagaactctcctcaatttacactgactttttagaggttcttccccccccgcccctgcagaggaatgaaactacttacaacatttaattcctttcataatatgaaagaattgatacaaggctatttgtctcgtaaacctggtctgcagaaagtcaaacttacaaaaactgttgtgacaaatgttatgtacatatattgatatgtaactgcattagtggccattttgaatcacagtggtgatcgtgtgaatatatttaacactgtgttaaattaatttacgttgctattttattttaatcataaacaactaccatgtttcttaatgttttgtgtaaatttaaggtaattatactatccttttaaacttcaagaaaacaaagttgttagcgtatttacatgaaggcgcattatgttgtcgtgtgtttcagtttcacattaaactgaaccttttactaattgtgagctaaagagatatatatatatatgtgtgtgtatatatatatatctacatgtctttctgtagcctctgcatactactggctgtcatcacaccagcgtacagtagctaaatttttggtgcaattatagcaaatgataatgttcccttttgaacttttacattttggcatgacatttcagagtattgtgggaccatgagacaaaattaagtacgatcacattctttatttctcattttaaagaaatgatgttggtttaccttttcctagttgaagatagtaattaggtttctaagctgtatactgtgtttattggtggcagtgacaccaaagatagaggcaatggatagaaatttttaaactggaaagaaaacctgaattacactacattttcgaagtctcttgtaattatttgggatatcaacaaaatttgattcgtctgtctaatcccttgctagtattttaaatatgtctttaacacattgtatcctttaattcttcattaaaatggaaataagtagatgtttcaaagt

SEQ ID NO: 115 - protein, 540 aa, Homo sapiens
MPLFATNPFDQDVEKATSEMNTAEDWGLILDICDKVGQSRTGPKDCLRSIMRRVNHKDPHVAMQALTLLGACVSNCGKIFHLEVCSRDFASEVSNVLNKGHPKVCEKLKALMVEWTDEFKNDPQLSLISAMIKNLKEQGVTFPAIGSQAAEQAKASPALVAKDPGTVANKKEEEDLAKAIELSLKEQRQQSTTLSTLYPSTSSLLTNHQHEGRKVRAIYDFEAAEDNELTFKAGEIITVLDDSDPNWWKGETHQGIGLFPSNFVTADLTAEPEMIKTEKKTVQFSDDVQVETIEPEPEPAFIDEDKMDQLLQMLQSTDPSDDQPDLPELLHLEAMCHQMGPLIDEKLEDIDRKHSELSELNVKVMEALSLYTKLMNEDPMYSMYAKLQNQPYYMQSSGVSGSQVYAGPPPSGAYLVAGNAQMSHLQSYSLPPEQLSSLSQAVVPPSANPALPSQQTQAAYPNTMVSSVQGNTYPSQAPVYSPPPAATAAAATADVTLYQNAGPNMPQVPNYNLTSSTLPQPGGSQQPPQPQQPYSQKALL

SEQ ID NO: 116 - DNA, 1891 bp, Homo sapiens
ccgaggctataagagggcgcacaagtggcgcggcgcaggagccgccgccagtggagggccgggcgctgcggccgcggccggggcgggcgcagggccgagcggacgggggggcgcgggccccccgggaggccgcggccactcccccccgggccggcgcggcgggggaggcggaggatggaaacacccttctacggcgatgaggcgctgagcggcctgggcggcggcgccagtggcagcggcggcacgttcgcgtccccgggccgcttgttccccggggcgcccccgacggccgcggccggcagcatgatgaagaaggacgcgctgacgctgagcctgagtgagcaggtggcggcagcgctcaagcctgcgcccgcgcccgcctcctacccccctgccgccgacggcgcccccagcgcggcaccccccgacggcctgctcgcctctcccgacctggggctgctgaagctggcctcccccgagctcgagcgcctcatcatccagtccaacgggctggtcaccaccacgccgacgagctcacagttcctctaccccaaggtggcggccagcgaggagcaggagttcgccgagggcttcgtcaaggccctggaggatttacacaagcagaaccagctcggcgcgggccgggccgctgccgccgccgccgccgccgccggggggccctcgggcacggccacgggctccgcgccccccggcgagctggccccggcggcggccgcgcccgaagcgcctgtctacgcgaacctgagcagctacgcgggcggcgccgggggcgcggggggcgccgcgacggtcgccttcgctgccgaacctgtgcccttcccgccgccgccacccccaggcgcgttggggccgccgcgcctggctgcgctcaaggacgagccacagacggtgcccgacgtgccgagcttcggcgagagcccgccgttgtcgcccatcgacatggacacgcaggagcgcatcaaggcggagcgcaagcggctgcgcaaccgcatcgccgcctccaagtgccgcaagcgcaagctggagcgcatctcgcgcctggaagagaaagtgaagaccctcaagagtcagaacacggagctggcgtccacggcgagcctgctgcgcgagcaggtggcgcagctcaagcagaaagtcctcagccacgtcaacagcggctgccagctgctgccccagcaccaggtcccggcgtactgagtcgggcatggcggccacctccaaggggcgggctcgcgggggggtgtcgtgggcgccccggacttggagagggtgcggccctccacccccccctccccgagtgtgcccaggaactcagagaggcgcggccccggggattcccccccgaggtgcccaggactcggaaggggcgccccggactcgacaagctggaccccctgctcccgggggcgagcgcatgacccccccgccctcgcgctgcctctttcccccgcgcggccgccccgtgttgcacaaacccgcgcgtctcggctgcccctttgtacaccgcgccgcaagggggctccgagggggcgcacgtcaaaccctgcctttcctttacttttactttttttttttctttggaagagagaagaacagagtgttcgattctgccctatttatgtttctactcggggaacaaacgttggttgtgtgtgtgtgtgttttcttgtgttggttttttaaagaaatgggaagaagaaaaaaaaattctccgcccctttcctcgatctcgctcccccttcggtctttcgaccgtccccccctcccctttttttgttctgttttgttttgttttgctacgagtccacattcctgtttgtaatccttggttcgcccggttttctgttttcagtaaagtctcgttacgcca

SEQ ID NO: 117 - protein, 347 aa, Homo sapiens
METPFYGDEALSGLGGGASGSGGTFASPGRLFPGAPPTAAAGSMMKKDALTLSLSEQVAAALKPAPAPASYPPAADGAPSAAPPDGLLASPDLGLLKLASPELERLIIQSNGLVTTTPTSSQFLYPKVAASEEQEFAEGFVKALEDLHKQNQLGAGRAAAAAAAAAGGPSGTATGSAPPGELAPAAAAPEAPVYANLSSYAGGAGGAGGAATVAFAAEPVPFPPPPPPGALGPPRLAALKDEPQTVPDVPSFGESPPLSPIDMDTQERIKAERKRLRNRIAASKCRKRKLERISRLEEKVKTLKSQNTELASTASLLREQVAQLKQKVLSHVNSGCQLLPQHQVPAY

SEQ ID NO: 118 - DNA, 7546 bp, Homo sapiens
cgtccctgcagccctcgcccggcgctccagtagcaggacccggtctcgggaccagccggtaatatgcacgtgtcactagctgaggccctggaggttcggggtggaccacttcaggaggaagaaatatgggctgtattaaatcaaagtgctgaaagtctccaagaattattcagaaaagtaagcctagctgatcctgctgcccttggcttcatcatttctccatggtctctgctgttgctgccatctggtagtgtgtcatttacagatgaaaatatttccaatcaggatcttcgagcattcactgcaccagaggttcttcaaaatcagtcactaacttctctctcagatgttgaaaagatccacatttattctcttggaatgacactgtattggggggctgattatgaagtgcctcagagccaacctattaagcttggagatcatctcaacagcatactgcttggaatgtgtgaggatgttatttacgctcgagtttctgttcggactgtgctggatgcttgcagtgcccacattaggaatagcaattgtgcaccctcattttcctacgtgaaacacttggtaaaactggttctgggaaatctttctgggacagatcagctttcctgtaacagtgaacaaaagcctgatcgaagccaggctattcgagatcgattgcgaggaaaaggattaccaacaggaagaagctctacttctgatgtactagacatacaaaagcctccactctctcatcagacctttcttaacaaagggcttagtaaatctatgggatttctgtccatcaaagatacacaagatgagaattatttcaaggacattttatcagataattctggacgtgaagattctgaaaatacattctccccttaccagttcaaaactagtggcccagaaaaaaaacccatccctggcattgatgtgctttctaagaagaagatctgggcttcatccatggacttgctttgtacagctgacagagacttctcttcaggagagactgccacatatcgtcgttgtcaccctgaggcagtaacagtgcggacttcaactactcctagaaaaaaggaggcaagatactcagatggaagtatagccttggatatctttggccctcagaaaatggatccaatatatcacactcgagaattgcccacctcctcagcaatatcaagtgctttggaccgaatccgagagagacaaaagaaacttcaggttctgagggaagccatgaatgtagaagaaccagttcgaagatacaaaacttatcatggtgatgtctttagtacctccagtgaaagtccatctattatttcctctgaatcagatttcagacaagtgagaagaagtgaagcctcaaagaggtttgaatccagcagtggtctcccaggggtagatgaaaccttaagtcaaggccagtcacagagaccgagcagacaatatgaaacaccctttgaaggcaacttaattaatcaagagatcatgctaaaacggcaagaggaagaactgatgcagctacaagccaaaatggcccttagacagtctcggttgagcctatatccaggagacacaatcaaagcgtccatgcttgacatcaccagggatccgttaagagaaattgccctagaaacagccatgactcaaagaaaactgaggaatttctttggccctgagtttgtgaaaatgacaattgaaccatttatatctttggatttgccacggtctattcttactaagaaagggaagaatgaggataaccgaaggaaagtaaacataatgcttctgaacgggcaaagactggaactgacctgtgataccaaaactatatgtaaagatgtgtttgatatggttgtggcacatattggcttagtagagcatcatttgtttgctttagctaccctcaaagataatgaatatttctttgttgatcctgacttaaaattaaccaaagtggccccagagggatggaaagaagaaccaaagaaaaagaccaaagccactgttaattttactttgtttttcagaattaaattttttatggatgatgttagtctaatacaacatactctgacgtgtcatcagtattaccttcagcttcgaaaagatattttggaggaaaggatgcactgtgatgatgagacttccttattgctggcatccttggctctccaggctgagtatggagattatcaaccagaggttcatggtgtgtcttactttagaatggagcactatttgcccgccagagtgatggagaaacttgatttatcctatatcaaagaagagttacccaaattgcataatacctatgtgggagcttctgaaaaagagacagagttagaatttttaaaggtctgccaaagactgacagaatatggagttcattttcaccgagtgcaccctgagaagaagtcacaaacaggaatattgcttggagtctgttctaaaggtgtccttgtgtttgaagttcacaatggagtgcgcacattggtccttcgctttccatggagggaaaccaagaaaatatctttttctaaaaagaaaatcacattgcaaaatacatcagatggaataaaacatggcttccagacagacaacagtaagatatgccagtacctgctgcacctctgctcttaccagcataagttccagctacagatgagagcaagacagagcaaccaagatgcccaagatattgatgtgctacacaaaagatggagcatagtatcttcaccagaaagggagatcaccttagtgaacctgaaaaaagatgcaaagtatggcttgggatttcaaattattggtggggagaagatgggaagactggacctaggcatatttatcagttcagttgcccctggaggaccagctgacttggatggatgcttgaagccaggagaccgtttgatatctgtgaatagtgtgagtctggagggagtcagccaccatgctgcaattgaaattttgcaaaatgcacctgaagatgtgacacttgttatctctcagccaaaagaaaagatatccaaagtgccttctactcctgtgcatctcaccaatgagatgaaaaactacatgaagaaatcttcctacatgcaagacagtgctatagattcttcttccaaggatcaccactggtcacgtggtaccctgaggcacatctcggagaactcctttgggccatctgggggcctgcgggaaggaagcctgagttctcaagattccaggactgagagtgccagcttgtctcaaagccaggtcaatggtttctttgccagccatttaggtgaccaaacctggcaggaatcacagcatggcagcccttccccatctgtaatatccaaagccaccgagaaagagactttcactgatagtaaccaaagcaaaactaaaaagccaggcatttctgatgtaactgattactcagaccgtggagattcagacatggatgaagccacttactccagcagtcaggatcatcaaacaccaaaacaggaatcttcctcttcagtgaatacatccaacaagatgaattttaaaactttttcttcatcacctcctaagcctggagatatctttgaggttgaactggctaaaaatgataacagcttggggataagtgtcacgggaggtgtgaatacgagtgtcagacatggtggcatttatgtgaaagctgttattccccagggagcagcagagtctgatggtagaattcacaaaggtgatcgcgtcctagctgtcaatggagttagtctagaaggagccacccataagcaagctgtggaaacactgagaaatacaggacaggtggttcatctgttattagaaaagggacaatctccaacatctaaagaacatgtcccggtaaccccacagtgtaccctttcagatcagaatgcccaaggtcaaggcccagaaaaagtgaagaaaacaactcaggtcaaagactacagctttgtcactgaagaaaatacatttgaggtaaaattatttaaaaatagctcaggtctaggattcagtttttctcgagaagataatcttataccggagcaaattaatgccagcatagtaagggttaaaaagctctttcctggacagccagcagcagaaagtggaaaaattgatgtaggagatgttatcttgaaagtgaatggagcctctttgaaaggactatctcagcaggaagtcatatctgctctcaggggaactgctccagaagtattcttgcttctctgcagacctccacctggtgtgctaccggaaattgatactgcgcttttgaccccacttcagtctccagcacaagtacttccaaacagcagtaaagactcttctcagccatcatgtgtggagcaaagcaccagctcagatgaaaatgaaatgtcagacaaaagcaaaaaacagtgcaagtccccatccagaagagacagttacagtgacagcagtgggagtggagaagatgacttagtgacagctccagcaaacatatcaaattcgacctggagttcagctttgcatcagactctaagcaacatggtatcacaggcacagagtcatcatgaagcacccaagagtcaagaagataccatttgtaccatgttttactatcctcagaaaattcccaataaaccagagtttgaggacagtaatccttcccctctaccaccggatatggctcctgggcagagttatcaaccccaatcagaatctgcttcctctagttcgatggataagtatcatatacatcacatttctgaaccaactagacaagaaaactggacacctttgaaaaatgacttggaaaatcaccttgaagactttgaactggaagtagaactcctcattaccctaattaaatcagaaaaaggaagcctgggttttacagtaaccaaaggcaatcagagaattggttgttatgttcatgatgtcatacaggatccagccaaaagtgatggaaggctaaaacctggggaccggctcataaaggttaatgatacagatgttactaatatgactcatacagatgcagttaatctgctccgggctgcatccaaaacagtcagattagttattggacgagttctagaattacccagaataccaatgttgcctcatttgctaccggacataacactaacgtgcaacaaagaggagttgggtttttccttatgtggaggtcatgacagcctttatcaagtggtatatattagtgatattaatccaaggtccgtcgcagccattgagggtaatctccagctattagatgtcatccattatgtgaacggagtcagcacacaaggaatgaccttggaggaagttaacagagcattagacatgtcacttccttcattggtattgaaagcaacaagaaatgatcttccagtggtccccagctcaaagaggtctgctgtttcagctccaaagtcaaccaaaggcaatggttcctacagtgtggggtcttgcagccagcctgccctcactcctaatgattcattctccacggttgctggggaagaaataaatgaaatatcgtaccccaaaggaaaatgttctacttatcagataaagggatcaccaaacttgactctgcccaaagaatcttatatacaagaagatgacatttatgatgattcccaagaagctgaagttatccagtctctgctggatgttgtggatgaggaagcccagaatcttttaaacgaaaataatgcagcaggatactcctgtggtccaggtacattaaagatgaatgggaagttatcagaagagagaacagaagatacagactgcgatggttcacctttacctgagtattttactgaggccaccaaaatgaatggctgtgaagaatattgtgaagaaaaagtaaaaagtgaaagcttaattcagaagccacaagaaaagaagactgatgatgatgaaataacatggggaaatgatgagttgccaatagagagaacaaaccatgaagattctgataaagatcattcctttctgacaaacgatgagctcgctgtactccctgtcgtcaaagtgcttccctctggtaaatacacgggtgccaacttaaaatcagtcattcgagtcctgcggggtttgctagatcaaggaattccttctaaggagctggagaatcttcaagaattaaaacctttggatcagtgtctaattgggcaaactaaggaaaacagaaggaagaacagatataaaaatatacttccctatgatgctacaagagtgcctcttggagatgaaggtggctatatcaatgccagcttcattaagataccagttgggaaagaagagttcgtttacattgcctgccaaggaccactgcctacaactgttggagacttctggcagatgatttgggagcaaaaatccacagtgatagccatgatgactcaagaagtagaaggagaaaaaatcaaatgccagcgctattggcccaacatcctaggcaaaacaacaatggtcagcaacagacttcgactggctcttgtgagaatgcagcagctgaagggctttgtggtgagggcaatgacccttgaagatattcagaccagagaggtgcgccatatttctcatctgaatttcactgcctggccagaccatgatacaccttctcaaccagatgatctgcttacttttatctcctacatgagacacatccacagatcaggcccaatcattacgcactgcagtgctggcattggacgttcagggaccctgatttgcatagatgtggttctgggattaatcagtcaggatcttgattttgacatctctgatttggtgcgctgcatgagactacaaagacacggaatggttcagacagaggatcaatatattttctgctatcaagtcatcctttatgtcctgacacgtcttcaagcagaagaagagcaaaaacagcagcctcagcttctgaagtgacatgaaaagagcctctggatgcatttccatttctctccttaacctccagcagactcctgctctctatccaaaataaagatcacagagcagcaagttcatacaacatgcatgttctcctctatcttagaggggtattcttcttgaaaataaaaaatattgaaatgctgtatttttacagctactttaacctatgataattatttacaaaattttaacactaaccaaacaatgcagatcttagggatgattaaaggcagcatttgatgatagcagacattgttacaaggacatggtgagtctatttttaatgcaccaatcttgtttatagcaaaaatgttttccaatattttaataaagtagttattttataggggatacttgaaaccagtatttaagctttaaatgacagtaatattggcatagaaaaaagtagcaaatgtttactgtatcaatttctaatgtttactatatagaatttcctgtaatatatttatatactttttcatgaaaatggagttatcagttatctgtttgttactgcatcatctgtttgtaatcattatctcactttgtaaataaaaacacaccttaaaacatg

SEQ ID NO: 119 - DNA, 2088 bp, Homo sapiens
gaattcggcacgagcgcgcggcgaatctcaacgctgcgccgtctgcgggcgcttccgggccaccagtttctctgctttccaccctggcgccccccagccctggctccccagctgcgctgccccgggcgtccacgccctgcgggcttagcgggttcagtgggctcaatctgcgcagcgccacctccatgttgaccaagcctctacaggggcctcccgcgccccccgggacccccacgccgccgccaggaggcaaggatcgggaagcgttcgaggccgagtatcgactcggccccctcctgggtaaggggggctttggcaccgtcttcgcaggacaccgcctcacagatcgactccaggtggccatcaaagtgattccccggaatcgtgtgctgggctggtcccccttgtcagactcagtcacatgcccactcgaagtcgcactgctatggaaagtgggtgcaggtggtgggcaccctggcgtgatccgcctgcttgactggtttgagacacaggaaggcttcatgctggtcctcgagcggcctttgcccgcccaggatctctttgactatatcacagagaagggcccactgggtgaaggcccaagccgctgcttctttggccaagtagtggcagccatccagcactgccattcccgtggagttgtccatcgtgacatcaaggatgagaacatcctgatagacctacgccgtggctgtgccaaactcattgattttggttctggtgccctgcttcatgatgaaccctacactgactttgatgggacaagggtgtacagccccccagagtggatctctcgacaccagtaccatgcactcccggccactgtctggtcactgggcatcctcctctatgacatggtgtgtggggacattccctttgagagggaccaggagattctggaagctgagctccacttcccagcccatgtctccccagactgctgtgccctaatccgccggtgcctggcccccaaaccttcttcccgaccctcactggaagagatcctgctggacccctggatgcaaacaccagccgaggatgttacccctcaacccctccaaaggaggccctgcccctttggcctggtccttgctaccctaagcctggcctggcctggcctggcccccaatggtcagaagagccatcccatggccatgtcacagggatagatggacatttgttgacttggttttacaggtcattaccagtcattaaagtccagtattactaaggtaagggattgaggatcaggggttagaagacataaaccaagtttgcccagttcccttcccaatcctacaaaggagccttcctcccagaacctgtggtccctgattttggagggggaacttcttgcttctcattttgctaaggaagtttattttggtgaagttgttcccattttgagccccgggactcttattttgatgatgtgtcaccccacattggcacctcctactaccaccacacaaacttagttcatatgcttttacttgggcaagggtgctttccttccaataccccagtagcttttattttagtaaagggaccctttcccctagcctagggtcccatattgggtcaagctgcttacctgcctcagcccaggattttttattttgggggaggtaatgccctgttgttaccccaaggcttctttttttttttttttttttttgggtgaggggaccctactttgttatcccaagtgctcttattctggtgagaagaaccttaattccataatttgggaaggaatggaagatggacaccaccggacaccaccagacaataggatgggatggatggttttttgggggatgggctaggggaaataaggcttgctgtttgttttcctggggcgctccctccaattttgcagatttttgcaacctcctcctgagccgggattgtccaattactaaaatgtaaataatcacgtattgtggggaggggagttccaagtgtgccctccttttttttcctgcctggattatttaaaaagccatgtgtggaaacccactatttaataaaagtaatagaatcagaaaaaaaaaaaaaaaaaaa

SEQ ID NO: 120 - protein, 334 aa, Homo sapiens
MLTKPLQGPPAPPGTPTPPPGGKDREAFEAEYRLGPLLGKGGFGTVFAGHRLTDRLQVAIKVIPRNRVLGWSPLSDSVTCPLEVALLWKVGAGGGHPGVIRLLDWFETQEGFMLVLERPLPAQDLFDYITEKGPLGEGPSRCFFGQVVAAIQHCHSRGVVHRDIKDENILIDLRRGCAKLIDFGSGALLHDEPYTDFDGTRVYSPPEWISRHQYHALPATVWSLGILLYDMVCGDIPFERDQEILEAELHFPAHVSPDCCALIRRCLAPKPSSRPSLEEILLDPWMQTPAEDVTPQPLQRRPCPFGLVLATLSLAWPGLAPNGQKSHPMAMSQG

SEQ ID NO: 121 - DNA, 4739 bp, Homo sapiens
ggggagataggtaggagtagcgtggtaagggcgatgagtgtgggccgggcgggagtgcggcgagagccggctggctgagcttagcgtccgaggaggcggcggcggcggcggcggcagcggcggcggcggggctgtggggcggtgcggaagcgagaggcgaggagcgcgcgggccgtggccagagtctggcggcggcctggcggagcggagagcagcgcccgcgcctcgccgtgcggaggagccccgcacacaatagcggcgcgcgcagcccgcgcccttccccccggcgcgccccgccccgcgcgccgagcgccccgctccgcctcacctgccaccagggagtgggcgggcattgttcgccgccgccgccgccgcgcggggccatgggggccgcccggcgcccggggccgggcctggcgaggccgccgcgccgccgctgagacgggccccgcgcgcagcccggcggcgcaggtaaggccggccgcgccatggtggacccggtgggcttcgcggaggcgtggaaggcgcagttcccggactcagagcccccgcgcatggagctgcgctcagtgggcgacatcgagcaggagctggagcgctgcaaggcctccattcggcgcctggagcaggaggtgaaccaggagcgcttccgcatgatctacctgcagacgttgctggccaaggaaaagaagagctatgaccggcagcgatggggcttccggcgcgcggcgcaggcccccgacggcgcctccgagccccgagcgtccgcgtcgcgcccgcagccagcgcccgccgacggagccgacccgccgcccgccgaggagcccgaggcccggcccgacggcgagggttctccgggtaaggccaggcccgggaccgcccgcaggcccggggcagccgcgtcgggggaacgggacgaccggggaccccccgccagcgtggcggcgctcaggtccaacttcgagcggatccgcaagggccatggccagcccggggcggacgccgagaagcccttctacgtgaacgtcgagtttcaccacgagcgcggcctggtgaaggtcaacgacaaagaggtgtcggaccgcatcagctccctgggcagccaggccatgcagatggagcgcaaaaagtcccagcacggcgcgggctcgagcgtgggggatgcatccaggcccccttaccggggacgctcctcggagagcagctgcggcgtcgacggcgactacgaggacgccgagttgaacccccgcttcctgaaggacaacctgatcgacgccaatggcggtagcaggcccccttggccgcccctggagtaccagccctaccagagcatctacgtcgggggcatgatggaaggggagggcaagggcccgctcctgcgcagccagagcacctctgagcaggagaagcgccttacctggccccgcaggtcctactccccccggagttttgaggattgcggaggcggctataccccggactgcagctccaatgagaacctcacctccagcgaggaggacttctcctctggccagtccagccgcgtgtccccaagccccaccacctaccgcatgttccgggacaaaagccgctctccctcgcagaactcgcaacagtccttcgacagcagcagtccccccacgccgcagtgccataagcggcaccggcactgcccggttgtcgtgtccgaggccaccatcgtgggcgtccgcaagaccgggcagatctggcccaacgatggcgagggcgccttccatggagacgcagatggctcgttcggaacaccacctggatacggctgcgctgcagaccgggcagaggagcagcgccggcaccaagatgggctgccctacattgatgactcgccctcctcatcgccccacctcagcagcaagggcaggggcagccgggatgcgctggtctcgggagccctggagtccactaaagcgagtgagctggacttggaaaagggcttggagatgagaaaatgggtcctgtcgggaatcctggctagcgaggagacttacctgagccacctggaggcactgctgctgcccatgaagcctttgaaagccgctgccaccacctctcagccggtgctgacgagtcagcagatcgagaccatcttcttcaaagtgcctgagctctacgagatccacaaggagttctatgatgggctcttcccccgcgtgcagcagtggagccaccagcagcgggtgggcgacctcttccagaagctggccagccagctgggtgtgtaccgggccttcgtggacaactacggagttgccatggaaatggctgagaagtgctgtcaggccaatgctcagtttgcagaaatctccgagaacctgagagccagaagcaacaaagatgccaaggatccaacgaccaagaactctctggaaactctgctctacaagcctgtggaccgtgtgacgaggagcacgctggtcctccatgacttgctgaagcacactcctgccagccaccctgaccaccccttgctgcaggacgccctccgcatctcacagaacttcctgtccagcatcaatgaggagatcacaccccgacggcagtccatgacggtgaagaagggagagcaccggcagctgctgaaggacagcttcatggtggagctggtggagggggcccgcaagctgcgccacgtcttcctgttcaccgagctgcttctctgcaccaagctcaagaagcagagcggaggcaaaacgcagcagtatgactgcaaatggtacattccgctcacggatctcagcttccagatggtggatgaactggaggcagtgcccaacatccccctggtgcccgatgaggagctggacgctttgaagatcaagatctcccagatcaagagtgacatccagagagagaagagggcgaacaagggcagcaaggctacggagaggctgaagaagaagctgtcggagcaggagtcactgctgctgcttatgtctcccagcatggccttcagggtgcacagccgcaacggcaagagttacacgttcctgatctcctctgactatgagcgtgcagagtggagggagaacatccgggagcagcagaagaagtgtttcagaagcttctccctgacatccgtggagctgcagatgctgaccaactcgtgtgtgaaactccagactgtccacagcattccgctgaccatcaataaggaagatgatgagtctccggggctctatgggtttctgaatgtcatcgtccactcagccactggatttaagcagagttcaaatctgtactgcaccctggaggtggattcctttgggtattttgtgaataaagcaaagacgcgcgtctacagggacacagctgagccaaactggaacgaggaatttgagatagagctggagggctcccagaccctgaggatactgtgctatgaaaagtgttacaacaagacgaagatccccaaggaggacggcgagagcacggacagactcatggggaagggccaggtccagctggacccgcaggccctgcaggacagagactggcagcgcaccgtcatcgccatgaatgggatcgaagtaaagctctcggtcaagttcaacagcagggagttcagcttgaagaggatgccgtcccgaaaacagacaggggtcttcggagtcaagattgctgtggtcaccaagagagagaggtccaaggtgccctacatcgtgcgccagtgcgtggaggagatcgagcgccgaggcatggaggaggtgggcatctaccgcgtgtccggtgtggccacggacatccaggcactgaaggcagccttcgacgtcaataacaaggatgtgtcggtgatgatgagcgagatggacgtgaacgccatcgcaggcacgctgaagctgtacttccgtgagctgcccgagcccctcttcactgacgagttctaccccaacttcgcagagggcatcgctctttcagacccggttgcaaaggagagctgcatgctcaacctgctgctgtccctgccggaggccaacctgctcaccttccttttccttctggaccacctgaaaagggtggcagagaaggaggcagtcaataagatgtccctgcacaacctcgccacggtctttggccccacgctgctccggccctccgagaaggagagcaagctccctgccaaccccagccagcctatcaccatgactgacagctggtccttggaggtcatgtcccaggtccaggtgctgctgtacttcctgcagctggaggccatccctgccccggacagcaagagacagagcatcctgttctccaccgaagtctaaaggtcccagtccatctcctggaggcagacagatggcctggaaacctctggctaatcgggccatccgtagagcgggaaccttcctgaggtgtccttgggccacccccaagtgttgggccatctgccaagagacagcgacccaaagccgaaggacaggtggcctgggcagatctcgcccaggtctgggagccccaggctggcctcagactgtggttttttatgtggccacccgagggcgccccaagccagttcatctcagagtccaggcctgaccctgggagacagggtgaagggagtgatttttatgaacttaacttagagtctaaaagatttctactggatcacttgtcaagatgcgccctctctggggagaagggaacgtgaccggattccctcactgttgtatcttgaataaacgctgctgcttcatcctgtg

SEQ ID NO: 122 - protein, 1271 aa, Homo sapiens
MVDPVGFAEAWKAQFPDSEPPRMELRSVGDIEQELERCKASIRRLEQEVNQERFRMIYLQTLLAKEKKSYDRQRWGFRRAAQAPDGASEPRASASRPQPAPADGADPPPAEEPEARPDGEGSPGKARPGTARRPGAAASGERDDRGPPASVAALRSNFERIRKGHGQPGADAEKPFYVNVEFHHERGLVKVNDKEVSDRISSLGSQAMQMERKKSQHGAGSSVGDASRPPYRGRSSESSCGVDGDYEDAELNPRFLKDNLIDANGGSRPPWPPLEYQPYQSIYVGGMMEGEGKGPLLRSQSTSEQEKRLTWPRRSYSPRSFEDCGGGYTPDCSSNENLTSSEEDFSSGQSSRVSPSPTTYRMFRDKSRSPSQNSQQSFDSSSPPTPQCHKRHRHCPVVVSEATIVGVRKTGQIWPNDGEGAFHGDADGSFGTPPGYGCAADRAEEQRRHQDGLPYIDDSPSSSPHLSSKGRGSRDALVSGALESTKASELDLEKGLEMRKWVLSGILASEETYLSHLEALLLPMKPLKAAATTSQPVLTSQQIETIFFKVPELYEIHKEFYDGLFPRVQQWSHQQRVGDLFQKLASQLGVYRAFVDNYGVAMEMAEKCCQANAQFAEISENLRARSNKDAKDPTTKNSLETLLYKPVDRVTRSTLVLHDLLKHTPASHPDHPLLQDALRISQNFLSSINEEITPRRQSMTVKKGEHRQLLKDSFMVELVEGARKLRHVFLFTELLLCTKLKKQSGGKTQQYDCKWYIPLTDLSFQMVDELEAVPNIPLVPDEELDALKIKISQIKSDIQREKRANKGSKATERLKKKLSEQESLLLLMSPSMAFRVHSRNGKSYTFLISSDYERAEWRENIREQQKKCFRSFSLTSVELQMLTNSCVKLQTVHSIPLTINKEDDESPGLYGFLNVIVHSATGFKQSSNLYCTLEVDSFGYFVNKAKTRVYRDTAEPNWNEEFEIELEGSQTLRILCYEKCYNKTKIPKEDGESTDRLMGKGQVQLDPQALQDRDWQRTVIAMNGIEVKLSVKFNSREFSLKRMPSRKQTGVFGVKIAVVTKRERSKVPYIVRQCVEEIERRGMEEVGIYRVSGVATDIQALKAAFDVNNKDVSVMMSEMDVNAIAGTLKLYFRELPEPLFTDEFYPNFAEGIALSDPVAKESCMLNLLLSLPEANLLTFLFLLDHLKRVAEKEAVNKMSLHNLATVFGPTLLRPSEKESKLPANPSQPITMTDSWSLEVMSQVQVLLYFLQLEAIPAPDSKRQSILFSTEV

SEQ ID NO: 123 - DNA, 4714 bp, Homo sapiens
ggggggagggtggcggctcgatgggggagccgccccagggggcccccccgccctgtgcccacggcgcggcccctttaaggaggcccgcctggctccgctccatcgcgcatcgcggccgcctccccccggccctcccttcctgcggcgcagagtgcgggccgggcgggagtgcggcgagccggctggcttagcgtccgaggaggcggcggcggcggcggcggcagcggcggcggcggggctggtggggcggtgcggaagcgagaggcgaggagcgcgcgggccgtggccagagtctggcggcggcctggcggagcggagagcagcgcccgcgcctcgccgtgcggaggagccccgcacacaatagcggcgcgcgcagcccgcgcccttccccccggcgcgccccgccccgcgcgccgagcgccccgctccgcctcacctgccaccagggagtgggcgggcattgttcgccgccgccgccgccgcgcggggccatgggggccgcccggcgcccggggccgggcctggcgaggccgccgcgccgccgctgagacgggccccgcgcgcagcccggcggcgcaggtaaggccggccgcgccatggtggacccggtgggcttcgcggaggcgtggaaggcgcagttcccggactcagagcccccgcgcatggagctgcgctcagtgggcgacatcgagcaggagctggagcgctgcaaggcctccattcggcgcctggagcaggaggtgaaccaggagcgcttccgcatgatctacctgcagacgttgctggccaaggaaaagaagagctatgaccggcagcgatggggcttccggcgcgcggcgcaggcccccgacggcgcctccgagccccgagcgtccgcgtcgcgcccgcagccagcgcccgccgacggagccgacccgccgcccgccgaggagcccgaggcccggcccgacggcgagggttctccgggtaaggccaggcccgggaccgcccgcaggcccggggcagccgcgtcgggggaacgggacgaccggggaccccccgccagcgtggcggcgctcaggtccaacttcgagcggatccggaagggccatggccagcccggggcggacgccgagaagcccttctacgtgaacgtcgagtttcaccacgagcgcggcctggtgaaggtcaacgacaaagaggtgtcggaccgcatcagctcccttggcagccaggccatgcagatggagcgcaaaaagtcccagcacggcgcgggctcgagcgtgggggatgcatccaggcccccttaccggggacgctcctcggagagcagctgcggcgtcgacggcgactacgaggacgccgagttgaacccccgcttcctgaaggacaacctgatcgacgccaatggcggtagcaggcccccttggccgcccctggagtaccagccctaccagagcatctacgtcgggggcatcatggaaggggagggcaagggcccgctcctgcgcagccagagcacctctgagcaggagaagcgccttacctggccccgcaggtcctactccccccggagttttgaggattgcggaggcggctataccccggactgcagctccaatgagaacctcacctccagcgaggaggacttctcctctggccagtccagccgcgtgtccccaagccccaccacctaccgcatgttccgggacaaaagccgctctccctcgcagaactcgcaacagtccttcgacagcagcagtccccccacgccgcagtgccataagcggcaccggcactgcccggttgtcgtgtccgaggccaccatcgtgggcgtccgcaagaccgggcagatctggcccaacgatgacgagggcgccttccatggagacgcagatggctcgttcggaacaccacctggatacggctgcgctgcagaccgggcagaggagcagcgccggcaccaagatgggctgccctacattgatgactcgccctcctcatcgccccacctcagcagcaagggcaggggcagccgggatgcgctggtctcgggagccctgaagtccactaaagcgagtgagctggacttggaaaagggcttggagatgagaaaatgggtcctgtcgggaatcctggctagcgaggagacttacctgagccacctggaggcactgctgctgcccatgaagcctttgaaagccgctgccaccacctctcagccggtgctgacgagtcagcagatcgagaccatcttcttcaaagtgcctgagctctacgagatccacaaggagtcctatgatgggctcttcccccgcgtgcagcagtggagccaccagcagcgggtgggcgacctcttccagaagctggccagccagctgggtgtgtaccgggccttcgtggacaactacggagttgccatggaaatggctgagaagtgctgtcaggccaatgctcagtttgcagaaatctccgagaacctgagagccagaagcaacaaagatgccaaggatccaacgaccaagaactctctggaaactctgctctacaagcctgtggaccgtgtgacgaggagcacgctggtcctccatgacttgctgaagcacactcctgccagccaccctgaccaccccttgctgcaggacgccctccgcatctcacagaacttcctgtccagcatcaatgaggagatcacaccccgacggcagtccatgacggtgaagaagggagagcaccggcagctgctgaaggacagcttcatggtggagctggtggagggggcccgcaagctgcggcacgtcttcctgttcaccgacctgcttctctgcaccaagctcaagaagcagagcggaggcaaaacgcagcagtatgactgcaaatggtacattccgctcacggatctcagcttccagatggtggatgaactggaggcagtgcccaacatccccctggtgcccgatgaggagctggacgctttgaagatcaagatctcccagatcaagagtgacatccagagagagaagagggcgaacaagggcagcaaggctacggagaggctgaagaagaagctgtcggagcaggagtcactgctgctgcttatgtctcccagcatggccttcagggtgcacagccgcaacggcaagagttacacgttcctgatctcctctgactatgagcgtgcagagtggagggagaacatccgggagcagcagaagaagtgtttcagaagcttctccctgacatccgtggagctgcagatgctgaccaactcgtgtgtgaaactccagactgtccacagcattccgctgaccatcaataaggaagatgatgagtctccggggctctatgggtttctgaatgtcatcgtccactcagccactggatttaagcagagttcaaatctgtactgcaccctggaggtggattcctttgggtattttgtgaataaagcaaagacgcgcgtctacagggacacagctgagccaaactggaacgagctggacccgcaggccctgcaggacagagactggcagcgcaccgtcatcgccatgaatgggatcgaagtaaagctctcggtcaagttcaacagcagggagttcagcttgaagaggatgccgtcccgaaaacagacaggggtcttcggagtcaagattgctgtggtcaccaagagagagaggtccaaggtgccctacatcgtgcgccagtgcgtggaggagatcgagcgccgaggcatggaggaggtgggcatctaccgcgtgtccggtgtggccacggacatccaggcactgaaggcagccttcgacgtcaataacaaggatgtgtcggtgatgatgagcgagatggacgtgaacgccatcgcaggcacgctgaagctgtacttccgtgagctgcccgagcccctcttcactgacgagttctaccccaacttcgcagagggcatcgctctttcagacccggttgcaaaggagagctgcatgctcaacctgctgctgtccctgccggaggccaacctgctcaccttccttttccttctggaccacctgaaaagggtggcagagaaggaggcagtcaataagatgtccctgcacaacctcgccacggtctttggccccacgctgctccggccctccgagaaggagagcaagctccctgccaaccccagccagcctatcaccatgactgacagctggtccttggaggtcatgtcccaggtccaggtgctgctgtacttcctgcagctggaggccatccctgccccggacagcaagagacagagcatcctgttctccaccgaagtctaaaggtcccagtccatctcctggaggcagacagatggcctggaaacctctggctaatcgggccatccgtagagcgggaaccttcctgaggtgtccttgggccacccccaagtgttgggccatctgccaagagacagcgacccaaagccgaaggacaggtggcctgggcagatctgcccaggtctgggagccccaagctggcctcagactgtggttttttatgtggccacccgagggcgccccaagccagttcatctcggagtccaggcctgaccctgggagacagggtgaagggagtgatttttatgaacttaacttagagtctaaaagatttctactggatcacttgtcaagatgcgccctctctggggagaagggaacgtgaccggattccctcactgttgtatcttgaataaacgctgctgcttcaaaaaaaa

SEQ ID NO: 124 - protein, 1227 aa, Homo sapiens
MVDPVGFAEAWKAQFPDSEPPRMELRSVGDIEQELERCKASIRRLEQEVNQERFRMIYLQTLLAKEKKSYDRQRWGFRRAAQAPDGASEPRASASRPQPAPADGADPPPAEEPEARPDGEGSPGKARPGTARRPGAAASGERDDRGPPASVAALRSNFERIRKGHGQPGADAEKPFYVNVEFHHERGLVKVNDKEVSDRISSLGSQAMQMERKKSQHGAGSSVGDASRPPYRGRSSESSCGVDGDYEDAELNPRFLKDNLIDANGGSRPPWPPLEYQPYQSIYVGGIMEGEGKGPLLRSQSTSEQEKRLTWPRRSYSPRSFEDCGGGYTPDCSSNENLTSSEEDFSSGQSSRVSPSPTTYRMFRDKSRSPSQNSQQSFDSSSPPTPQCHKRHRHCPVVVSEATIVGVRKTGQIWPNDDEGAFHGDADGSFGTPPGYGCAADRAEEQRRHQDGLPYIDDSPSSSPHLSSKGRGSRDALVSGALKSTKASELDLEKGLEMRKWVLSGILASEETYLSHLEALLLPMKPLKAAATTSQPVLTSQQIETIFFKVPELYEIHKESYDGLFPRVQQWSHQQRVGDLFQKLASQLGVYRAFVDNYGVAMEMAEKCCQANAQFAEISENLRARSNKDAKDPTTKNSLETLLYKPVDRVTRSTLVLHDLLKHTPASHPDHPLLQDALRISQNFLSSINEEITPRRQSMTVKKGEHRQLLKDSFMVELVEGARKLRHVFLFTDLLLCTKLKKQSGGKTQQYDCKWYIPLTDLSFQMVDELEAVPNIPLVPDEELDALKIKISQIKSDIQREKRANKGSKATERLKKKLSEQESLLLLMSPSMAFRVHSRNGKSYTFLISSDYERAEWRENIREQQKKCFRSFSLTSVELQMLTNSCVKLQTVHSIPLTINKEDDESPGLYGFLNVIVHSATGFKQSSNLYCTLEVDSFGYFVNKAKTRVYRDTAEPNWNELDPQALQDRDWQRTVIAMNGIEVKLSVKFNSREFSLKRMPSRKQTGVFGVKIAVVTKRERSKVPYIVRQCVEEIERRGMEEVGIYRVSGVATDIQALKAAFDVNNKDVSVMMSEMDVNAIAGTLKLYFRELPEPLFTDEFYPNFAEGIALSDPVAKESCMLNLLLSLPEANLLTFLFLLDHLKRVAEKEAVNKMSLHNLATVFGPTLLRPSEKESKLPANPSQPITMTDSWSLEVMSQVQVLLYFLQLEAIPAPDSKRQSILFSTEV

SEQ ID NO: 125 - DNA, 3899 bp, Homo sapiens
agcttgagcgcggcggcggcgttgttcagtcagagcgagaacattccagaggtcgcccagctccggcgctgacgggtgtggaccgcggacgtcgctgggacagcccctccccgctgctcggcggcggcatctggcccggccgctcctcgctgcgcttcgcctccgcctcctcggactcggactcgggtttatatcgcgcctcacttcatcccagtcccgggcgagcagcgttgggtttatgtctttatttgacgaaaacgagctgttgcgcagccattggtacctgtattggggaaacatagcatacaagcaagaagcttacagcctcagtggcgaaaattttttcatgtcagagaccgagaactcttgcagtcgtttatgtcatcccttcttctccagacagaagataccaaaaagttgcaatcaaagatctcttcatcttattgataaagccactaataagccaaaatgtctgtcaatgtcaaccgcagcgtgtcagaccagttctatcgctacaagatgccccgtctgattgccaaggttgagggcaaaggcaatggaatcaagacagttatagtcaacatggttgacgttgcaaaggcgcttaatcggcctccaacgtatcccaccaaatattttggttgtgagctgggagcacagacccagtttgatgttaagaatgaccgttacattgtcaatggatctcatgaggcgaataagctgcaagacatgttggatggattcattaaaaaatttgttctctgtcctgaatgtgagaatcctgaaacagatttgcatgtcaatccaaagaagcaaacaataggtaattcttgtaaagcctgtggctatcgaggcatgcttgacacacatcataaactctgcacattcattctcaaaaacccacctgagaatagtgacagtggtacaggaaagaaagaaaaagaaaagaaaaacagaaagggcaaagacaaggaaaatggctccgtatccagcagtgagacaccaccaccaccaccaccaccaaatgaaattaatcctcctccacatacaatggaagaagaggaggatgatgactggggagaagatacaactgaggaagctcaaaggcgtcgaatggatgaaatcagtgaccatgcaaaagttctgacactcagtgatgatttggaaagaacaattgaggagagggtcaatatcctctttgattttgttaagaaaaagaaagaagagggtgttattgattcatctgacaaagaaatcgttgctgaagcagaaagactggatgtaaaagccatgggccctcttgttctaactgaagttctttttaatgagaagattagagaacagattaagaaatacaggcgccatttcctacgattttgtcacaacaacaaaaaagcccaacggtaccttcttcatggtttggagtgtgtggtagcaatgcatcaagctcagcttatctccaagattccacatatcttgaaggagatgtacgatgcagaccttttagaagaagaggtcatcatcagctggtcggaaaaggcctctaagaaatatgtctccaaagaacttgccaaagagattcgtgtcaaagcagaaccatttataaaatggttgaaggaggcagaggaagaatcttctggtggcgaagaagaagatgaagatgagaacattgaggtggtgtattcgaaggctgccagtgtaccgaaagttgagactgtaaagtcagacaacaaggatgacgacatcgatattgatgccatttaaagggatggatgcaacctagcttaacagtataatgctgcaaattttcctccattatcagccagaagtgcaacatgtatgtgcaaaagctaaaatggcttaacatcatgctacactttacactaaaaatctattactgtgagtggtctgttattaagcccaatgagacatctagggagtccatacacatcagtgagcagatgtagtttgcttatttatagcatgtttctttttgaaaaactagtggtggacacatttggatcacatttatacagttataaaaataaaggtttgattttggtcgttcttcagatgtttggctctgaatgacttaagctgaagtaactggctccttactttaaatgttctgccatcatttcacctgatgagcattcttggagcctgccagatattgttaggtcctggggctgcaaagaggtcctcaacaggatgtaaagcaaacttaattgtaattaatttattcagcccattaagaaagtactaaagttttatctctgtagttcctcaaattggcatctggtaatgtacattgtgaggtagactgataatgaaatgacagtgcaacatcttaaccaagaagtaaatatgacctcagtgtcctataaataatgtaagagcaggatttgaaacttggagagctgttttctcatttcatgtacacttgccccaaattgtctttgaagtcgtgtgcattgcacgttggatgagccagggaaattattacattaacaagcattttgtgtgtgcgtagtagttactttgtactgagagaacttgctttggggtgcaattaaacaataaactgattttatttgggagaaacaaggaagggtgcacttaactagcaacctaagcatgatttttcagcttttgcccttagggtttaaattacaattccaaaatgttagacatactgtattttttcgttcagtgtggctttaattttcccctcttgcagtttgttctgtaatgccttttacatttggacacatagtttatgctttttagattttggttgctttcttgccaaaataagtgttaactgtgtttcaaacttgattttctttcttttttctttttttttcttccagaatgtcttatttaaaaagaaagctaaaagcatacttctaagtcagagcctctattttggtgtaagacttgggatattttttacttcacattgaatatagccaggcacccaagaagtctgatggccacctgagtgcaggtgacaaggacctgacagagcccatgcagggctttagatttggacacacaagagttgataacttcctcatgaactccttgcctgatctaaactcatattatgggttctgactgtttgagtaatcgtcttcaaggttaaacctcttggcagttacccttttcacaaagtgcacagtgggaatcgagaatcgatagggttaattttggagcagtggcttataccattcacctctgtttttttgtgattatttcacagataatgagaccttaataacaaataggcgtaaaaaaattttcacattgaaatgatagaaacatttgatgtaataaaacttggttggcttgatattttaaggaattgaaacctagcaatcttattggagagacaagaattggtctccagctgcctttgatcaagattcgggtgcaagtggagcaggagccatatacctggagggaatgtgctttgtcacaccaaagaggattttttttttcttcaaacttgtatgttgcctaggtttcaaattctttgccgcaaggctgatctgctttcattaactggaattctgtaggagatactggtgacctaagctaagttgcactcagcatactcagtgtcaagctaatgaggttctattataaaggttctacttttaatctgagggaaaacatgttcagggcttctagaacactaaaaaatttggcttaaaccagtgttcagtctggtgccaaacttcgaatggaatacaaattcacataatctgaactttgttcacaggttatcctaatagagtaattcttcactttgctctattgaactgtcttaaggatttgtttaaacagctaagttacttgattaaaataatgataaaattgtaaaaaaaaaaaaa

SEQ ID NO: 126 - protein, 431 aa, Homo sapiens
MSVNVNRSVSDQFYRYKMPRLIAKVEGKGNGIKTVIVNMVDVAKALNRPPTYPTKYFGCELGAQTQFDVKNDRYIVNGSHEANKLQDMLDGFIKKFVLCPECENPETDLHVNPKKQTIGNSCKACGYRGMLDTHHKLCTFILKNPPENSDSGTGKKEKEKKNRKGKDKENGSVSSSETPPPPPPPNEINPPPHTMEEEEDDDSGEDTTEEAQRRRMDEISDHAKVLTLSDDLERTIEERVNILFDFVKKKKEEGVIDSSDKEIVAEAERLDVKAMGPLVLTEVLFNEKIREQIKKYRRHFLRFCHNNKKAQRYLLHGLECVVAMHQAQLISKIPHILKEMYDADLLEEEVIISWSEKASKKYVSKELAKEIRVKAEPFIKWLKEAEEESSGGEEEDEDENIEVVYSKAASVPKVETVKSDNKDDDIDIDAI

SEQ ID NO: 127 - DNA, 4307 bp, Homo sapiens
cctcagcctggggagctgaaggggagacgcgtctgggtggggctgctcggagcccgggcctggtggcccctggggctcccgggcgggcagggtagggcagagtagagcgggcttcaacatgatggcggccgaggccggcagtgaggagggcggcccggtaacagccggagctggaggaggcggcgcggcagcgggctccagtgcctatcccgcagtgtgtcgggtgaagatacccgcggccctgcctgtggcagccgccccctatcctgggctggtggagaccggagtggctggaactctgggtggcggagccgctttggggtcagagttcctaggagccgggtctgtggcaggggcactggggggagctggactgacagggggaggtactgctgctggcgtagctggtgctgctgctggcgtggccggtgctgctgttgctggacctagtggagacatggctctcaccaaactgcccacttcgttgcttgctgagactctcgggccaggcggcggttttccccctctgccccctcccccttacctgccccctttgggggcgggcctcgggacagtggacgaaggtgactctctggatggaccagaatacgaggaggaagaggtggccataccgttgaccgctcctccaactaaccagtggtatcacggaaaacttgacagaacgatagcagaagaacgcctcaggcaggcagggaagtctggcagttatcttataagagagagtgatcggaggccagggtcctttgtactttcatttcttagccagatgaatgttgtcaaccattttaggattattgctatgtgtggagattactacattggtggaagacgtttttcttcactgtcagacctaataggttattacagtcatgtttcttgtttgcttaaaggagaaaaattactttacccagttgcaccaccagagccagtagaagatagaaggcgtgtacgagctattctaccttacacaaaagtaccagacactgatgaaataagtttcttaaaaggagatatgttcattgttcataatgaattagaagatggatggatgtgggttacaaatttaagaacagatgaacaaggccttattgttgaagacctagtagaagaggtgggccgggaagaagatccacatgaaggaaaaatatggttccatgggaagatttccaaacaggaagcttataatttactaatgacagttggtcaagtctgcagttttcttgtgaggccctcagataatactcctggcgattattcactttatttccggaccaatgaaaatattcagcgatttaaaatatgtccaacgccaaacaatcagtttatgatgggaggccggtattataacagcattggggacatcatagatcactatcgaaaagaacagattgttgaaggatattatcttaaggaacctgtaccaatgcaggatcaagaacaagtactcaatgacacagtggatggcaaggaaatctataataccatccgtcgtaaaacaaaggatgccttttataaaaacattgttaagaaaggttatcttctgaaaaagggcaaaggaaaacgttggaaaaatttatattttatcttagagggtagtgatgcccaacttatttattttgaaagcgaaaaacgagctaccaaaccaaaaggattaatagatctcagtgtatgttctgtctatgtcgttcatgatagtctctttggcaggccaaactgttttcagatagtagttcagcactttagtgaagaacattacatcttttactttgcaggagaaactccagaacaagcagaggattggatgaaaggtctgcaggcattttgcaatttacggaaaagtagtccagggacatccaataaacgccttcgtcaggtcagcagccttgttttacatattgaagaagcccataaactcccagtaaaacattttactaatccatattgtaacatctacctgaatagtgtccaagtagcaaaaactcatgcaagggaagggcaaaacccagtatggtcagaagagtttgtctttgatgatcttcctcctgacatcaatagatttgaaataactcttagtaataaaacaaagaaaagcaaagatcctgatatcttatttatgcgctgccagttgagccgattacagaaagggcatgccacagatgaatggtttctgctcagctcccatataccattaaaaggtattgaaccagggtccctgcgtgttcgagcacgatactctatggaaaaaatcatgccagaagaagagtacagtgaatttaaagagcttatactgcaaaaggaacttcatgtagtctatgctttatcacatgtatgtggacaagaccgaacactactggccagcatcctactgaggatttttcttcacgaaaagcttgaatcgttgttgttatgcacactaaatgacagagaaataagcatggaagatgaagccactaccctatttcgagccacaacacttgcaagcaccttgatggagcagtatatgaaagccactgctacacagtttgttcatcatgctttgaaagactctattttaaagataatggaaagcaagcagtcttgtgagttaagtccatcaaagttagaaaaaaatgaagatgtgaacactaatttaacacacctattgaacatactttcagagcttgtggagaaaatattcatggcttcagaaatacttccaccgacattgagatatatttatgggtgtttacagaaatctgttcagcataagtggcctacaaataccaccatgagaacaagagttgttagtggttttgtttttcttcgactcatctgtcctgccatcctgaatccacggatgttcaatatcatctcagattctccatctcctattgctgcaagaacactgatattagtggctaaatctgtgcagaacttagcaaatcttgtggaatttggagctaaggagccctacatggaaggtgtcaatccattcatcaaaagcaacaaacatcgtatgatcatgtttttagatgaacttgggaatgtacctgaacttccggacactacagagcattctagaacggacctgtcccgtgatttagcagcattgcatgagatttgcgtggctcattcagatgaacttcgaacgctcagtaatgagcgtggtgcacagcagcacgtattgaaaaagcttctggctataacagaactgcttcaacaaaaacaaaaccagtatacaaaaaccaatgatgtcaggtagcagccttcgccccagtgttctgcatggattcagcatgtccaacatggtaattcacttcagtttaatgtctcctttgctcttgccaaaaaatagcacacttttccacattccagtgatgtgtgagctatgcaaacaaaatccaagattctgctggtgaataactatgccagcaaccttgtaagctatctgtgcaggatatttgcactatttccacatggaatcaatctttaacaacctctgagccttggtgtacagaccacctttcacaaaacgaaatgctatgactgtatcttgatatctcgaactttcaaaatatattttcagtacacccagttgccaaagttttgctgtctcttagagaaagaactatgaaatcaactgacaagaaacacattcttattgacaattgtgtataactggattgcagactgttcttactgtaactacttcctgattaggaatatgaccatttgactgttcaatgattatttgtatttacagtttccagagtttgtcattataataggaacaatctttgctgtatacttttaaaaaatactctgctatttctcttgctggaactgttgaaagaaaatatatagaatgatctattgctcatcagctttattttttaaacatacgacttattttgttgaaattgtcaaagactgtatttagatctcataatgctttgttaaatgtttacaagtaaatagtttgaattcagtaaatattattggttgttgtattgatcaatgcatgttacccattcaaccattttatagactaccaatttcttttatgttaactagaatgcttttgttaaaagttatttgttcattatttgtgctacccctttgattatgcagacaacctcatcagctgcctaacttatccatctttgaacttctgactacttgttgtatctgctggatatttagttcaactgtatagttttatttacttctgtatgtgtatttttgtgaagtattcacaaaggttaagttaaaataaaaccaagggatatcttgcaaaaaaaaaaaaa

SEQ ID NO: 128 - protein, 1047 aa, Homo sapiens
MMAAEAGSEEGGPVTAGAGGGGAAAGSSAYPAVCRVKIPAALPVAAAPYPGLVETGVAGTLGGGAALGSEFLGAGSVAGALGGAGLTGGGTAAGVAGAAAGVAGAAVAGPSGDMALTKLPTSLLAETLGPGGGFPPLPPPPYLPPLGAGLGTVDEGDSLDGPEYEEEEVAIPLTAPPTNQWYHGKLDRTIAEERLRQAGKSGSYLIRESDRRPGSFVLSFLSQMNVVNHFRIIAMCGDYYIGGRRFSSLSDLIGYYSHVSCLLKGEKLLYPVAPPEPVEDRRRVRAILPYTKVPDTDEISFLKGDMFIVHNELEDGWMWVTNLRTDEQGLIVEDLVEEVGREEDPHEGKIWFHGKISKQEAYNLLMTVGQVCSFLVRPSDNTPGDYSLYFRTNENIQRFKICPTPNNQFMMGGRYYNSIGDIIDHYRKEQIVEGYYLKEPVPMQDQEQVLNDTVDGKEIYNTIRRKTKDAFYKNIVKKGYLLKKGKGKRWKNLYFILEGSDAQLIYFESEKRATKPKGLIDLSVCSVYVVHDSLFGRPNCFQIVVQHFSEEHYIFYFAGETPEQAEDWMKGLQAFCNLRKSSPGTSNKRLRQVSSLVLHIEEAHKLPVKHFTNPYCNIYLNSVQVAKTHAREGQNPVWSEEFVFDDLPPDINRFEITLSNKTKKSKDPDILFMRCQLSRLQKGHATDEWFLLSSHIPLKGIEPGSLRVRARYSMEKIMPEEEYSEFKELILQKELHVVYALSHVCGQDRTLLASILLRIFLHEKLESLLLCTLNDREISMEDEATTLFRATTLASTLMEQYMKATATQFVHHALKDSILKIMESKQSCELSPSKLEKNEDVNTNLTHLLNILSELVEKIFMASEILPPTLRYIYGCLQKSVQHKWPTNTTMRTRVVSGFVFLRLICPAILNPRMFNIISDSPSPIAARTLILVAKSVQNLANLVEFGAKEPYMEGVNPFIKSNKHRMIMFLDELGNVPELPDTTEHSRTDLSRDLAALHEICVAHSDELRTLSNERGAQQHVLKKLLAITELLQQKQNQYTKTNDVR

SEQ ID NO: 129 - DNA, 3757 bp, Homo sapiens
ggaagaggtggccataccgttgaccgctcctccaactaaccagtaagttaagactgctgttcaggaatttgggaagctggctccagaaaagaagtggaaatgaaggggtggtatcacggaaaacttgacagaacgatagcagaagaacgcctcaggcaggcagggaagtctggcagttatcttataagagagagtgatcggaggccagggtcctttgtactttcatttcttagccagatgaatgttgtcaaccattttaggattattgctatgtgtggagattactacattggtggaagacgtttttcttcactgtcagacctaataggttattacagtcatgtttcttgtttgcttaaaggagaaaaattactttacccagttgcaccaccagagccagtagaagatagaaggcgtgtacgagctattctaccttacacaaaagtaccagacactgatgaaataagtttcttaaaaggagatatgttcattgttcataatgaattagaagatggatggatgtgggttacaaatttaagaacagatgaacaaggccttattgttgaagacctagtagaagaggtgggccgggaagaagatccacatgaaggaaaaatatggttccatgggaagatttccaaacaggaagcttataatttactaatgacagttggtcaagtctgcagttttcttgtgaggccctcagataatactcctggcgattattcactttatttccggaccaatgaaaatattcagcgatttaaaatatgtccaacgccaaacaatcagtttatgatgggaggccggtattataacagcattggggacatcatagatcactatcgaaaagaacagattgttgaaggatattatcttaaggaacctgtaccaatgcaggatcaagaacaagtactcaatgacacagtggatggcaaggaaatctataataccatccgtcgtaaaacaaaggatgccttttataaaaacattgttaagaaaggttatcttctgaaaaagggcaaaggaaaacgttggaaaaatttatattttatcttagagggtagtgatgcccaacttatttattttgaaagcgaaaaacgagctaccaaaccaaaaggattaatagatctcagtgtatgttctgtctatgtcgttcatgatagtctctttggcaggccaaactgttttcagatagtagttcagcactttagtgaagaacattacatcttttactttgcaggagaaactccagaacaagcagaggattggatgaaaggtctgcaggcattttgcaatttacggaaaagtagtccagggacatccaataaacgccttcgtcaggtcagcagccttgttttacatattgaagaagcccataaactcccagtaaaacattttactaatccatattgtaacatctacctgaatagtgtccaagtagcaaaaactcatgcaagggaagggcaaaacccagtatggtcagaagagtttgtctttgatgatcttcctcctgacatcaatagatttgaaataactcttagtaataaaacaaagaaaagcaaagatcctgatatcttatttatgcgctgccagttgagccgattacagaaagggcatgccacagatgaatggtttctgctcagctcccatataccattaaaaggtattgaaccagggtccctgcgtgttcgagcacgatactctatggaaaaaatcatgccagaagaagagtacagtgaatttaaagagcttatactgcaaaaggaacttcatgtagtctatgctttatcacatgtatgtggacaagaccgaacactactggccagcatcctactgaggatttttcttcacgaaaagcttgaatcgttgttgttatgcacactaaatgacagagaaataagcatggaagatgaagccactaccctatttcgagccacaacacttgcaagcaccttgatggagcagtatatgaaagccactgctacacagtttgttcatcatgctttgaaagactctattttaaagataatggaaagcaagcagtcttgtgagttaagtccatcaaagttagaaaaaaatgaagatgtgaacactaatttaacacacctattgaacatactttcagagcttgtggagaaaatattcatggcttcagaaatacttccaccgacattgagatatatttatgggtgtttacagaaatctgttcagcataagtggcctacaaataccaccatgagaacaagagttgttagtggttttgtttttcttcgactcatctgtcctgccatcctgaatccacggatgttcaatatcatctcagattctccatctcctattgctgcaagaacactgatattagtggctaaatctgtgcagaacttagcaaatcttgtggaatttggagctaaggagccctacatggaaggtgtcaatccattcatcaaaagcaacaaacatcgtatgatcatgtttttagatgaacttgggaatgtacctgaacttccggacactacagagcattctagaacggacctgtcccgtgatttagcagcattgcatgagatttgcgtggctcattcagatgaacttcgaacgctcagtaatgagcgtggtgcacagcagcacgtattgaaaaagcttctggctataacagaactgcttcaacaaaaacaaaaccagtatacaaaaaccaatgatgtcaggtagcagccttcgccccagtgttctgcatggattcagcatgtccaacatggtaattcacttcagtttaatgtctcctttgctcttgccaaaaaatagcacacttttccacattccagtgatgtgtgagctatgcaaacaaaatccaagattctgctggtgaataactatgccagcaaccttgtaagctatctgtgcaggatatttgcactatttccacatggaatcaatctttaacaacctctgagccttggtgtacagaccacctttcacaaaacgaaatgctatgactgtatcttgatatctcgaactttcaaaatatattttcagtacacccagttgccaaagttttgctgtctcttagagaaagaactatgaaatcaactgacaagaaacacattcttattgacaattgtgtataactggattgcagactgttcttactgtaactacttcctgattaggaatatgaccatttgactgttcaatgattatttgtatttacagtttccagagtttgtcattataataggaacaatctttgctgtatacttttaaaaaatactctgctatttctcttgctggaactgttgaaagaaaatatatagaatgatctattgctcatcagctttattttttaaacatacgacttattttgttgaaattgtcaaagactgtatttagatctcataatgctttgttaaatgtttacaagtaaatagtttgaattcagtaaatattattggttgttgtattgatcaatgcatgttacccattcaaccattttatagactaccaatttcttttatgttaactagaatgcttttgttaaaagttatttgttcattatttgtgctacccctttgattatgcagacaacctcatcagctgcctaacttatccatctttgaacttctgactacttgttgtatctgctggatatttagttcaactgtatagttttatttacttctgtatgtgtatttttgtgaagtattcacaaaggttaagttaaaataaaaccaagggatatcttgcaaaaaaaaaaaaa

SEQ ID NO: 130 - protein, 870 aa, Homo sapiens
MKGWYHGKLDRTIAEERLRQAGKSGSYLIRESDRRPGSFVLSFLSQMNVVNHFRIIAMCGDYYIGGRRFSSLSDLIGYYSHVSCLLKGEKLLYPVAPPEPVEDRRRVRAILPYTKVPDTDEISFLKGDMFIVHNELEDGWMWVTNLRTDEQGLIVEDLVEEVGREEDPHEGKIWFHGKISKQEAYNLLMTVGQVCSFLVRPSDNTPGDYSLYFRTNENIQRFKICPTPNNQFMMGGRYYNSIGDIIDHYRKEQIVEGYYLKEPVPMQDQEQVLNDTVDGKEIYNTIRRKTKDAFYKNIVKKGYLLKKGKGKRWKNLYFILEGSDAQLIYFESEKRATKPKGLIDLSVCSVYVVHDSLFGRPNCFQIVVQHFSEEHYIFYFAGETPEQAEDWMKGLQAFCNLRKSSPGTSNKRLRQVSSLVLHIEEAHKLPVKHFTNPYCNIYLNSVQVAKTHAREGQNPVWSEEFVFDDLPPDINRFEITLSNKTKKSKDPDILFMRCQLSRLQKGHATDEWFLLSSHIPLKGIEPGSLRVRARYSMEKIMPEEEYSEFKELILQKELHVVYALSHVCGQDRTLLASILLRIFLHEKLESLLLCTLNDREISMEDEATTLFRATTLASTLMEQYMKATATQFVHHALKDSILKIMESKQSCELSPSKLEKNEDVNTNLTHLLNILSELVEKIFMASEILPPTLRYIYGCLQKSVQHKWPTNTTMRTRVVSGFVFLRLICPAILNPRMFNIISDSPSPIAARTLILVAKSVQNLANLVEFGAKEPYMEGVNPFIKSNKHRMIMFLDELGNVPELPDTTEHSRTDLSRDLAALHEICVAHSDELRTLSNERGAQQHVLKKLLAITELLQQKQNQYTKTNDVR

SEQ ID NO: 131 - DNA, 1429 bp, Homo sapiens
cgccgagaaccccaccccctttctttgcggaatcaccatggcggctgggaccctgtacacgtatcctgaaaactggagggccttcaaggctctcatcgctgctcagtacagcggggctcaggtccgcgtgctctccgcaccaccccacttccattttggccaaaccaaccgcacccctgaatttctccgcaaatttcctgccggcaaggtcccagcatttgagggtgatgatggattctgtgtgtttgagagcaacgccattgcctactatgtgagcaatgaggagctgcggggaagtactccagaggcagcagcccaggtggtgcagtgggtgagctttgctgattccgatatagtgcccccagccagtacctgggtgttccccaccttgggcatcatgcaccacaacaaacaggccactgagaatgcaaaggaggaagtgaggcgaattctggggctgctggatgcttacttgaagacgaggacttttctggtgggcgaacgagtgacattggctgacatcacagttgtctgcaccctgttgtggctctataagcaggttctagagccttctttccgccaggcctttcccaataccaaccgctggttcctcacctgcattaaccagccccagttccgggctgtcttgggcgaagtgaaactgtgtgagaagatggcccagtttgatgctaaaaagtttgcagagacccaacctaaaaaggacacaccacggaaagagaagggttcacgggaagagaagcagaagccccaggctgagcggaaggaggagaaaaaggcggctgcccctgctcctgaggaggagatggatgaatgtgagcaggcgctggctgctgagcccaaggccaaggaccccttcgctcacctgcccaagagtacctttgtgttggatgaatttaagcgcaagtactccaatgaggacacactctctgtggcactgccatatttctgggagcactttgataaggacggctggtccctgtggtactcagagtatcgcttccctgaagaactcactcagaccttcatgagctgcaatctcatcactggaatgttccagcgactggacaagctgaggaagaatgccttcgccagtgtcatcctttttggaaccaacaatagcagctccatttctggagtctgggtcttccgaggccaggagcttgcctttccgctgagtccagattggcaggtggactacgagtcatacacatggcggaaactggatcctggcagcgaggagacccagacgctggttcgagagtacttttcctgggagggggccttccagcatgtgggcaaagccttcaatcagggcaagatcttcaagtgaacatctcttgccatcacctagctgcctgcacctgcccttcagggagatgggggtcattaaaggaaactgaacattgaa

SEQ ID NO: 132 - protein, 437 aa, Homo sapiens
MAAGTLYTYPENWRAFKALIAAQYSGAQVRVLSAPPHFHFGQTNRTPEFLRKFPAGKVPAFEGDDGFCVFESNAIAYYVSNEELRGSTPEAAAQVVQWVSFADSDIVPPASTWVFPTLGIMHHNKQATENAKEEVRRILGLLDAYLKTRTFLVGERVTLADITVVCTLLWLYKQVLEPSFRQAFPNTNRWFLTCINQPQFRAVLGEVKLCEKMAQFDAKKFAETQPKKDTPRKEKGSREEKQKPQAERKEEKKAAAPAPEEEMDECEQALAAEPKAKDPFAHLPKSTFVLDEFKRKYSNEDTLSVALPYFWEHFDKDGWSLWYSEYRFPEELTQTFMSCNLITGMFQRLDKLRKNAFASVILFGTNNSSSISGVWVFRGQELAFPLSPDWQVDYESYTWRKLDPGSEETQTLVREYFSWEGAFQHVGKAFNQGKIFK

SEQ ID NO: 133 - DNA, 605 bp, Homo sapiens
gaagtggcccttgcaggcaagagtgctggagggcggcagcggcgaccggagcggtaggagcagcaatttatccgtgtgcagccccaaactggaaagaagatgctaattaaagtgaagacgctgaccggaaaggagattgagattgacattgaacctacagacaaggtggagcgaatcaaggagcgtgtggaggagaaagagggaatccccccacaacagcagaggctcatctacagtggcaagcagatgaatgatgagaagacagcagctgattacaagattttaggtggttcagtccttcacctggtgttggctctgagaggaggaggtggtcttaggcagtgatggaccctccattttacctctttaccctgtcgctcataatgaggcatcatatatcctctcactctctgggacaccatagccactgccccctcccctggatgcccagtaatgtatgtctactggtgggagactgtgaggatcccaggattcagtattcctggcccagagggccttgctggctactgggtgttagtttgcagtcctgtgtgcttccctctcttatgactgtgtccctggttgtcaataaaatatttcctggc

SEQ ID NO: 134 - protein, 81 aa, Homo sapiens
MLIKVKTLTGKEIEIDIEPTDKVERIKERVEEKEGIPPQQQRLIYSGKQMNDEKTAADYKILGGSVLHLVLALRGGGGLRQ

SEQ ID NO: 135 - DNA, 3752 bp, Homo sapiens
ggccgtgcgagaggccgagcttgctgcattgcagccgccgcggcgccgctcggctcttcactcccaacaatggcggctccgagcccgagcggcggcggcggctccgggggcggcagcggcagcggcacccccggccccgtagggtccccggcgccaggccacccggccgtcagcagcatgcagggtaaacgcaaagcactgaagttgaattttgcaaatccacctttcaaatctacagcaaggtttactctgaatcccaatcctacaggagttcaaaacccacacatagagagactgagaacacacagcattgagtcatcaggaaaactgaagatctcccctgaacaacactgggatttcactgcagaggacttgaaagaccttggagaaattggacgaggagcttatggttctgtcaacaaaatggtccacaaaccaagtgggcaaataatggcagttaaaagaattcggtcaacagtggatgaaaaagaacaaaaacaacttcttatggatttggatgtagtaatgcggagtagtgattgcccatacattgttcagttttatggtgcactcttcagagagggtgactgttggatctgtatggaactcatgtctacctcgtttgataagttttacaaatatgtatatagtgtattagatgatgttattccagaagaaattttaggcaaaatcactttagcaactgtgaaagcactaaaccacttaaaagaaaacttgaaaattattcacagagatatcaaaccttccaatattcttctggacagaagtggaaatattaagctctgtgacttcggcatcagtggacagcttgtggactctattgccaagacaagagatgctggctgtaggccatacatggcacctgaaagaatagacccaagcgcatcacgacaaggatatgatgtccgctctgatgtctggagtttggggatcacattgtatgagttggccacaggccgatttccttatccaaagtggaatagtgtatttgatcaactaacacaagtcgtgaaaggagatcctccgcagctgagtaattctgaggaaagggaattctccccgagtttcatcaactttgtcaacttgtgccttacgaaggatgaatccaaaaggccaaagtataaagagcttctgaaacatccctttattttgatgtatgaagaacgtgccgttgaggtcgcatgctatgtttgtaaaatcctggatcaaatgccagctactcccagctctcccatgtatgtcgattgatatcgctgctacatcagactctagaaaaaagggctgagaggaagcaagacgtaaagaattttcatcccgtatcacagtgtttttattgctcgcccagacaccatgtgcaataagattggtgttcgtttccatcatgtctgtatactcctgtcacctagaacgtgcatccttgtaatacctgattgatcacacagtgttagtgctggtcagagagacctcatcctgctcttttgtgatgaacatattcatgaaatgtggaagtcagtacgatcaagttgttgactgtgattagatcacatcttaaattcatttctagactcaaaacctggagatgcagctactggaatggtgttttgtcagacttccaaatcctggaaggacacagtgatgaatgtactatgtctgaacatagaaactcgggcttgagtgagaagagcttgcacagccaacgagacacattgccttctggagctgggagacaaaggaggaatttactttcttcaccaagtgcaatagattactgatgtgatattctgttgctttacagttacagttgatgtttggggatcgatgtgctcagccaaatttcctgtttgaaatatcatgttaaattagaatgaatttatctttaccaaaaaccatgttgcgttcaaagaggtgaacattaaaatatagagacaggacagaatgtgttcttttctcctttaccagtcctatttttcaatgggaagactcaggagtctgccacttgtcaaagaaggtgctgatcctaagaatttttcattctcagaattcggtgtgctgccaacttgatgttccacctgccacaaaccaccaggactgaaagaagaaaacagtacagaaggcaaagtttacagatgtttttaattctagtattttatctggaacaacttgtagcagctatatatttccccttggtcccaagcctgatactttagccatcataactcactaacagggagaagtagctagtagcaatgtgccttgattgattagataaagatttctagtaggcagcaaaagaccaaatctcagttgtttgcttcttgccatcactggtccaggtcttcagtttccgaatctctttcccttcccctgtggtctattgtcgctatgtgacttgcgcttaatccaatattttgccttttttctatatcaaaaaacctttacagttagcagggatgttccttaccaaggatttttagccccaaatctctcatattcgctagtgtttaaaaggctaagaatagtggggcccagccgatgtggtaggtgataaagaggcatcttttctagagacacattggaccagatgaggatccgaaacggcagcctttacgttcatcacctgctagaacctctcgtagtccatcaccatttcttggcattggaattctactggaaaaaaatacaaaaagcaaaacaaaaccctcagcactgttacaagaggccatttaagtatcttgtgcttcttcacttacccattagccaggttctcattaggttttgcttgggcctccctggcactgaaccttaggctttgtatgacagtgaagcagcactgtgagtggttcaagcacactggaatataaaacagtcatggcctgagatgcaggtgatgccattacagaaccaaatcgtggcacgtattgctgtgtctcctctcagagtgacagtcataaatactgtcaaacaataaagggagaatggtgctgtttaaagtcacatccctgtaaattgcagaattcaaaagtgattatctctttgatctacttgcctcatttccctatcttctcccccacggtatcctaaactttagacttcccactgttctgaaaggagacattgctctatgtctgccttcgaccacagcaagccatcatcctccattgctcccggggactcaagaggaatctgtttctctgctgtcaacttcccatctggctcagcatagggtcactttgccattatgcaaatggagataaaagcaattctgactgtccaggagctaatctgaccgttctattgtgtggatgaccacataagaaggcaattttagtgtattaatcatagattattataaactataaacttaagggcaaggagtttattacaatgtatctttattaaaacaaaagggtgtatagtgttcacaaactgtgaaaatagtgtaagaactgtacattgtgagctctggttatttttctcttgtaccatagaaaaatgtataaaaattatcaaaaagctaatgtgcagggatattgccttatttgtctgtaaaaaatggagctcagtaacataactgcttcttggagctttggaatattttatcctgtattcttgtttgaattcctcctctatttaagatatatacatggaatcgaagtgtttatgtaatagttctatccttttgcctgcaggtcagttgtaataaatctaggatgtgatgatgaaaaaaaaaa

SEQ ID NO: 136 - protein, 399 aa, Homo sapiens
MAAPSPSGGGGSGGGSGSGTPGPVGSPAPGHPAVSSMQGKRKALKLNFANPPFKSTARFTLNPNPTGVQNPHIERLRTHSIESSGKLKISPEQHWDFTAEDLKDLGEIGRGAYGSVNKMVHKPSGQIMAVKRIRSTVDEKEQKQLLMDLDVVMRSSDCPYIVQFYGALFREGDCWICMELMSTSFDKFYKYVYSVLDDVIPEEILGKITLATVKALNHLKENLKIIHRDIKPSNILLDRSGNIKLCDFGISGQLVDSIAKTRDAGCRPYMAPERIDPSASRQGYDVRSDVWSLGITLYELATGRFPYPKWNSVFDQLTQVVKGDPPQLSNSEEREFSPSFINFVNLCLTKDESKRPKYKELLKHPFILMYEERAVEVACYVCKILDQMPATPSSPMYVD

SEQ ID NO: 137 - DNA, 2625 bp, Homo sapiens
tcaggagaacctcagtctgacgacattgaagctagccgaatgaagcgagcagctgcaaagcatctaatagaacgctactaccaccagttaactgagggctgtggaaatgaagcctgcacgaatgagttttgtgcttcctgtccaacttttcttcgtatggataataatgcagcagctattaaagccctcgagctttataagattaatgcaaaactctgtgatcctcatccctccaagaaaggagcaagctcagcttaccttgagaactcgaaaggtgcccccaacaactcctgctctgagataaaaatgaacaagaaaggcgctagaattgattttaaagatgtgacttacttaacagaagagaaggtatatgaaattcttgaattatgtagagaaagagaggattattcccctttaatccgtgttattggaagagttttttctagtgctgaggcattggtacagagcttccggaaagttaaacaacacaccaaggaagaactgaaatctcttcaagcaaaagatgaagacaaagatgaagatgaaaaggaaaaagctgcatgttctgctgctgctatggaagaagactcagaagcatcttcctcaaggataggtgatagctcacagggagacaacaatttgcaaaaattaggccctgatgatgtgtctgtggatattgatgccattagaagggtctacaccagattgctctctaatgaaaaaattgaaactgcctttctcaatgcacttgtatatttgtcacctaacgtggaatgtgacttgacgtatcacaatgtatactctcgagatcctaattatctgaatttgttcattatcggaatggagaatagaaatctccacagtcctgaatatctggaaatggctttgccattattttgcaaagcgatgagcaagctaccccttgcagcccaaggaaaactgatcagactgtggtctaaatacaatgcagaccagattcggagaatgatggagacatttcagcaacttattacttataaagtcataagcaatgaatttaacagtcgaaatctagtgaatgaatttaacagtcgaaatctagtgaatgatgatgatgccattgttgctgcttcgaagtgcttgaaaatggtttactatgcaaatgtagtgggaggggaagtggacacaaatcacaatgaagaagatgatgaagagcccatccctgagtccagcgagctgacacttcaggaacttttgggagaagaaagaagaaacaagaaaggtcttcgagtggaccccctggaaactgaacttggtgttaaaaccctggattgtcgaaaaccacttatcccttttgaagagtttattaatgaaccactgaatgaggttctagaaatggataaagattatacttttttcaaagtagaaacagagaacaaattctcttttatgacatgtccctttatattgaatgctgtcacaaagaatttgggattatattatgacaatagaattcgcatgtacagtgaacgaagaatcactgttctctacagcttagttcaaggacagcagttgaatccatatttgagactcaaagttagacgtgaccatatcatagatgatgcacttgtccggctagagatgatcgctatggaaaatcctgcagacttgaagaagcagttgtatgtggaatttgaaggagaacaaggagttgatgagggaggtgtttccaaagaattttttcagctggttgtggaggaaatcttcaatccagatattggtatgttcacatacgatgaatctacaaaattgttttggtttaatccatcttcttttgaaacagagggtcagtttactctgattggcatagtactgggtctggctatttacaataactgtatactggatgtacattttcccatggttgtctacaggaagctaatggggaaaaaaggacttttcgtcgacttgggagactctcacccagttctatatcagagtttaaaagatttattggagtatgttgggaatgtggaagatgacatgatgatcactttccagatatcacagacaaatctttttggtaacccaatgatgtatgatctaaaggaaaatggtgataaaattccaattacaaatgaaaacaggaaggaatttgtcaatctttattctgactacattctcaataaatcagtagaaaaacagttcaaggcttttcggagaggttttcatatggtgaccaatgaatctcccttaaagtacttattcagaccagaagaaattgaattgcttatatgtggaagccgcaatctagatttccaagcactagaagaaactacagaatatgacggtggctataccagggactctgttctgattagggagttctgggaaatcgttcattcatttacagatgaacagaaaagactcttcttgcagtttacaacgggcacagacagagcacctgtgggaggactaggaaaattaaagatgattatagccaaaaatggcccagacacagaaaggttacctacatctcatacttgctttaatgtgcttttacttccggaatactcaagcaaagaaaaacttaaagagagattgttgaaggccatcacgtatgccaaaggatttggcatgctgtaa

SEQ ID NO: 138 - DNA, 2419 bp, Homo sapiens
cgaaaggccggccttggctgcgacagcctgggtaagaggtgtaggtcggcttggttttctgctacccggagctgggcaagcgggttgggagaacagcgaagacagcgtgagcctgggccgttgcctcgaggctctcgcccggcttctcttgccgacccgccacgtttgtttggatttaatcttacagctggttgccggcgcccgcccgcccgctggcctcgcggtgtgagagggaagcacccgtgcctgtggctggtggctggcgcctggagggtccgcacacccgcccggccgcgccgctttgcccgcggcagccgcgtccctgaaccgcggagtcgtgtttgtgtttgacccgcgggcgccggtggcgcgcggccgaggccggtgtcggcggggcggggcggtcgcggcggaggcagaggaagagggagcgggagctctgcgaggccgggcgccgccatggaactgggcccgagccccgcaccgcgccgcctgctcttcgcctgcagcccccctcccgcgtcgcagcccgtcgtgaaggcgctatttggcgcttcagccgccgggggactgtcgcctgtcaccaacctgaccgtcactatggaccagctgcagggtctgggcagtgattatgagcaaccactggaggtgaagaacaacagtaatctgcagagaatgggctcctccgagtcaacagattcaggtttctgtctagattctcctgggccattggacagtaaagaaaaccttgaaaatcctatgagaagaatacattccctacctcaaaagctgttgggatgtagtccagctctgaagaggagccattctgattctcttgaccatgacatctttcagctcatcgacccagatgagaacaaggaaaatgaagcctttgagtttaagaagccagtaagacctgtatctcgtggctgcctgcactctcatggactccaggagggtaaagatctcttcacacagaggcagaactctgcccagctcggaatgctttcctcaaatgaaagagatagcagtgaaccagggaatttcattcctctttttacaccccagtcacctgtgacagccactttgtctgatgaggatgatggcttcgtggaccttctcgatggagagaatctgaagaatgaggaggagaccccctcgtgcatggcaagcctctggacagctcctctcgtcatgagaactacaaaccttgacaaccgatgcaagctgtttgactccccttccctgtgtagctccagcactcggtcagtgttgaagagaccagaacgttctcaagaggagtctccacctggaagtacaaagaggaggaagagcatgtctggggccagccccaaagagtcaactaatccagagaaggcccatgagactcttcatcagtctttatccctggcatcttcccccaaaggaaccattgagaacattttggacaatgacccaagggaccttataggagacttctccaagggttatctctttcatacagttgctgggaaacatcaggatttaaaatacatctctccagaaattatggcatctgttttgaatggcaagtttgccaacctcattaaagagtttgttatcatcgactgtcgatacccatatgaatacgagggaggccacatcaagggtgcagtgaacttgcacatggaagaagaggttgaagacttcttattgaagaagcccattgtacctactgatggcaagcgtgtcattgttgtgtttcactgcgagttttcttctgagagaggtccccgcatgtgccggtatgtgagagagagagatcgcctgggtaatgaataccccaaactccactaccctgagctgtatgtcctgaaggggggatacaaggagttctttatgaaatgccagtcttactgtgagccccctagctaccggcccatgcaccacgaggactttaaagaagacctgaagaagttccgcaccaagagccggacctgggcaggggagaagagcaagagggagatgtacagtcgtctgaagaagctctgagggcggcaggaccagccagcagcagcccaagcttccctccatccccctttaccctctttcctgcagagaaacttaagcaaaggggacagctgtgtgacatttggagagggggcctgggacttccatgccttaaacctacctcccacactcccaaggttggagcccagggcatcttgctggctacgcctcttctgtccctgttagacgtcctccgtccatatcagaactgtgccacaatgcagttctgagcaccgtgtcaagctgctctgagccacagtgggatgaaccagccggggccttatcgggctccagcatctcatgaggggagaggagacggaggggagtagagaagtttacacagaaatgctgctggccaaatagcaaagag

SEQ ID NO: 139 - protein, 523 aa, Homo sapiens
MELGPSPAPRRLLFACSPPPASQPVVKALFGASAAGGLSPVTNLTVTMDQLQGLGSDYEQPLEVKNNSNLQRMGSSESTDSGFCLDSPGPLDSKENLENPMRRIHSLPQKLLGCSPALKRSHSDSLDHDIFQLIDPDENKENEAFEFKKPVRPVSRGCLHSHGLQEGKDLFTQRQNSAQLGMLSSNERDSSEPGNFIPLFTPQSPVTATLSDEDDGFVDLLDGENLKNEEETPSCMASLWTAPLVMRTTNLDNRCKLFDSPSLCSSSTRSVLKRPERSQEESPPGSTKRRKSMSGASPKESTNPEKAHETLHQSLSLASSPKGTIENILDNDPRDLIGDFSKGYLFHTVAGKHQDLKYISPEIMASVLNGKFANLIKEFVIIDCRYPYEYEGGHIKGAVNLHMEEEVEDFLLKKPIVPTDGKRVIVVFHCEFSSERGPRMCRYVRERDRLGNEYPKLHYPELYVLKGGYKEFFMKCQSYCEPPSYRPMHHEDFKEDLKKFRTKSRTWAGEKSKREMYSRLKKL

SEQ ID NO: 140 - DNA, 2549 bp, Homo sapiens
  misc_feature (2478)..(2478): n is a, c, g, or t
  misc_feature (2502)..(2502): n is a, c, g, or t
gggaaccatgcgaggttctgagaattgcggcgagggtcgcctcgagagacggtttctgagcaggaattctgaaatccccaccacttcctccctccgggggatttgatcccctatggccaccgctaacagcatcatcgtgctggatgatgatgacgaagatgaagcagctgctcagccagggccctcccacccactccccaatgcggcctcacctggggcagaagcccctagctcctctgagcctcatggggccagaggaagcagtagttcgggcggcaagaaatgctacaagctggagaatgagaagctgttcgaagagttccttgaactttgtaagatgcagacagcagaccaccctgaggtggtcccattcctctataaccggcagcaacgtgcccactctctgtttttggcctcggcggagttctgcaacatcctctctagggtcctgtctcgggcccggagccggccagccaagctctatgtctacatcaatgagctctgcactgttctcaaggcccactcagccaaaaagaagctgaacttggcccctgccgccaccacctccaatgagccctctgggaataaccctcccacacacctctccttggaccccacaaatgctgaaaacactgcctctcagtctccaaggacccgtggttcccggcggcagatccagcgtttggagcagctgctggcgctctatgtggcagagatccggcggctgcaggaaaaggagttggatctctcagaattggatgacccagactccgcatacctgcaggaggcacggttgaagcgtaagctgatccgcctctttgggcgactatgtgagctgaaagactgctcttcactgaccggccgtgtcatagagcagcgcatcccctaccgtggcacccgctacccagaggttaacaggcgcattgagcggctcatcaacaagccagggcctgataccttccctgactatggggatgtgcttcgggctgtagagaaggcagctgcccgacacagccttggcctcccccgacagcagctccagctcatggctcaggatgccttccgagatgtgggcatcaggttacaggagcgacgtcacctcgatctcatctacaactttggctgccacctcacagatgactataggccaggcgttgaccccgcactatcagatcctgtgttggcccggcgccttcgggaaaaccggagtttggccatgagtcggctggatgaggtcatctccaaatatgcaatgttgcaagacaaaagtgaggagggcgagagaaaaaagagaagagctcggctccaaggcacctcttcccactctgcagacacccccgaagcctccttggattctggtgagggccctagtggaatggcatcccaggggtgcccttctgcctccagagctgagacagatgacgaagacgacgaggagagtgatgaggaagaggaggaggaggaggaagaagaagaggaggaggccacagattctgaagaggaggaggatctggaacagatgcaggagggtcaggaggatgatgaagaggaggacgaagaggaagaagcagcagcaggtaaagatggagacaagagccccatgtcctcactacagatctccaatgaaaagaacctggaacctggcaaacagatcagcagatcttcaggggagcagcaaaacaaaggacgcatagtgtcaccatcgttactgtcagaagaacccctggccccctccagcatagatgctgaaagcaatggagaacagcctgaggagctgaccctggaggaagaaagccctgtgtctcagctctttgagctagagattgaagctttgcccctggataccccttcctctgtggagacggacatttcctcttccaggaagcaatcagaggagcccttcaccactgtcttagagaatggagcaggcatggtctcttctacttccttcaatggaggcgtctctcctcacaactggggagattctggtcccccctgcaaaaaatctcggaaggagaagaagcaaacaggatcagggccattaggaaacagctatgtggaaaggcaaaggtcagtgcatgagaagaatgggaaaaagatatgtaccctgcccagcccaccttcccccttggcttccttggccccagttgctgattcctccacgagggtggactctcccagccatggcctggtgaccagctccctctgcatcccttctccagcccggctgtcccaaaccccccattcacagcctcctcggcctggtacttgcaagacaagtgtggccacacaatgcgatccagaagagatcatcgtgctctcagactctgattagctgcctccccttctccctgcctccagaatgttctgggataacatttggaggaaggtgggaagcagatgactgaggaagggatggactaagctaatccccttttggtggtgtttcctttaaaaaaaaaaaaaaaaaactccganaaagctttggacttcttccgccanaagttttggtcaatctcccaatcaaggttgttcggctttgtctacct

SEQ ID NO: 141 - protein, 740 aa, Homo sapiens
MATANSIIVLDDDDEDEAAAQPGPSHPLPNAASPGAEAPSSSEPHGARGSSSSGGKKCYKLENEKLFEEFLELCKMQTADHPEVVPFLYNRQQRAHSLFLASAEFCNILSRVLSRARSRPAKLYVYINELCTVLKAHSAKKKLNLAPAATTSNEPSGNNPPTHLSLDPTNAENTASQSPRTRGSRRQIQRLEQLLALYVAEIRRLQEKELDLSELDDPDSAYLQEARLKRKLIRLFGRLCELKDCSSLTGRVIEQRIPYRGTRYPEVNRRIERLINKPGPDTFPDYGDVLRAVEKAAARHSLGLPRQQLQLMAQDAFRDVGIRLQERRHLDLIYNFGCHLTDDYRPGVDPALSDPVLARRLRENRSLAMSRLDEVISKYAMLQDKSEEGERKKRRARLQGTSSHSADTPEASLDSGEGPSGMASQGCPSASRAETDDEDDEESDEEEEEEEEEEEEEATDSEEEEDLEQMQEGQEDDEEEDEEEEAAAGKDGDKSPMSSLQISNEKNLEPGKQISRSSGEQQNKGRIVSPSLLSEEPLAPSSIDAESNGEQPEELTLEEESPVSQLFELEIEALPLDTPSSVETDISSSRKQSEEPFTTVLENGAGMVSSTSFNGGVSPHNWGDSGPPCKKSRKEKKQTGSGPLGNSYVERQRSVHEKNGKKICTLPSPPSPLASLAPVADSSTRVDSPSHGLVTSSLCIPSPARLSQTPHSQPPRPGTCKTSVATQCDPEEIIVLSDSD

SEQ ID NO: 142 - DNA, 4167 bp, Homo sapiens
agttccctccagctgcagagagcttcagtttgtctttttttttttaaactaaaatggaggctggtttcttgccttaaggagcccattgcctttcccgctgaagtctagatgttgacatgtaataaagcgggcagcaggatggtggtggatgcggccaactccaatgggcctttccagcccgtggtccttctccatattcgagatgttcctcctgctgatcaagagaagctttttatccagaagttacgtcagtgttgcgtcctctttgactttgtttctgatccactaagtgacctaaagtggaaggaagtaaaacgagctgctttaagtgaaatggtagaatatatcacccataatcggaatgtgatcacagagcctatttacccagaagtagtccatatgtttgcagttaacatgtttcgaacattaccaccttcctccaatcctacgggagcggaatttgacccggaggaagatgaaccaacgttagaagcagcctggcctcatctacagcttgtttatgaatttttcttaagatttttagagtctccagatttccaacctaatatagcgaagaaatatattgatcagaagtttgtattgcagcttttagagctctttgacagtgaagatcctcgggagagagattttcttaaaaccacccttcacagaatctatgggaaattcctaggcttgagagcttacatcagaaaacagataaataatatattttataggtttatttatgaaacagagcatcataatggcatagcagagttactggaaatattgggaagtataattaatggatttgccttaccactaaaagaagagcacaagattttcttattgaaggtgttactacctttgcacaaagtgaaatctctgagtgtctaccatccccagctggcatactgtgtagtgcagtttttagaaaaggacagcaccctcacggaaccagtggtgatggcacttctcaaatactggccaaagactcacagtccaaaagaagtaatgttcttaaacgaattagaagagattttagatgtcattgaaccatcagaatttgtgaagatcatggaacccctcttccggcagttggccaaatgtgtctccagcccacacttccaggtggcagagcgagctctctattactggaataatgaatacatcatgagtttaatcagtgacaacgcagcgaagattctgcccatcatgtttccttccttgtaccgcaactcaaagacccattggaacaagacaatacatggcttgatatacaacgccctgaagctcttcatggagatgaaccaaaagctatttgatgactgtacacaacagttcaaagcagagaaactaaaagagaagctaaaaatgaaagaacgggaagaagcatgggttaaaatagaaaatctagccaaagccaatccccagtacacagtgtatagtcaagccagcaccatgagcattccggttgcaatggagacagatgggcctttatttgaagatgtgcagatgctgagaaagacagtgaaggacgaggctcatcaggcacagaaagatccgaagaaggaccgtcctcttgcacgccgcaagtccgagctgcctcaggacccccacaccaagaaagccttggaagctcactgcagggccgatgagctggcctcccaggacggccgctagcctccggggcgccgcgtcggggccgggcccgccagttcttttccggattctgtagaaaatacatacttcctgtgccataccaatcagttacactcaaagctttcttggaccccgttccgtaggcaataacgtgcgtccgcctcagcgcgagattaggagttcaaacaatggtgacttcccagagcccgctggcagagccgcgggttgacgacggtgtcctcgcagtgtcgccgccaccccagcgtagtccaagtcagactatttcacaaagtcagagcgataggaaagcaccctgcccttcatcttcatgttctcccaaatggaacttaggatcttttaacataggtggttctgtgataacatcagtgttttccaaatcaaaggaacgctttaaaaaataggacctattttttaagactttacagcctttgaaatggtttccacgtgattgttacgccagcagttctcgttttgtttgtttttcaatctcagtgaaatggctctttgctttcgagttctcacgcaacgtactgggcaaatgacaatcctcagccgctggtattttctaaggggtctcttcactttgatgagtgacatgaacaccgtgtctccttctcttgtgtgtacctaaagccatatttccaagtctgtggtactccaggattccaggagtaagcctgtagaagagatttattttaaaagagattgctctgaaatttatcttaaaagagcttgctctgtctaccttgacagaaattggagttttaaaattatgtgttaatatttttatttgcagatttcgtttccgtcaacttaaacattgttgcccttcaacaaggctcttgaattaataaaattatagtctctaagaattccacattttatggaaagttagagcaaaatcattttgagttaagccagttcttagcctaatgcaaactgcagcgcctttaagcataaagtaacacaacagcattgcacggggccggcactgccgctgccttcactgaaggctgcagtgctgttctgagagcttggaggaggcaccagcgaggatgacgtttagtggagctctttctgttgaaaagagctcacgttatcaacaccttgtaaggaaaatacagtgtctgagttttcatcggtcttcacatgctgctatatattccacagagttccttgcatgtactgagcttttgttttagatggaatagcacaaggagaaaaatctttaaacttagtgctttgtctattctttatttctctcagggtggccagtattttgacttatttatcctgcttgaaagctacttgagatgtgtactgctattctaaacacgtgatctagtttctttcatctctggcataagattatataacttaatgttaagtgtcttgaggcataaaagacaaaatgtggcttattttaggatctgttttttcatcgaggtctcgggtatcctttcaaagatagtgagaagcagacactgctccttgtgcagctctggtacctcctgcccactgctgtcacttcaagccactggcaatgcttctgtcctcgtgtcttggaggaaaatcacctggggggaggggacttcttgtggtaagagcaagtgcaggtatgaaatgcgaagattgccccagctaaaagtggacaagtccgctttgtgagatgaatacttcctgagaaacttgacaagtatctctccattttaccattatgaaaactatcattaaaaaaaacagtttagatgccttctccttttgagggaaaaagggtgctttttattgtataaagcagcgtcttatgtattttgatataccattgtttgaacttccgtctttagctgatagattctcaaatatccttgattttggatgttcagtatgtttgtgagagaggtttctgggaagactctctttttgccctcgggaaaaagcaaaatatcaatgtttgggtgactgtgtaaagctcagtgtgtaagaacatctttttgtctaggttttctttctgctctttattgaagacaaacactcaccaaaaagaaaaataaaagttttcagagaaactaattttctttggcaagagtattacttaatattttggcctcctaaagtttccctagttagtactcggactcctgtgctaattgtcagcttacatatcattgtatagagactgtttattctgtaccaaactgatttcaaaagtactacattgaaaataaaccggtgactgtttttcttcataaagttctgcgtttggcatcttcactctttccaaaatgtatctgtacatcagaaatgtcactattccaagtgtctttttagtgtggctttagtatggcttccttttaatattgtacatacattgtatctttgttttatggtaataagtaataaaaatgtagacttcatattttgtacaaaatgtcctatgtacagaataaaaaagttcatagaaacagcaaaaaaaaaaaaaaaaaa

SEQ ID NO: 143 - protein, 524 aa, Homo sapiens
MLTCNKAGSRMVVDAANSNGPFQPVVLLHIRDVPPADQEKLFIQKLRQCCVLFDFVSDPLSDLKWKEVKRAALSEMVEYITHNRNVITEPIYPEVVHMFAVNMFRTLPPSSNPTGAEFDPEEDEPTLEAAWPHLQLVYEFFLRFLESPDFQPNIAKKYIDQKFVLQLLELFDSEDPRERDFLKTTLHRIYGKFLGLRAYIRKQINNIFYRFIYETEHHNGIAELLEILGSIINGFALPLKEEHKIFLLKVLLPLHKVKSLSVYHPQLAYCVVQFLEKDSTLTEPVVMALLKYWPKTHSPKEVMFLNELEEILDVIEPSEFVKIMEPLFRQLAKCVSSPHFQVAERALYYWNNEYIMSLISDNAAKILPIMFPSLYRNSKTHWNKTIHGLIYNALKLFMEMNQKLFDDCTQQFKAEKLKEKLKMKEREEAWVKIENLAKANPQYTVYSQASTMSIPVAMETDGPLFEDVQMLRKTVKDEAHQAQKDPKKDRPLARRKSELPQDPHTKKALEAHCRADELASQDGR

SEQ ID NO: 144 - DNA, 2514 bp, Homo sapiens
cctcgtgccgcagttctgccaccgtcactgagaagctcagcggtagcttttgggaagcaggacgttctcaccaggagagcgtcctctcgagatttctgctccctccattcagggcgtttgggagccaccccttcattttttaaaaaaagtatttctctgtgaccgacggccggggccttctgacggtctgaggtcttgcttgggccagtcacctcctgtcacggtccgcggaggggggaaggataagagggcgaggagctcatcgctcgccacccccgtgggcttcttgggcgcaggtcggagctgggtgggccggctccccggcccctggcttgggcgaccatgtccgcatccgcccagcagctggcggaggagctgcagatcttcggcctagactgcgaggaggctctaattgagaaattggtagagctttgtgttcagtatggacagaatgaggagggaatggtaggcgagcttatagccttctgcaccagcacacataaagttggccttacctcagagatcctgaactcttttgagcatgagtttctgagcaaaagattatcgaaagccaggcatagtacctgcaaggacagtggccatgcaggagctagagacattgtttccattcaagagctaattgaagtggaagaagaagaggaaatcctcttgaactcttacaccacaccttcaaagggttctcagaagcgagctatctctaccccagaaacccccctaacaaaaaggagtgtgtcaactcgtagcccccatcagctactctcaccgtcaagtttctctccaagtgctactccctcccagaaatacaactcacgaagtaaccgaggagaagtggttacctccttcggcttagcacagggagtatcttggtctgggagaggaggagctggaaacatcagcctgaaggtcttgggatgtccagaggcactaactgggagctacaaatccatgtttcagaagctcccagacattcgagaagttctgacctgtaagatagaagaacttggcagcgaactcaaggaacattacaagattgaagctttcactcctttgctagccccagcacaggagcctgtcactctgctgggccagattggctgtgatagcaacgggaagctgaacaacaagtcagtgattctcgagggagaccgggaacattcctcgggtgctcaaattccagtggatttatctgagcttaaggaatattctctgtttcctggacaggttgtaattatggaaggaatcaacaccactggtaggaaacttgttgccaccaaactctacgagggtgtgccacttccattttatcagcccactgaagaggatgcagactttgagcaaagcatggtcctggttgcctgtggaccatacaccacatctgacagcatcacgtatgaccccctgcttgacctgattgctgtcatcaaccatgaccggccagatgtctgcatcctgtttggccctttcctggatgctaagcatgaacaggtggagaattgtctactgacaagtccatttgaagacattttcaagcagtgtctacgaacaattattgaaggcacaagaagctccggctcccaccttgtctttgtcccgtcattgagagatgtgcaccatgagcctgtgtacccccagccgcctttcagctactccgatctgtctcgagaggacaaaaagcaagtacagtttgtgtccgagccctgcagcctctccataaacggagtgatcttcggcttgacatccacagatctgcttttccacctgggggccgaggagatcagtagttcttccggaacttcagacagattcagccgaatactcaagcacatcttgacccagaggagctactacccactctacccgccccaagaagacatggccattgactatgagtcgttctatgtttacgcacagctgcctgtcaccccagatgtcctcatcatcccgtcagagctgaggtacttcgtgaaggatgtcctcggctgtgtctgtgtgaaccctgggcgccttaccaaagggcaggtgggaggcaccttcgcccgactctaccttaggaggccggcagcggacggggcagagaggcagagcccatgcattgctgtgcaggtcgtcaggatctgaggcttctgtcctctgctgttctctgctgtgtgggcccttaaagtcttagccaagagccaagacatagccctgtgacaaggtgaacagttgggtgggaaaggagagaggagccagccagggaggggcagctgcagtgaccaggcccagcagggaggacttgtgcagccgggcctgcctctgagtggtgcctctcctggaaggaagctcttgcttctcagtccatgctccgtgtccagaagtaagccagctgtggatcccgcccactcagaaaaggcgagaaggctttgtgattttctacatgaatcaaacacagaaacaacttttggagaaattaaattctgagtgtgaaaaaaaaaaaaaaaaaaaaaaaaaaaa

SEQ ID NO: 145 - protein, 598 aa, Homo sapiens
MSASAQQLAEELQIFGLDCEEALIEKLVELCVQYGQNEEGMVGELIAFCTSTHKVGLTSEILNSFEHEFLSKRLSKARHSTCKDSGHAGARDIVSIQELIEVEEEEEILLNSYTTPSKGSQKRAISTPETPLTKRSVSTRSPHQLLSPSSFSPSATPSQKYNSRSNRGEVVTSFGLAQGVSWSGRGGAGNISLKVLGCPEALTGSYKSMFQKLPDIREVLTCKIEELGSELKEHYKIEAFTPLLAPAQEPVTLLGQIGCDSNGKLNNKSVILEGDREHSSGAQIPVDLSELKEYSLFPGQVVIMEGINTTGRKLVATKLYEGVPLPFYQPTEEDADFEQSMVLVACGPYTTSDSITYDPLLDLIAVINHDRPDVCILFGPFLDAKHEQVENCLLTSPFEDIFKQCLRTIIEGTRSSGSHLVFVPSLRDVHHEPVYPQPPFSYSDLSREDKKQVQFVSEPCSLSINGVIFGLTSTDLLFHLGAEEISSSSGTSDRFSRILKHILTQRSYYPLYPPQEDMAIDYESFYVYAQLPVTPDVLIIPSELRYFVKDVLGCVCVNPGRLTKGQVGGTFARLYLRRPAADGAERQSPCIAVQVVRI

SEQ ID NO: 146 - DNA, 6455 bp, Homo sapiens
gaggaagcgattctggggtttctgtgttgaacggttcttgtccgcgaagatgcgcttcggcctctgtcaggggacttgaacgggcttagtgggcttcagccagcttttctccaccggttccccacggggaccccccccccccggccgttgcaatggcgggcgtggggccggggggctacgcggcggagttcgtgccaccgccagagtgccccgtctttgagccgagttgggaggagttcacagatccgctcagctttatcggccgcatccggcctttggcggagaaaaccggcatctgcaaaattcggccgcccaaggactggcagcctccatttgcctgtgaagtaaaaagctttcgtttcactccaagagtccagcgcctgaatgaacttgaggcaatgaccagagtgagattggatttcttggatcaactagcaaaattttgggaacttcaaggatctactctgaagatccctgtggtagagagaaaaatcctggatctgtatgctttgagcaagattgttgccagcaaaggaggttttgaaatggtcaccaaagagaagaaatggtctaaagtgggtagtcgcttgggatatctgccaggaaaaggaactgggtctcttttgaagtcacattatgaaagaattctctacccatatgagcttttccagtctggtgtgagccttatgggtgtgcagatgcctaatttagatcttaaagaaaaagtggagcctgaggttctcagcactgatacccaaacttccccagagccaggcacaaggatgaacattctgccgaagagaacaagacgtgtgaagactcagtcagaatctggagatgtgagtagaaacacggaactgaagaaacttcagatttttggggctgggcccaaggttgtgggcttggcaatgggaacaaaagataaagaagatgaggtcacccgaagacgaaaagttaccaacaggtcagacgcatttaacatgcaaatgagacaacggaaaggcactctctctgttaactttgttgatctctatgtttgtatgttttgtggtcggggaaacaatgaagataaattgcttttgtgtgatggatgtgatgacagctatcatacattttgtctaattcctccactacctgatgtgcccaaaggagactggaggtgtcctaaatgtgtcgccgaggaatgtagcaaacctcgagaagcctttggatttgaacaagctgtacgagagtatacacttcagagctttggagagatggcagataattttaagtctgattattttaatatgccagtccatatggttcccacagaactagtagaaaaggaattttggcggctggtaagcagcattgaagaagatgttattgtggaatatggagcagatatctcctcaaaagactttggaagtggatttccggtgaaggatgggcggagaaagattctgccagaagaagaggaatatgcactttctggttggaatttgaataacatgcctgtcctggaacagtctgttcttgcacatattaatgtggacatctctggtatgaaagtgccgtggctctatgtgggaatgtgcttctcttctttttgctggcacattgaggatcactggagttattccatcaactacttgcactggggggagccaaagacatggtatggtgtgccatctcatgctgcagagcaactggaggaggtgatgagagagctggcccccgagttatttgaatcccagcctgatcttctgcatcagttagttaccatcatgaaccccaacgtgctaatggagcatggtgtgcctgtgtacaggaccaatcagtgtgctggcgagtttgttgtgacatttcctcgtgcctatcactctggatttaaccagggctacaactttgctgaagctgtgaacttctgtactgctgactggttgcccattggacgtcaatgtgtaaatcattaccgacgcctaaggcgccactgtgtcttttcacacgaggaactaattttcaagatggcagcagatccagaatgcttagatgtggggctggctgccatggtctgcaaagaattgactctcatgactgaagaagaaacacgattaagagagtctgttgtacagatgggtgtcctgatgtcagaagaagaagtgtttgaacttgttcctgatgatgagcggcagtgttcagcatgcagaaccacatgttttctctctgctctcacatgttcctgtaatcctgagcggcttgtatgtctctaccatccaactgatctgtgcccctgccccatgcagaagaaatgtcttagatatcgctacccattagaagacctcccttctctgctatatggtgtaaaagtcagggcacagtcctatgacacttgggtcagtcgtgttacagaagcattgtctgctaacttcaaccacaaaaaagatttgattgaattgcgagtaatgctggaagatgctgaggataggaaatacccagagaatgatctctttcgaaaactcagggatgctgtaaaagaagctgagacctgtgcttctgtggctcagctgcttctgagcaaaaagcagaaacacagacagagcccagatagtgggaggactcggaccaaactgacagtggaagaattgaaggcctttgtccaacaactttttagtcttccgtgtgtcatcagccaagctcggcaagtaaagaatctgctagatgatgtggaagagtttcatgaacgtgctcaggaggccatgatggatgaaaccccagattcttccaaactccagatgttgatagatatgggctctagtctctatgtggaactccctgaattaccacgactgaagcaagagctacaacaggctcggtggttggacgaagtaagactgaccttatcagatccgcaacaagtcactttggatgtcatgaagaagctgatagactctggggtagggttggcaccccaccatgctgtggagaaagcaatggctgaactacaggagctccttacagtctctgaacgatgggaagaaaaggctaaggtctgcctacaggcaagaccgaggcacagtgtggcaagtttagaaagcattgtgaatgaagccaagaacattccagcctttctacccaatgtgttgtccttgaaagaagccttacaaaaggctcgagaatggaccgctaaagtggaagctattcagagtggcagcaattacgcttatttggagcagcttgagagcttgtctgcgaaaggacgccctattcctgtgcgtcttgaagcactgccgcaagtggaatcacaggtagcagcagcacgggcatggagagaacggactgggcggacgtttcttaagaagaattctagccatacattgttacaggtgctgagcccccggaccgacattggtgtatatgggagtggcaaaaataggaggaaaaaagtaaaagaactaatagaaaaagaaaaagaaaaggatctggacctggagcctctgagtgatctggaggaaggattggaggaaaccagagatacagccatggtggtggcagttttcaaagaacgggagcaaaaagagattgaagccatgcattctctcagagcagccaacctagccaagatgacaatggtggaccgcatagaagaagtaaaattttgcatttgccgcaagacagccagtgggtttatgctacagtgtgagctctgcaaagactggttccataacagctgtgttcctcttcctaaatcaagttcccaaaaaaaaggatccagctggcaagctaaagaagtaaaattcctttgccctctttgtatgcggtctcgaaggcccaggctagagactattctgtcactcctggtatcccttcagaagttgcccgtacggttgcctgaaggagaggccctgcagtgtttgacagaacgtgctatgagttggcaagatagagcgcggcaggctctagccacagatgaactatcctctgccctggccaaactatctgtgttgagccagcgtatggtggaacaggcggctcgagaaaaaactgaaaagatcatcagtgcagaactccaaaaagcagctgccaatccagacttacagggacacttacctagtttccagcagtctgcttttaaccgggtggtgagcagtgtgtcatcttctcctcgacaaacaatggactatgatgatgaagaaacagactctgatgaagacattcgagagacatatggctacgacatgaaggacacagccagtgtgaagtcctctagtagtcttgaacccaatcttttttgtgatgaagagattcccatcaaatccgaggaggtggtgacccacatgtggacagcaccttcattttgtgcagagcatgcttattcttctgcttctaagagttgttctcaagtattttttgggaaaggttctagcaccccaaggaaacaacctcggaagagccctttggtgccccgaagtttggaacctccagtgctggagttgtcacctggagctaaggcacaactggaagaacttatgatggttggagatctcctggaagtatctctggacgagactcaacacatatggcggattttgcaggccacacacccaccctctgaagacagattcttgcatatcatggaggatgacagcatggaagagaaaccactaaaagtgaaaggaaaggactcttcagagaagaaacggaaacggaagctagaaaaggtagagcaactttttggagaaggaaaacagaagtccaaggagttaaagaaaatggacaaacctagaaagaagaaattaaaattaggtgcagacaaatcaaagaagctgaataaactggccaagaaactagcaaaagaagaagagagaaagaaaaagaaggagaaggctgctgcagccaaagttgaacttgtgaaagagagcactgaaaagaaaagagagaaaaaggtgctggacatcccctcaaagtatgactggtcaggagcagaggagtctgatgatgagaatgctgtgtgcgcagaaccagactgccaaaggccctgcaaggacaagggagttgtatttgtaacgaagaagagagagataaaaaatattagttttaaaagtgtcctatgtgactgcttttctaaaaaggtagactgggtacaatgtgatggtggctgtgatgagtggtttcatcgggtttgtgtgggtgtatctccagaaatggctgaaaatgaagattacatctgtataaactgtgcaaagaagcaggggccagttagcccaggtccagcaccacctccttccttcataatgagctacaaactaccaatggaggatcttaaagagaccagttagcagatgcttggttagtttgggacatggggggacatggaccacattgagaccttagtcatcaagtagagtggtttatatcacttggaatgttgcttctaaagatgaatggccttcagagaaagtccccttagtgctggcttcctctttgcatggactctgtgggttacattgctctatcaacatatctatgcagagggtgtcttctttggtacaacagccaatatctcatgtctcctttgagtgtggtttactgcattaaggccagatgcttaattgagctctagggtggctggttagtattaatacattggtgtgctaacagggcatataggatgtggcttttgtccagctgatagtagttagaggcttacaacttaggagcagcaccaactgaaggtgctaattgcttggatctccttcattaggatagttggagagggattggagtaccactttcttccactgttaccaggtacttaatgccctaaagatacaactaggagtaacagggccaaagttatttctgttagacgtcaaggaatggtatcacagtctattgacctcagcgatttgtgcttgtttgtgctagaagaacatcccaaataggagaacctctcacaagctggggcaggtcaccttatctttgtaagatgaggatatcatctagatcagaaatctgactagattggattctgaggagaagaacctactacaaggcaaggagccgttttttggctttgaaaagtcttgctgtcttgggtctacattttagggaagagcaggtacatggatccaggcttctgccaaaaaaaaaaagagaagaagatgacgagtatgaccagtcgtactatcttactgagccacagtgatgcatgcttttcggggaaaacttcattcacaagtattccagacaccaggcttcaggcatggccatgagcaagaccagcaaataacagctttttcccttgcagccctgaccccaatgtctgctgtttccaacactggtgatttctaactacggcccacagcagatgctgttgaataacaccatggcttcatcagaggatgtggggttgtagtacctctgggtgatgaagttgttttagcaaatccatttttaaaaaaaaaaaaaaa

SEQ ID NO: 147 - protein, 1722 aa, Homo sapiens
MAGVGPGGYAAEFVPPPECPVFEPSWEEFTDPLSFIGRIRPLAEKTGICKIRPPKDWQPPFACEVKSFRFTPRVQRLNELEAMTRVRLDFLDQLAKFWELQGSTLKIPVVERKILDLYALSKIVASKGGFEMVTKEKKWSKVGSRLGYLPGKGTGSLLKSHYERILYPYELFQSGVSLMGVQMPNLDLKEKVEPEVLSTDTQTSPEPGTRMNILPKRTRRVKTQSESGDVSRNTELKKLQIFGAGPKVVGLAMGTKDKEDEVTRRRKVTNRSDAFNMQMRQRKGTLSVNFVDLYVCMFCGRGNNEDKLLLCDGCDDSYHTFCLIPPLPDVPKGDWRCPKCVAEECSKPREAFGFEQAVREYTLQSFGEMADNFKSDYFNMPVHMVPTELVEKEFWRLVSSIEEDVIVEYGADISSKDFGSGFPVKDGRRKILPEEEEYALSGWNLNNMPVLEQSVLAHINVDISGMKVPWLYVGMCFSSFCWHIEDHWSYSINYLHWGEPKTWYGVPSHAAEQLEEVMRELAPELFESQPDLLHQLVTIMNPNVLMEHGVPVYRTNQCAGEFVVTFPRAYHSGFNQGYNFAEAVNFCTADWLPIGRQCVNHYRRLRRHCVFSHEELIFKMAADPECLDVGLAAMVCKELTLMTEEETRLRESVVQMGVLMSEEEVFELVPDDERQCSACRTTCFLSALTCSCNPERLVCLYHPTDLCPCPMQKKCLRYRYPLEDLPSLLYGVKVRAQSYDTWVSRVTEALSANFNHKKDLIELRVMLEDAEDRKYPENDLFRKLRDAVKEAETCASVAQLLLSKKQKHRQSPDSGRTRTKLTVEELKAFVQQLFSLPCVISQARQVKNLLDDVEEFHERAQEAMMDETPDSSKLQMLIDMGSSLYVELPELPRLKQELQQARWLDEVRLTLSDPQQVTLDVMKKLIDSGVGLAPHHAVEKAMAELQELLTVSERWEEKAKVCLQARPRHSVASLESIVNEAKNIPAFLPNVLSLKEALQKAREWTAKVEAIQSGSNYAYLEQLESLSAKGRPIPVRLEALPQVESQVAAARAWRERTGRTFLKKNSSHTLLQVLSPRTDIGVYGSGKNRRKKVKELIEKEKEKDLDLEPLSDLEEGLEETRDTAMVVAVFKEREQKEIEAMHSLRAANLAKMTMVDRIEEVKFCICRKTASGFMLQCELCKDWFHNSCVPLPKSSSQKKGSSWQAKEVKFLCPLCMRSRRPRLETILSLLVSLQKLPVRLPEGEALQCLTERAMSWQDRARQALATDELSSALAKLSVLSQRMVEQAAREKTEKIISAELQKAAANPDLQGHLPSFQQSAFNRVVSSVSSSPRQTMDYDDEETDSDEDIRETYGYDMKDTASVKSSSSLEPNLFCDEEIPIKSEEVVTHMWTAPSFCAEHAYSSASKSCSQVFFGKGSSTPRKQPRKSPLVPRSLEPPVLELSPGAKAQLEELMMVGDLLEVSLDETQHIWRILQATHPPSEDRFLHIMEDDSMEEKPLKVKGKDSSEKKRKRKLEKVEQLFGEGKQKSKELKKMDKPRKKKLKLGADKSKKLNKLAKKLAKEEERKKKKEKAAAAKVELVKESTEKKREKKVLDIPSKYDWSGAEESDDENAVCAEPDCQRPCKDKGVVFVTKKREIKNISFKSVLCDCFSKKVDWVQCDGGCDEWFHRVCVGVSPEMAENEDYICINCAKKQGPVSPGPAPPPSFIMSYKLPMEDLKETS

SEQ ID NO: 148 - DNA, 1415 bp, Homo sapiens
ggagggagggtgagttagggggagacccggcccccaaggggcgggcgccgggcagggccccgcgggcggccgagggttgggcccggctcccagcccctcgccgtcctccggctgacagggggaggagcccgccgggagggccggggtctcgggctggggagccgggacgggagagcagcgcacgcgggtgcaccgcggccgcgccccgggagggctgttcgggccagcgcccgccggctgctccgcgctgacagcgccgggctggggcggggcggggggctttgcaggccgccagtgtcgacatgctgctggaggaggttcgcgccggcgaccggctgagtggggcggcggcccggggcgacgtgcaggaggtgcgccgccttctgcaccgcgagctggtgcatcccgacgccctcaaccgcttcggcaagacggcgctgcaggtcatgatgtttggcagcaccgccatcgccctggagctgctgaagcaaggtgccagccccaatgtccaggacacctccggtaccagtccagtccatgacgcagcccgcactggattcctggacaccctgaaggtcctagtggagcacggggctgatgtcaacgtgcctgatggcaccggggcacttccaatccatctggcagttcaagagggtcacactgctgtggtcagctttctggcagctgaatctgatctccatcgcagggacgccaggggtctcacacccttggagctggcactgcagagaggggctcaggacctcgtggacatcctgcagggccacatggtggccccgctgtgatctggggtcaccctctccagcaagagaaccccgtggggttatgtatcagaagagaggggaagaaacactttctcttcttgtttctcctgcccactgctgcagtaggggaggagcacagtttgtggcttataggtgttggttttgggggtgtgagtgtttgggggacgtttctcatttgtttttctcactccttttggtgtgttggacagagaagggctcctgcaggccacagccacctaaacggttcagtttcttctgcgcctcaggctgctggggcctcagacgagacccaagggcagagcatttaagagtgaagtcatgacctccagggagcctagaagctggtggccttggccggctgtgctcagagacctgaagtgtgcacgttgcttcaggcatggggggtggggggagcgtcccaaatcaataagaaggtagaatgagttatgagttattcatattctgttggaagcttgttttccagtctcttgtacagcgttttaaaagaaatggattctatttattatgctttattggaaaaaatgttgtaataatttaatgtttttacccattaaattaagacttgtgcatgatccaaaaaaaaaaaaaaaa

SEQ ID NO: 149 - protein, 166 aa, Homo sapiens
MLLEEVRAGDRLSGAAARGDVQEVRRLLHRELVHPDALNRFGKTALQVMMFGSTAIALELLKQGASPNVQDTSGTSPVHDAARTGFLDTLKVLVEHGADVNVPDGTGALPIHLAVQEGHTAVVSFLAAESDLHRRDARGLTPLELALQRGAQDLVDILQGHMVAPL

SEQ ID NO: 150 - DNA, 1242 bp, Homo sapiens
agttacgttcggggcgtggccgggagcacgttggctccgccccctggcggctgcctcagcggcggcggcggcgcaggctcagagcagaccccgcccggcgaggaggagggagggccgccagtgtcgacatgctgctggaggaggttcgcgccggcgaccggctgagtggggcggcggcccggggcgacgtgcaggaggtgcgccgccttctgcaccgcgagctggtgcatcccgacgccctcaaccgcttcggcaagacggcgctgcaggtcatgatgtttggcagcaccgccatcgccctggagctgctgaagcaaggtgccagccccaatgtccaggacacctccggtaccagtccagtccatgacgcagcccgcactggattcctggacaccctgaaggtcctagtggagcacggggctgatgtcaacgtgcctgatggcaccggggcacttccaatccatctggcagttcaagagggtcacactgctgtggtcagctttctggcagctgaatctgatctccatcgcagggacgccaggggtctcacacccttggagctggcactgcagagaggggctcaggacctcgtggacatcctgcagggccacatggtggccccgctgtgatctggggtcaccctctccagcaagagaaccccgtggggttatgtatcagaagagaggggaagaaacactttctcttcttgtttctcctgcccactgctgcagtaggggaggagcacagtttgtggcttataggtgttggttttgggggtgtgagtgtttgggggacgtttctcatttgtttttctcactccttttggtgtgttggacagagaagggctcctgcaggccacagccacctaaacggttcagtttcttctgcgcctcaggctgctggggcctcagacgagacccaagggcagagcatttaagagtgaagtcatgacctccagggagcctagaagctggtggccttggccggctgtgctcagagacctgaagtgtgcacgttgcttcaggcatggggggtggggggagcgtcccaaatcaataagaaggtagaatgagttatgagttattcatattctgttggaagcttgttttccagtctcttgtacagcgttttaaaagaaatggattctatttattatgctttattggaaaaaatgttgtaataatttaatgtttttacccattaaattaagacttgtgcatgatcaaaaaaaaaaaaaaaaaa

SEQ ID NO: 151 - DNA, 2530 bp, Homo sapiens
cagcttccctgtggtttcccgaggcttccttgcttcccgctctgcgaggagcctttcatccgaaggcgggacgatgccggataatcggcagccgaggaaccggcagccgaggatccgctccgggaacgagcctcgttccgcgcccgccatggaaccggatggtcgcggtgcctgggcccacagtcgcgccgcgctcgaccgcctggagaagctgctgcgctgctcgcgttgtactaacattctgagagagcctgtgtgtttaggaggatgtgagcacatcttctgtagtaattgtgtaagtgactgcattggaactggatgtccagtgtgttacaccccggcctggatacaagacttgaagataaatagacaactggacagcatgattcaactttgtagtaagcttcgaaatttgctacatgacaatgagctgtcagatttgaaagaagataaacctaggaaaagtttgtttaatgatgcaggaaacaagaagaattcaattaaaatgtggtttagccctcgaagtaagaaagtcagatatgttgtgagtaaagcttcagtgcaaacccagcctgcaataaaaaaagatgcaagtgctcagcaagactcatatgaatttgtttccccaagtcctcctgcagatgtttctgagagggctaaaaaggcttctgcaagatctggaaaaaagcaaaaaaagaaaactttagctgaaatcaaccaaaaatggaatttagaggcagaaaaagaagatggtgaatttgactccaaagaggaatctaagcaaaagctggtatccttctgtagccaaccatctgttatctccagtcctcagataaatggtgaaatagacttactagcaagtggctccttgacagaatctgaatgttttggaagtttaactgaagtctctttaccattggctgagcaaatagagtctccagacactaagagcaggaatgaagtagtgactcctgagaaggtctgcaaaaattatcttacatctaagaaatctttgccattagaaaataatggaaaacgtggccatcacaatagactttccagtcccatttctaagagatgtagaaccagcattctgagcaccagtggagattttgttaagcaaaccgtgccctcagaaaatataccattgcctgaatgttcttcaccaccttcatgcaaacgtaaagttggtggtacatcagggaggaaaaacagtaacatgtccgatgaattcattagtctttcaccaggtacaccaccttctacattaagtagttcaagttacaggcaagtgatgtctagtccctcagcaatgaagctgttgcccaatatggctgtgaaaagaaatcatagaggagagactttgctccatattgcttctattaagggcgacataccttctgttgaataccttttacaaaatggaagtgatccaaatgttaaagaccatgctggatggacaccattgcatgaagcttgcaatcatgggcacctgaaggtagtggaattattgctccagcataaggcattggtgaacaccaccgggtatcaaaatgactcaccacttcacgatgcagccaagaatgggcacgtggatatagtcaagctgttactttcctatggagcctccagaaatgctgttaatatatttggtctgcggcctgtcgattatacagatgatgaaagtatgaaatcgctattgctgctaccagagaagaatgaatcatcctcagctagccactgctcagtaatgaacactgggcagcgtagggatggacctcttgtacttataggcagtgggctgtcttcagaacaacagaaaatgctcagtgagcttgcagtaattcttaaggctaaaaaatatactgagtttgacagtacagtaactcatgttgttgttcctggtgatgcagttcaaagtaccttgaagtgtatgcttgggattctcaatggatgctggattctaaaatttgaatgggtaaaagcatgtctacgaagaaaagtatgtgaacaggaagaaaagtatgaaattcctgaaggtccacgcagaagcaggctcaacagagaacagctgttgccaaagctgtttgatggatgctacttctatttgtggggaaccttcaaacaccatccaaaggacaaccttattaagctcgtcactgcaggtgggggccagatcctcagtagaaagcccaagccagacagtgacgtgactcagaccatcaatacagtcgcataccatgcgagacccgattctgatcagcgcttctgcacacagtatatcatctatgaagatttgtgtaattatcacccagagagggttcggcagggcaaagtctggaaggctccttcgagctggtttatagactgtgtgatgtcctttgagttgcttcctcttgacagctgaatattataccagatgaacatttcaaattgaatttgcacggtttgtgagagcccagtcattgtactgtttttaatgttcacatttttacaaataggtagagtcattcatatttgtctttgaatc

SEQ ID NO: 152 - protein, 777 aa, Homo sapiens
MPDNRQPRNRQPRIRSGNEPRSAPAMEPDGRGAWAHSRAALDRLEKLLRCSRCTNILREPVCLGGCEHIFCSNCVSDCIGTGCPVCYTPAWIQDLKINRQLDSMIQLCSKLRNLLHDNELSDLKEDKPRKSLFNDAGNKKNSIKMWFSPRSKKVRYVVSKASVQTQPAIKKDASAQQDSYEFVSPSPPADVSERAKKASARSGKKQKKKTLAEINQKWNLEAEKEDGEFDSKEESKQKLVSFCSQPSVISSPQINGEIDLLASGSLTESECFGSLTEVSLPLAEQIESPDTKSRNEVVTPEKVCKNYLTSKKSLPLENNGKRGHHNRLSSPISKRCRTSILSTSGDFVKQTVPSENIPLPECSSPPSCKRKVGGTSGRKNSNMSDEFISLSPGTPPSTLSSSSYRQVMSSPSAMKLLPNMAVKRNHRGETLLHIASIKGDIPSVEYLLQNGSDPNVKDHAGWTPLHEACNHGHLKVVELLLQHKALVNTTGYQNDSPLHDAAKNGHVDIVKLLLSYGASRNAVNIFGLRPVDYTDDESMKSLLLLPEKNESSSASHCSVMNTGQRRDGPLVLIGSGLSSEQQKMLSELAVILKAKKYTEFDSTVTHVVVPGDAVQSTLKCMLGILNGCWILKFEWVKACLRRKVCEQEEKYEIPEGPRRSRLNREQLLPKLFDGCYFYLWGTFKHHPKDNLIKLVTAGGGQILSRKPKPDSDVTQTINTVAYHARPDSDQRFCTQYIIYEDLCNYHPERVRQGKVWKAPSSWFIDCVMSFELLPLDS

SEQ ID NO: 153 - DNA, 1235 bp, Homo sapiens
ggggggggggggcacttggcttcaaagctggctcttggaaattgagcggagagcgacgcggttgttgtagctgccgctgcggccgccgcggaataataagccgggatctaccatacccattgactaactatggaagattataccaaaatagagaaaattggagaaggtacctatggagttgtgtataagggtagacacaaaactacaggtcaagtggtagccatgaaaaaaatcagactagaaagtgaagaggaaggggttcctagtactgcaattcgggaaatttctctattaaaggaacttcgtcatccaaatatagtcagtcttcaggatgtgcttatgcaggattccaggttatatctcatctttgagtttctttccatggatctgaagaaatacttggattctatccctcctggtcagtacatggattcttcacttgttaagagttatttataccaaatcctacaggggattgtgttttgtcactctagaagagttcttcacagagacttaaaacctcaaaatctcttgattgatgacaaaggaacaattaaactggctgattttggccttgccagagcttttggaatacctatcagagtatatacacatgaggtagtaacactctggtacagatctccagaagtattgctggggtcagctcgttactcaactccagttgacatttggagtataggcaccatatttgctgaactagcaactaagaaaccacttttccatggggattcagaaattgatcaactcttcaggattttcagagctttgggcactcccaataatgaagtgtggccagaagtggaatctttacaggactataagaatacatttcccaaatggaaaccaggaagcctagcatcccatgtcaaaaacttggatgaaaatggcttggatttgctctcgaaaatgttaatctatgatccagccaaacgaatttctggcaaaatggcactgaatcatccatattttaatgatttggacaatcagattaagaagatgtagctttctgacaaaaagtttccatatgttatgtcaacagatagttgtgtttttattgttaactcttgtctatttttgtcttatatatatttctttgttatcaaacttcagctgtacttcgtcttctaatttcaaaaatataacttaaaaatgtaaatattctatatgaatttaaatataattctgtaaatgtgaaaaaaaaaaaaaaaaaaaaa

SEQ ID NO: 154 - protein, 297 aa, Homo sapiens
MEDYTKIEKIGEGTYGVVYKGRHKTTGQVVAMKKIRLESEEEGVPSTAIREISLLKELRHPNIVSLQDVLMQDSRLYLIFEFLSMDLKKYLDSIPPGQYMDSSLVKSYLYQILQGIVFCHSRRVLHRDLKPQNLLIDDKGTIKLADFGLARAFGIPIRVYTHEVVTLWYRSPEVLLGSARYSTPVDIWSIGTIFAELATKKPLFHGDSEIDQLFRIFRALGTPNNEVWPEVESLQDYKNTFPKWKPGSLASHVKNLDENGLDLLSKMLIYDPAKRISGKMALNHPYFNDLDNQIKKM

SEQ ID NO: 155 - DNA, 948 bp, Homo sapiens
ccattgactaactatggaagattataccaaaatagagaaaattggagaaggtacctatggagttgtgtataagggtagacacaaaactacaggtcaagtggtagccatgaaaaaaatcagactagaaagtgaagaggaaggggttcctagtactgcaattcgggaaatttctctattaaaggaacttcgtcatccaaatatagtcagtcttcaggatgtgcttatgcaggattccaggttatatctcatctttgagtttctttccatggatctgaagaaatacttggattctatccctcctggtcagtacatggattcttcacttgttaaggtagtaacactctggtacagatctccagaagtattgctggggtcagctcgttactcaactccagttgacatttggagtataggcaccatatttgctgaactagcaactaagaaaccacttttccatggggattcagaaattgatcaactcttcaggattttcagagctttgggcactcccaataatgaagtgtggccagaagtggaatctttacaggactataagaatacatttcccaaatggaaaccaggaagcctagcatcccatgtcaaaaacttggatgaaaatggcttggatttgctctcgaaaatgttaatctatgatccagccaaacgaatttctggcaaaatggcactgaatcatccatattttaatgatttggacaatcagattaagaagatgtagctttctgacaaaaagtttccatatgttatgtcaacagatagttgtgtttttattgttaactcttgtctatttttgtcttatatatatttctttgttatcaaacttcagctgtacttcgtcttctaatttcaaaaatataacttaaaaatgtaaatattctatatgaatttaaatataattctgtaaatgtgaaaaaaaaaaaaaaaaaaaaa

SEQ ID NO: 156 - protein, 240 aa, Homo sapiens
MEDYTKIEKIGEGTYGVVYKGRHKTTGQVVAMKKIRLESEEEGVPSTAIREISLLKELRHPNIVSLQDVLMQDSRLYLIFEFLSMDLKKYLDSIPPGQYMDSSLVKVVTLWYRSPEVLLGSARYSTPVDIWSIGTIFAELATKKPLFHGDSEIDQLFRIFRALGTPNNEVWPEVESLQDYKNTFPKWKPGSLASHVKNLDENGLDLLSKMLIYDPAKRISGKMALNHPYFNDLDNQIKKM

SEQ ID NO: 157 - DNA, 3178 bp, Homo sapiens
gatctcttggagacggcgacccaggcatctggggagccacagaagtcgtactcccttaaaccctgctttgctccccctgtggatgtaaccccttagctggcattttgcatctcaattggcttgtgatggaggcgtctttggggattcagatggatgagccaatggctttttctccccagcgtgaccggtttcaggctgaaggctctttaaaaaaaaacgagcagaattttaaacttgcaggtgttaaaaaagatattgagaagctttatgaagctgtaccacagcttagtaatgtgtttaagattgaggacaaaattggagaaggcactttcagctctgtttatttggccacagcacagttacaagtaggacctgaagagaaaattgctctaaaacacttgattccaacaagtcatcctataagaattgcagctgaacttcagtgcctaacagtggctggggggcaagataatgtcatgggagttaaatactgctttaggaagaatgatcatgtagttattgctatgccatatctggagcatgagtcgtttttggacattctgaattctctttcctttcaagaagtacgggaatatatgcttaatctgttcaaagctttgaaacgcattcatcagtttggtattgttcaccgtgatgttaagcccagcaattttttatataataggcgcctgaaaaagtatgccttggtagactttggtttggcccaaggaacccatgatacgaaaatagagcttcttaaatttgtccagtctgaagctcagcaggaaaggtgttcacaaaacaaatcccacataatcacaggaaacaagattccactgagtggcccagtacctaaggagctggatcagcagtccaccacaaaagcttctgttaaaagaccctacacaaatgcacaaattcagattaaacaaggaaaagacggaaaggagggatctgtaggcctttctgtccagcgctctgtttttggagaaagaaatttcaatatacacagctccatttcacatgagagccctgcagtgaaactcatgaagcagtcaaagactgtggatgtactgtctagaaagttagcaacaaaaaagaaggctatttctacgaaagttatgaatagtgctgtgatgaggaaaactgccagttcttgcccagctagcctgacctgtgactgctatgcaacagataaagtttgtagtatttgcctttcaaggcgtcagcaggttgcccctagggcaggtacaccaggattcagagcaccagaggtcttgacaaagtgccccaatcaaactacagcaattgacatgtggtctgcaggtgtcatatttctttctttgcttagtggacgatatccattttataaagcaagtgatgatttaactgctttggcccaaattatgacaattaggggatccagagaaactatccaagctgctaaaacttttgggaaatcaatattatgtagcaaagaagttccagcacaagacttgagaaaactctgtgagagactcaggggtatggattctagcactcccaagttaacaagtgatatacaagggcatgcttctcatcaaccagctatttcagagaagactgaccataaagcttcttgcctcgttcaaacacctccaggacaatactcagggaattcatttaaaaagggggatagtaatagctgtgagcattgttttgatgagtataataccaatttagaaggctggaatgaggtacctgatgaagcttatgacctgcttgataaacttctagatctaaatccagcttcaagaataacagcagaagaagctttgttgcatccattttttaaagatatgagcttgtgataatggatcttcatttaatgtttactgttatgaggtagaataaaaaagaatactttgtaatagccacaagttcttgtttagagaccagagcaggattaataatttattttaacattttagtgtttggtggcacattctaaaatatagattaagaatacttaaaatgcctgggatagttcttgggactaacaacatgatcttctttgagttaaacctacctaagtagattttaggtgggttcctattaggtcagatttttagcttccctaattacctttcactgacatacagaaaaaggagcagttttagttttaattaattaaaattaacagatgtgatgaggattaaatgaatcaaaagacttaatttgtagattcttttagagttatgagctaggtatagtttggggaaactcaacctggtgctggtgctcttaacaattttgtaaataaagaagataatttccttttctagaggtacatattaggccttttatgaacactaaaacaatgaggaaatgttggtcatggggcaaagtatcacttaaaattgaattcatccatttttaaaaaacacttcatgaaagcattctggtgtgaattgccatttttttcttactggcttctcaattttcttccttctctgcccctacctaaaacattctcctcggaaattacatggtgctgaccacaaagtttctggatgttttattaaatattgtacgtgtttacagttgggaatttaaaataatacatacactggttgataaagggaagctgcaggaccaaggtgaagattgatagtccaaatgcttttcttttttgagttgtatattttttcacaccatcttagatataattaggtagctgctgaaaggaaaagtgaatacagaattgacggtattattggagatttttcctctgcgtagagccatccagatctctgtatcctgttttgactaagtcttaggtgggttgggaagacagataatgaagtaggcaaagagaaaaggacccaagatagaggtttatattcagaaatggtatatatcaatgacagcatatcaaacttcctatgggaaaaagtctggtgggtggtcagctgacagatttcccatttagtagtcatagaatacagaaatagtttagggacatgtattcattttgttattttgagcattgataggtcagtatatctacctaatctgtttggtaagtataggatatataaaccattaccattgatctgtcttatgccataatcttaaaaaaaaattgaatgctcttgaatttgtatattcaataaagttatccttttataaaaaaaaa

SEQ ID NO: 158 - protein, 574 aa, Homo sapiens
MEASLGIQMDEPMAFSPQRDRFQAEGSLKKNEQNFKLAGVKKDIEKLYEAVPQLSNVFKIEDKIGEGTFSSVYLATAQLQVGPEEKIALKHLIPTSHPIRIAAELQCLTVAGGQDNVMGVKYCFRKNDHVVIAMPYLEHESFLDILNSLSFQEVREYMLNLFKALKRIHQFGIVHRDVKPSNFLYNRRLKKYALVDFGLAQGTHDTKIELLKFVQSEAQQERCSQNKSHIITGNKIPLSGPVPKELDQQSTTKASVKRPYTNAQIQIKQGKDGKEGSVGLSVQRSVFGERNFNIHSSISHESPAVKLMKQSKTVDVLSRKLATKKKAISTKVMNSAVMRKTASSCPASLTCDCYATDKVCSICLSRRQQVAPRAGTPGFRAPEVLTKCPNQTTAIDMWSAGVIFLSLLSGRYPFYKASDDLTALAQIMTIRGSRETIQAAKTFGKSILCSKEVPAQDLRKLCERLRGMDSSTPKLTSDIQGHASHQPAISEKTDHKASCLVQTPPGQYSGNSFKKGDSNSCEHCFDEYNTNLEGWNEVPDEAYDLLDKLLDLNPASRITAEEALLHPFFKDMSL

SEQ ID NO: 159 - DNA, 2693 bp, Homo sapiens
cggagcgtgggccgccccctcgcacttccgtgtgccgcggcgccggagcccgaggcggctgtagcccacatctcccgagcgacccccggcgcccgcccgccgcgcggaggcccgggccacacctcactggccgcttggcccatcccagtcagcgccgcgccgaaccccgtccgcgcgcgccggggagcggcgcccccgccgctgccgccgcgacccttggcgcctgcccctgcaacgggaggtctgcagggaactggccaggcaagggggcaggcccgtttctcctggtggttggtgcgttgtagcagcagcgggagccaggactaaggacaagcaggagctgggagccccagccccactgcaggccccaccatggcgccgttcctgcgcatcgccttcaactcctatgagctgggctccctgcaggccgaggacgaggcgaaccagcccttctgtgccgtgaagatgaaggaggcgctcagcacagagcgtgggaaaacactggtgcagaagaagccgaccatgtatcctgagtggaagtcgacgttcgacgcccacatctatgaggggcgcgtcatccagattgtgctaatgcgggcagcagaggagccagtgtctgaggtgaccgtgggtgtgtcggtgctggccgagcgctgcaagaagaacaatggcaaggctgagttctggctggacctgcagcctcaggccaaggtgttgatgtctgttcagtatttcctggaggacgtggattgcaaacagtctatgcgcagtgaggacgaggccaagttcccaacgatgaaccgccgcggagccatcaaacaggccaaaatccactacatcaagaaccatgagtttatcgccaccttctttgggcaacccaccttctgttctgtgtgcaaagactttgtctggggcctcaacaagcaaggctacaaatgcaggcaatgtaacgctgccatccacaagaaatgcatcgacaagatcatcggcagatgcactggcaccgcggccaacagccgggacactatattccagaaagaacgcttcaacatcgacatgccgcaccgcttcaaggttcacaactacatgagccccaccttctgtgaccactgcggcagcctgctctggggactggtgaagcagggattaaagtgtgaagactgcggcatgaatgtgcaccataaatgccgggagaaggtggccaacctctgcggcatcaaccagaagcttttggctgaggccttgaaccaagtcacccagagagcctcccggagatcagactcagcctcctcagagcctgttgggatatatcagggtttcgagaagaagaccggagttgctggggaggacatgcaagacaacagtgggacctacggcaagatctgggagggcagcagcaagtgcaacatcaacaacttcatcttccacaaggtcctgggcaaaggcagcttcgggaaggtgctgcttggagagctgaagggcagaggagagtactttgccatcaaggccctcaagaaggatgtggtcctgatcgacgacgacgtggagtgcaccatggttgagaagcgggtgctgacacttgccgcagagaatccctttctcacccacctcatctgcaccttccagaccaaggaccacctgttctttgtgatggagttcctcaacgggggggacctgatgtaccacatccaggacaaaggccgctttgaactctaccgtgccacgttttatgccgctgagataatgtgtggactgcagtttctacacagcaagggcatcatttacagggacctcaaactggacaatgtgctgttggaccgggatggccacatcaagattgccgactttgggatgtgcaaagagaacatattcggggagagccgggccagcaccttctgcggcacccctgactatatcgcccctgagatcctacagggcctgaagtacacattctctgtggactggtggtctttcggggtccttctgtacgagatgctcattggccagtcccccttccatggtgatgatgaggatgaactcttcgagtccatccgtgtggacacgccacattatccccgctggatcaccaaggagtccaaggacatcctggagaagctctttgaaagggaaccaaccaagaggctgggagtgacgggaaacatcaaaatccaccccttcttcaagaccataaactggactctgctggaaaagcggaggttggagccacccttcaggcccaaagtgaagtcacccagagactacagtaactttgaccaggagttcctgaacgagaaggcgcgcctctcctacagcgacaagaacctcatcgactccatggaccagtctgcattcgctggcttctcctttgtgaaccccaaattcgagcacctcctggaagattgaggttcctggacagatcaggctagccctgccctccacccacacctgcccgctccccacgataagcaccagtgggactgtggtgacttctgctgctggccccgcccctgcccccagagcgtccttggctgccgtctggccgggctctcatggtacttcctctgtgaactgtgtgtgaatctgcttttcctctgccttcggagggaaattgtaaatcctgtgtttcattacttgaatgtagttatctattgaaaatatatattatatacatagaaaaaaaaaaaaaaaaaaaa

SEQ ID NO: 160 - protein, 676 aa, Homo sapiens
MAPFLRIAFNSYELGSLQAEDEANQPFCAVKMKEALSTERGKTLVQKKPTMYPEWKSTFDAHIYEGRVIQIVLMRAAEEPVSEVTVGVSVLAERCKKNNGKAEFWLDLQPQAKVLMSVQYFLEDVDCKQSMRSEDEAKFPTMNRRGAIKQAKIHYIKNHEFIATFFGQPTFCSVCKDFVWGLNKQGYKCRQCNAAIHKKCIDKIIGRCTGTAANSRDTIFQKERFNIDMPHRFKVHNYMSPTFCDHCGSLLWGLVKQGLKCEDCGMNVHHKCREKVANLCGINQKLLAEALNQVTQRASRRSDSASSEPVGIYQGFEKKTGVAGEDMQDNSGTYGKIWEGSSKCNINNFIFHKVLGKGSFGKVLLGELKGRGEYSAIKALKKDVVLIDDDVECTMVEKRVLTLAAENPFLTHLICTFQTKDHLFFVMEFLNGGDLMYHIQDKGRFELYRATFYAAEIMCGLQFLHSKGIIYRDLKLDNVLLDRDGHIKIADFGMCKENIFGESRASTFCGTPDYIAPEILQGLKYTFSVDWWSFGVLLYEMLIGQSPFHGDDEDELFESIRVDTPHYPRWITKESKDILEKLFEREPTKRLGMTGNIKIHPFFKTINWTLLEKRRLEPPFRPKVKSPRDYSNFDQEFLNEKARLSYSDKNLIDSMDQSAFAGFSFVNPKFEHLLED

SEQ ID NO: 161 - DNA, 2090 bp, Homo sapiens
gttggcgaggagtttcctgtttcccccgcagcgctgagttgaagttgagtgagtcactcgcgcgcacggagcgacgacacccccgcgcgtgcacccgctcgggacaggagccggactcctgtgcagcttccctcggccgccgggggcctccccgcgcctcgccggcctccaggcccctcctggctggcgagcgggcgccacatctggcccgcacatctgcgctgccggcccggcgcggggtccggagagggcgcggcgcggagcgcagccaggggtccgggaaggcgccgtccgtgcgctgggggctcggtctatgacgagcagcggggtctgccatgggtcgggggctgctcaggggcctgtggccgctgcacatcgtcctgtggacgcgtatcgccagcacgatcccaccgcacgttcagaagtcggttaataacgacatgatagtcactgacaacaacggtgcagtcaagtttccacaactgtgtaaattttgtgatgtgagattttccacctgtgacaaccagaaatcctgcatgagcaactgcagcatcacctccatctgtgagaagccacaggaagtctgtgtggctgtatggagaaagaatgacgagaacataacactagagacagtttgccatgaccccaagctcccctaccatgactttattctggaagatgctgcttctccaaagtgcattatgaaggaaaaaaaaaagcctggtgagactttcttcatgtgttcctgtagctctgatgagtgcaatgacaacatcatcttctcagaagaatataacaccagcaatcctgacttgttgctagtcatatttcaagtgacaggcatcagcctcctgccaccactgggagttgccatatctgtcatcatcatcttctactgctaccgcgttaaccggcagcagaagctgagttcaacctgggaaaccggcaagacgcggaagctcatggagttcagcgagcactgtgccatcatcctggaagatgaccgctctgacatcagctccacgtgtgccaacaacatcaaccacaacacagagctgctgcccattgagctggacaccctggtggggaaaggtcgctttgctgaggtctataaggccaagctgaagcagaacacttcagagcagtttgagacagtggcagtcaagatctttccctatgaggagtatgcctcttggaagacagagaaggacatcttctcagacatcaatctgaagcatgagaacatactccagttcctgacggctgaggagcggaagacggagttggggaaacaatactggctgatcaccgccttccacgccaagggcaacctacaggagtacctgacgcggcatgtcatcagctgggaggacctgcgcaagctgggcagctccctcgcccgggggattgctcacctccacagtgatcacactccatgtgggaggcccaagatgcccatcgtgcacagggacctcaagagctccaatatcctcgtgaagaacgacctaacctgctgcctgtgtgactttgggctttccctgcgtctggaccctactctgtctgtggatgacctggctaacagtgggcaggtgggaactgcaagatacatggctccagaagtcctagaatccaggatgaatttggagaatgctgagtccttcaagcagaccgatgtctactccatggctctggtgctctgggaaatgacatctcgctgtaatgcagtgggagaagtaaaagattatgagcctccatttggttccaaggtgcgggagcacccctgtgtcgaaagcatgaaggacaacgtgttgagagatcgagggcgaccagaaattcccagcttctggctcaaccaccagggcatccagatggtgtgtgagacgttgactgagtgctgggaccacgacccagaggcccgtctcacagcccagtgtgtggcagaacgcttcagtgagctggagcatctggacaggctctcggggaggagctgctcggaggagaagattcctgaagacggctccctaaacactaccaaatagctcttatggggcaggctgggcatgtccaaagaggctgcccctctcaccaaa

SEQ ID NO: 162 - protein, 567 aa, Homo sapiens
MGRGLLRGLWPLHIVLWTRIASTIPPHVQKSVNNDMIVTDNNGAVKFPQLCKFCDVRFSTCDNQKSCMSNCSITSICEKPQEVCVAVWRKNDENITLETVCHDPKLPYHDFILEDAASPKCIMKEKKKPGETFFMCSCSSDECNDNIIFSEEYNTSNPDLLLVIFQVTGISLLPPLGVAISVIIIFYCYRVNRQQKLSSTWETGKTRKLMEFSEHCAIILEDDRSDISSTCANNINHNTELLPIELDTLVGKGRFAEVYKAKLKQNTSEQFETVAVKIFPYEEYASWKTEKDIFSDINLKHENILQFLTAEERKTELGKQYWLITAFHAKGNLQEYLTRHVISWEDLRKLGSSLARGIAHLHSDHTPCGRPKMPIVHRDLKSSNILVKNDLTCCLCDFGLSLRLDPTLSVDDLANSGQVGTARYMAPEVLESRMNLENAESFKQTDVYSMALVLWEMTSRCNAVGEVKDYEPPFGSKVREHPCVESMKDNVLRDRGRPEIPSFWLNHQGIQMVCETLTECWDHDPEARLTAQCVAERFSELEHLDRLSGRSCSEEKIPEDGSLNTTK

SEQ ID NO: 163 - DNA, 555 bp, Homo sapiens
acgatgcgcgagtacaaagtggtggtgctgggctcgggcggggtaggcaaatccgccctgaccgtgcagttcgtgaccggcaccttcatcgagaaatacgaccccaccatcgaggacttctaccgcaaggagatcgaggtggattcgtcgccgtcggtgctggagatcctggacacggcgggcaccgagcagttcgcgtccatgcgggacctgtacatcaagaacggccagggcttcatcctcgtctacagcctcgtcaaccagcagagcttccaggacatcaagcccatgcgggaccagatcatccgcgtgaagcggtatgagaaagtgccagtcatcttggttgggaacaaagtggacctggaaagtgagagagaagtatcgtccagcgaaggcagagcccttgctgaagagtggggctgcccctttatggaaacttccgctaagagtaaaacaatggtggacgaactctttgcagaaattgtgaggcagatgaactatgctgctcagcctgacaaagatgacccatgctgttctgcatgtaacatacaatag

SEQ ID NO: 164 - DNA, 3111 bp, Homo sapiens
ggcacgagcggagagccgcgcagggcgcgggccgcgcggggtggggcagccggagcgcaggcccccgatccccggcgggcgcccccgggcccccgcgcgcgccccggcctccgggagactggcgcatgccacggagcgcccctcgggccgccgccgctcctgcccgggcccctgctgctgctgctgtcgcctgcgcctgctgccccaactcggcgcccgacttcttcatggtgtgcggaggtcatgttcgctccttagcaggcaaacgacttttctcctcgcctcctcgccccgcatgttcaggaccaaacgatctgcgctcgtccggcgtctctggaggagccgtgcgcccggcggcgaggacgaggaggagggcgcagggggaggtggaggaggaggcgagctgcggggagaaggggcgacggacagccgagcgcatggggccggtggcggcggcccgggcagggctggatgctgcctgggcaaggcggtgcgaggtgccaaaggtcaccaccatccccacccgccagccgcgggcgccggcgcggccgggggcgccgaggcggatctgaaggcgctcacgcactcggtgctcaagaaactgaaggagcggcagctggagctgctgctccaggccgtggagtcccgcggcgggacgcgcaccgcgtgcctcctgctgcccggccgcctggactgcaggctgggcccgggggcgcccgccggcgcgcagcctgcgcagccgccctcgtcctactcgctccccctcctgctgtgcaaagtgttcaggtggccggatctcaggcattcctcggaagtcaagaggctgtgttgctgtgaatcttacgggaagatcaaccccgagctggtgtgctgcaacccccatcaccttagccgactctgcgaactagagtctcccccccctccttactccagatacccgatggattttctcaaaccaactgcagactgtccagatgctgtgccttcctccgctgaaacagggggaacgaattatctggcccctggggggctttcagattcccaacttcttctggagcctggggatcggtcacactggtgcgtggtggcatactgggaggagaagacgagagtggggaggctctactgtgtccaggagccctctctggatatcttctatgatctacctcaggggaatggcttttgcctcggacagctcaattcggacaacaagagtcagctggtgcagaaggtgcggagcaaaatcggctgcggcatccagctgacgcgggaggtggatggtgtgtgggtgtacaaccgcagcagttaccccatcttcatcaagtccgccacactggacaacccggactccaggacgctgttggtacacaaggtgttccccggtttctccatcaaggctttcgactacgagaaggcgtacagcctgcagcggcccaatgaccacgagtttatgcagcagccgtggacgggctttaccgtgcagatcagctttgtgaagggctggggtcagtgctacacccgccagttcatcagcagctgcccgtgctggctagaggtcatcttcaacagccggtagccgcgtgcggaggggacagagcgtgagctgagcaggccacacttcaaactactttgctgctaatattttcctcctgagtgcttgcttttcatgcaaactctttggtcgttttttttttgtttgttggttggttttcttcttctcgtcctcgtttgtgttctgttttgtttcgctctttgagaaatagcttatgaaaagaattgttgggggtttttttggaagaaggggcaggtatgatcggcaggacaccctgataggaagaggggaagcagaaatccaagcaccaccaaacacagtgtatgaaggggggcggtcatcatttcacttgtcaggagtgtgtgtgagtgtgagtgtgcggctgtgtgtgcacgcgtgtgcaggagcggcagatggggagacaacgtgctctttgttttgtgtctcttatggatgtccccagcagagaggtttgcagtcccaagcggtgtctctcctgccccttggacacgctcagtggggcagaggcagtacctgggcaagctggcggctggggtcccagcagctgccaggagcacggctctgtccccagcctgggaaagcccctgcccctcctctccctcatcaaggacacgggcctgtccacaggcttctgagcagcgagcctgctagtggccgaaccagaaccaattattttcatccttgtcttattcccttcctgccagcccctgccattgtagcgtctttcttttttggccatctgctcctggatctccctgagatgggcttcccaagggctgccggggcagccccctcacagtattgctcacccagtgccctctcccctcagcctctcccctgcctgccctggtgacatcaggtttttcccggacttagaaaaccagctcagcactgcctgctcccatcctgtgtgttaagctctgctattaggccagcaagcggggatgtccctgggagggacatgcttagcagtccccttccctccaagaaggatttggtccgtcataacccaaggtaccatcctaggctgacacctaactcttctttcatttcttctacaactcatacactcgtatgatacttcgacactgttcttagctcaatgagcatgtttagactttaacataagctatttttctaactacaaaggtttaaatgaacaagagaagcattctcattggaaatttagcattgtagtgctttgagagagaaaggactcctgaaaaaaaacctgagatttattaaagaaaaaaatgtattttatgttatatataaatatattattacttgtaaatataaagacgttttataagcatcattatttatgtattgtgcaatgtgtataaacaagaaaaataaagaaaagatgcactttgctttaatataaatgcaaataacaaatgccaaattaaaaaagataaacacaagattggtgttttttcctatgggtgttatcacctagctgaatgtttttctaaaggagtttatgttccattaaacgatttttaaaatgtacacttgaaaaaaaaaaaaaaaaa

SEQ ID NO: 165 - protein, 426 aa, Homo sapiens
MFRTKRSALVRRLWRSRAPGGEDEEEGAGGGGGGGELRGEGATDSRAHGAGGGGPGRAGCCLGKAVRGAKGHHHPHPPAAGAGAAGGAEADLKALTHSVLKKLKERQLELLLQAVESRGGTRTACLLLPGRLDCRLGPGAPAGAQPAQPPSSYSLPLLLCKVFRWPDLRHSSEVKRLCCCESYGKINPELVCCNPHHLSRLCELESPPPPYSRYPMDFLKPTADCPDAVPSSAETGGTNYLAPGGLSDSQLLLEPGDRSHWCVVAYWEEKTRVGRLYCVQEPSLDIFYDLPQGNGFCLGQLNSDNKSQLVQKVRSKIGCGIQLTREVDGVWVYNRSSYPIFIKSATLDNPDSRTLLVHKVFPGFSIKAFDYEKAYSLQRPNDHEFMQQPWTGFTVQISFVKGWGQCYTRQFISSCPCWLEVIFNSR

SEQ ID NO: 166 - DNA, 4534 bp, Homo sapiens
gtcacgagcgtcgaagagacaaagccgcgtcagggggcccggccggggcgggggagcccggggcttgttggtgccccagcccgcgcggagggcccttcggacccgcgcgccgccgctgccgccgccgccgcctcgcaacaggtccgggcggcctcgctctccgctcccctcccccgcatccgcgaccctccggggcacctcagctcggccggggccgcagtctggccacccgcttccatgcggttcgggtccaagatgatgccgatgtttcttaccgtgtatctcagtaacaatgagcagcacttcacagaagttccagttactccagaaacaatatgcagagacgtggtggatctgtgcaaagaacccggcgagagtgattgccatttggctgaagtgtggtgtggctctgtagagatagagtttcatcatgttggccaggatggtctcgatctcctgaccttgtgatccgcctgcctcggcctcccaaagtgctggattacaggtgtgagccaccacgatcagcctctagtgtttaaaaaagaacgtccagttgcggataatgagcgaatgtttgatgttcttcaacgatttggaagtcagaggaacgaagttcgcttcttccttcgtcatgaacgcccccctggcagggacattgtgagtggaccaagatctcaggatccaagtttaaaaagaaatggtgtaaaagttcctggtgaatatcgaagaaaggagaacggtgttaatagtcctaggatggatctgactcttgctgaacttcaggaaatggcatctcgccagcagcaacagattgaagcccagcaacaattgctggcaactaaggaacagcgcttaaagtttttgaaacaacaagatcagcgacaacagcaacaagttgctgagcaggagaaacttaaaaggctaaaagaaatagctgagaatcaggaagctaagctaaaaaaagtgagagcacttaaaggccacgtggaacagaagagactaagcaatgggaaacttgtggaggaaattgaacagatgaataatttgttccagcaaaaacagagggagctcgtcctggctgtgtcaaaagtagaagaactgaccaggcagctagagatgctcaagaacggcaggatcgacagccaccatgacaatcagtctgcagtggctgagcttgatcgcctctataaggagctgcagctaagaaacaaattgaatcaagagcagaatgccaagctacaacaacagagggagtgtttgaataagcgtaattcagaagtggcagtcatggataagcgtgttaatgagctgagggaccggctgtggaagaagaaggcagctctacagcaaaaagaaaatctaccagtttcatctgatggaaatcttccccagcaagccgcgtcagccccaagccgtgtggctgcagtaggtccctatatccagtcatctactatgcctcggatgccctcaaggcctgaattgctggtgaagccagccctgccggatggttccttggtcattcaggcttcagaggggccgatgaaaatacagacactgcccaacatgagatctggggctgcttcacaaactaaaggctctaaaatccatccagttggccctgattggagtccttcaaatgcagatcttttcccaagccaaggctctgcttctgtacctcaaagcactgggaatgctctggatcaagttgatgatggagaggttccgctgagggagaaagagaagaaagtgcgtccgttctcaatgtttgatgcagtagaccagtccaatgccccaccttcctttggtactctgaggaagaaccagagcagtgaagatatcttgcgggatgctcaggttgcaaataaaaatgtggctaaagtaccacctcctgttcctacaaaaccaaaacagattaatttgccttattttggacaaactaatcagccaccttcagacattaagccagacggaagttctcagcagttgtcaacagttgttccgtccatgggaactaaaccaaaaccagcagggcagcagccgagagtgctgctatctcccagcataccttcggttggccaagaccagaccctttctccaggttctaagcaagaaagtccacctgctgctgccgtccggccctttactccccagccttccaaagacaccttacttccacccttcagaaaaccccagaccgtggcagcaagttcaatatattccatgtatacgcaacagcaggcgccaggaaaaaacttccagcaggctgtgcagagcgcgttgaccaagactcataccagagggccacacttttcaagtgtatatggtaagcctgtaattgctgctgcccagaatcaacagcagcacccagagaacatttattccaatagccagggcaagcctggcagtccagaacctgaaacagagcctgtttcttcagttcaggagaaccatgaaaacgaaagaattcctcggccactcagcccaactaaattactgcctttcttatctaatccttaccgaaaccagagtgatgctgacctagaagccttacgaaagaaactgtctaacgcaccaaggcctctaaagaaacgtagttctattacagagccagagggtcctaatgggccaaatattcagaagcttttatatcagaggaccaccatagcggccatggagaccatctctgtcccatcatacccatccaagtcagcttctgtgactgccagctcagaaagcccagtagaaatccagaatccatatttacatgtggagcccgaaaaggaggtggtctctctggttcctgaatcattgtccccagaggatgtggggaatgccagtacagagaacagtgacatgccagctccttctccaggccttgattatgagcctgagggagtcccagacaacagcccaaatctccagaataacccagaagaaccaaatccagaggctccacatgtgcttgatgtgtacctggaggagtaccctccatacccacccccaccatacccatctggggagcctgaagggcccggagaagactcggtgagcatgcgcccgcctgaaatcaccgggcaggtctctctgcctcctggtaaaaggacaaacttgcgtaaaactggctcagagcgtatcgctcatggaatgagggtgaaattcaacccccttgctttactgctagattcgtctttggagggagaatttgaccttgtacagagaattatttatgaggttgatgacccaagcctgcccaatgatgaaggcatcacggctcttcacaatgctgtgtgtgcaggccacacagaaatcgttaagttcctggtacagtttggtgtaaatgtaaatgctgctgatagtgatggatggactccattacattgtgctgcctcatgtaacaacgtccaagtgtgtaagtttttggtggagtcaggagccgctgtgtttgccatgacctacagtgacatgcagactgctgcagataagtgcgaggaaatggaggaaggctacactcagtgctcccaatttctttatggagttcaggagaagatgggcataatgaataaaggagtcatttatgcgctttgggattatgaacctcagaatgatgatgagctgcccatgaaagaaggagactgcatgacaatcatccacagggaagacgaagatgaaatcgaatggtggtgggcgcgccttaatgataaggagggatatgttccacgtaacttgctgggactgtacccaagaattaaaccaagacaaaggagcttggcctgaaacttccacacagaattttagtcaatgaagaattaatctctgttaagaagaagtaatacgattatttttggcaaaaatttcacaagacttattttaatgacaatgtagcttgaaagcgatgaagaatgtctctagaagagaatgaaggattgaagaattcaccattagaggacatttagcgtgatgaaataaagcatctacgtcagcaggccatactgtgttggggcaaaggtgtcccgtgtagcactcagataagtatacagcgacaatcctgttttctacaagaatcctgtctagtaaataggatcatttattgggcagttgggaaatcagctctctgtcctgttgagtgttttcagcagctgctcctaaaccagtcctcctgccagaaaggaccagtgccgtcacatcgctgtctctgattgtccccggcaccagcaggccttggggctcactgaaggctcgaaggcactgcacaccttgtatattgtcagtgaagaacgttagttggttgtcagtgaacaataactttattatatgagtttttgtagcatcttaagaattatacatatgtttgaaatattgaaactaagctacagtaccagtaattagatgtagaatcttgtttgtaggctgaattttaatctgtatttattgtcttttgtatctcagaaattagaaacttgctacagacttacccgtaatatttgtcaagatcatagctgactttaaaaacagttgtaataaactttttgatgct

SEQ ID NO: 167 - protein, 1005 aa, Homo sapiens
MDLTLAELQEMASRQQQQIEAQQQLLATKEQRLKFLKQQDQRQQQQVAEQEKLKRLKEIAENQEAKLKKVRALKGHVEQKRLSNGKLVEEIEQMNNLFQQKQRELVLAVSKVEELTRQLEMLKNGRIDSHHDNQSAVAELDRLYKELQLRNKLNQEQNAKLQQQRECLNKRNSEVAVMDKRVNELRDRLWKKKAALQQKENLPVSSDGNLPQQAASAPSRVAAVGPYIQSSTMPRMPSRPELLVKPALPDGSLVIQASEGPMKIQTLPNMRSGAASQTKGSKIHPVGPDWSPSNADLFPSQGSASVPQSTGNALDQVDDGEVPLREKEKKVRPFSMFDAVDQSNAPPSFGTLRKNQSSEDILRDAQVANKNVAKVPPPVPTKPKQINLPYFGQTNQPPSDIKPDGSSQQLSTVVPSMGTKPKPAGQQPRVLLSPSIPSVGQDQTLSPGSKQESPPAAAVRPFTPQPSKDTLLPPFRKPQTVAASSIYSMYTQQQAPGKNFQQAVQSALTKTHTRGPHFSSVYGKPVIAAAQNQQQHPENIYSNSQGKPGSPEPETEPVSSVQENHENERIPRPLSPTKLLPFLSNPYRNQSDADLEALRKKLSNAPRPLKKRSSITEPEGPNGPNIQKLLYQRTTIAAMETISVPSYPSKSASVTASSESPVEIQNPYLHVEPEKEVVSLVPESLSPEDVGNASTENSDMPAPSPGLDYEPEGVPDNSPNLQNNPEEPNPEAPHVLDVYLEEYPPYPPPPYPSGEPEGPGEDSVSMRPPEITGQVSLPPGKRTNLRKTGSERIAHGMRVKFNPLALLLDSSLEGEFDLVQRIIYEVDDPSLPNDEGITALHNAVCAGHTEIVKFLVQFGVNVNAADSDGWTPLHCAASCNNVQVCKFLVESGAAVFAMTYSDMQTAADKCEEMEEGYTQCSQFLYGVQEKMGIMNKGVIYALWDYEPQNDDELPMKEGDCMTIIHREDEDEIEWWWARLNDKEGYVPRNLLGLYPRIKPRQRSLA

SEQ ID NO: 168 - DNA, 1127 bp, Homo sapiens
cacgggcggggcggggcctgggtccaccggggttctgaggggagactgaggtcctgagccgacagcctcagctccctgccaggccagacccggcagacagatgagggcccaggaggcctggcgggcctgggggcgctacggtgggagaggaagccaggggtacctgcctctgccttccagggccaccgttggccccagctgtgccttgactacgtaacatcttgtcctcacagcccagagcatgttccagatcccagagtttgagccgagtgagcaggaagactccagctctgcagagaggggcctgggccccagccccgcaggggacgggccctcaggctccggcaagcatcatcgccaggccccaggcctcctgtgggacgccagtcaccagcaggagcagccaaccagcagcagccatcatggaggcgctggggctgtggagatccggagtcgccacagctcctaccccgcggggacggaggacgacgaagggatgggggaggagcccagcccctttcggggccgctcgcgctcggcgccccccaacctctgggcagcacagcgctatggccgcgagctccggaggatgagtgacgagtttgtggactcctttaagaagggacttcctcgcccgaagagcgcgggcacagcaacgcagatgcggcaaagctccagctggacgcgagtcttccagtcctggtgggatcggaacttgggcaggggaagctccgccccctcccagtgaccttcgctccacatcccgaaactccacccgttcccactgccctgggcagccatcttgaatatgggcggaagtacttccctcaggcctatgcaaaaagaggatccgtgctgtctcctttggagggagggctgacccagattcccttccggtgcgtgtgaagccacggaaggcttggtcccatcggaagttttgggttttccgcccacagccgccggaagtggctccgtggccccgccctcaggctccgggctttcccccaggcgcctgcgctaagtcgcgagccaggtttaaccgttgcgtcaccgggacccgagcccccgcgatgccctgggggccgtgctcactaccaaatgttaataaagcccgcgtctgtgccgcc

SEQ ID NO: 169 - protein, 168 aa, Homo sapiens
MFQIPEFEPSEQEDSSSAERGLGPSPAGDGPSGSGKHHRQAPGLLWDASHQQEQPTSSSHHGGAGAVEIRSRHSSYPAGTEDDEGMGEEPSPFRGRSRSAPPNLWAAQRYGRELRRMSDEFVDSFKKGLPRPKSAGTATQMRQSSSWTRVFQSWWDRNLGRGSSAPSQ

SEQ ID NO: 170 - DNA, 956 bp, Homo sapiens
gagcccggggtgctggagggaggcggcaggcccgggtcaggtgcctcgagatcgggcttgggcccagagcatgttccagatcccagagtttgagccgagtgagcaggaagactccagctctgcagagaggggcctgggccccagccccgcaggggacgggccctcaggctccggcaagcatcatcgccaggccccaggcctcctgtgggacgccagtcaccagcaggagcagccaaccagcagcagccatcatggaggcgctggggctgtggagatccggagtcgccacagctcctaccccgcggggacggaggacgacgaagggatgggggaggagcccagcccctttcggggccgctcgcgctcggcgccccccaacctctgggcagcacagcgctatggccgcgagctccggaggatgagtgacgagtttgtggactcctttaagaagggacttcctcgcccgaagagcgcgggcacagcaacgcagatgcggcaaagctccagctggacgcgagtcttccagtcctggtgggatcggaacttgggcaggggaagctccgccccctcccagtgaccttcgctccacatcccgaaactccacccgttcccactgccctgggcagccatcttgaatatgggcggaagtacttccctcaggcctatgcaaaaagaggatccgtgctgtctcctttggagggagggctgacccagattcccttccggtgcgtgtgaagccacggaaggcttggtcccatcggaagttttgggttttccgcccacagccgccggaagtggctccgtggccccgccctcaggctccgggctttcccccaggcgcctgcgctaagtcgcgagccaggtttaaccgttgcgtcaccgggacccgagcccccgcgatgccctgggggccgtgctcactaccaaatgttaataaagcccgcgtctgtgccgcc

SEQ ID NO: 171 - DNA, 2964 bp, Homo sapiens
cagagccacgggcgcccgccccgccccgcgccgccccgcgccggctccgcagctcgcgcccgcccgcctgccggcccgcccggcgccgggccatggcgctgctgcgggatgtgtcgctgcaggacccgcgggaccgcttcgagctgctgcagcgcgtgggggccgggacctatggcgacgtctacaaggcccgcgacacggtcacgtccgaactggccgccgtgaagatagtcaagctagacccaggggacgacatcagctccctccagcaggaaatcaccatcctgcgtgagtgccgccaccccaatgtggtggcctacattggcagctacctcaggaatgaccgcttgtggatctgcatggagttctgcggagggggctccctgcaggagatttaccatgccactgggcccctggaggagcggcagattgcctacgtctgccgagaggcactgaaggggctccaccacctgcattctcaggggaagatccacagagacatcaagggagccaaccttctcctcactctccagggagatgtcaaactggctgactttggggtgtcaggcgagctgacagcgtctgtggccaagaggaggtctttcattgggactccctactggatggctcccgaggtggctgctgtggagcgcaaaggtggctacaatgagctatgtgacgtctgggccctgggcatcactgccattgagctgggcgagctgcagccccctctgttccacctgcaccccatgagggccctgatgctcatgtcgaagagcagcttccagccgcccaaactgagagataagactcgctggacccagaatttccaccactttctcaaactggccctgaccaagaatcctaagaagaggccgacagcagagaagctcctgcagcacccgttcacgactcagcagctccctcgggccctcctcacacagctgctggacaaagccagtgaccctcatctggggaccccctcccctgaggactgtgagctggagacctatgacatgtttccagacaccattcactcccgggggcagcacggcccagccgagaggaccccctcggagatccagtttcaccaggtgaaatttggcgccccacgcaggaaggaaactgacccactgaatgagccgtgggaggaagagtggacactactgggaaaggaagagttgagtgggagcctgctgcagtcggtccaggaggccctggaggaaaggagtctgactattcggtcagcctcagaattccaggagctggactccccagacgataccatgggaaccatcaagcgggccccgttcctagggccactccccactgaccctccagcagaggagcctctgtccagtcccccaggaaccctgcccccacctccttcaggccccaacagctccccactgctgcccacggcctgggccaccatgaagcagcgggaggatcctgagaggtcatcctgccacgggctccccccaactcccaaggtgcatatgggcgcctgcttctccaaggtcttcaatggctgccccctgcggatccacgctgctgtcacctggattcaccctgttactcgggaccagttcctggtggtaggggccgaggaaggcatctacacactcaacctgcatgaactgcatgaggatacgctggagaagctgatttcacatcgctgctcctggctctactgcgtgaacaacgtgctgctgtcactctcagggaaatccacgcacatctgggcccatgacctcccaggcctgtttgagcagcggaggctacagcaacaggttcccctctccatccccaccaaccgcctcacccagcgcatcatccccaggcgctttgctctgtccaccaagattcctgacaccaaaggctgcttgcagtgtcgtgtggtgcggaacccctacacgggtgccaccttcctgctggccgccctgcccaccagcctgctcctgctgcagtggtatgagccgctgcagaagtttctgctgctgaagaacttctccagccctctgcccagcccagctgggatgctggagccgctggtgctggatgggaaggagctgccgcaggtgtgtgttggggccgaggggcctgaggggcccggctgccgcgtcctgttccatgtcctgcccctggaggctggcctgacgcccgacatcctcatcccacctgaggggatcccaggctcggcccagcaggtgatccaggtggacagggacacaatcctagtcagctttgaacgctgtgtgaggattgtcaacatgcagggcgagcccacggccacactggcacctgagctgacctttgatttccccatcgagactgtggtgtgcctgcaggacagtgtgctggccttctggagccatgggatgcaaggccgaagcctggataccaatgaggtgacccaggagatcacagatgaaacaaggatcttccgagtgcttggggcccacagagacatcatcctggagagcattcccactgacaacccagaggcgcacagcaacctctacatcctcacgggccaccagagcacctactaagagcagcgggcctgtccaggggctccccgccccaccccacgccttagctgcaggcccttttgggcaaaggggcccatcctagaccagaggagcccaggccctggccctgctggggctgaaggtcagaagtaatcctgagaaatgtttcaggcctggggagggaggggagcccccgacgcctctgcaataactggaccagggggagctgctgtcactcccccatccccgaggcagcccagtccctagtgcccaaggcagggaccctgggcctgggccatccattccattttgttccacatttcctttctactctttctgccaagagcctgcccctgcatttgtcctgggaaacacggtatttaagagagaactatattggtattaaagctggtttgttttaaaaaaaaaa

SEQ ID NO: 172 - protein, 819 aa, Homo sapiens [sequence omitted]

SEQ ID NO: 173 - DNA, 630 bp, Homo sapiens
atggtcgactacctagcaaataagcccaagggtcagaattctttggctttacacaaagtcatcatggtgggcagtggtggcgtgggcaagtcagctctgactctacagttcatgtacgatgagtttgtggaggactatgagcctaccaaagcagacagctatcggaagaaggtagtgctagatggggaggaagtccagatcgatatcttagatacagctgggcaggaggactacgctgcaattagagacaactacttccgaagtggggaggggttcctctgtgttttctctattacagaaatggaatcctttgcagctacagctgacttcagggagcagattttaagagtaaaagaagatgagaatgttccatttctactggttggtaacaaatcagatttagaagataaaagacaggtttctgtagaagaggcaaaaaacagagctgagcagtggaatgttaactacgtggaaacatctgctaaaacacgagctaatgttgacaaggtattttttgatttaatgagagaaattcgagcgagaaagatggaagacagcaaagaaaagaatggaaaaaagaagaggaaaagtttagccaagagaatcagagaaagatgctgcattttataa

SEQ ID NO: 174 - DNA, 1017 bp, Homo sapiens
ggggggctcccccgcaggcggtagcgaaggcagcagcagcggtggcgacatgagcagcggggcggcgtccgggacagggcgggggcggccccggggcgggggacctgggcccggggaccccccgcccagcgagacacacaagctggtggtcgtgggcggcggcggcgtgggcaagagcgcgctgaccatccagttcatccagtcctacttcgtgtctgactacgaccccactattgaggactcctacacgaagatctgcagtgtggatggcatcccagcccggctggacatcctggacaccgcgggccaggaagagttcggggccatgagagagcagtacatgcgtgctggccacggcttcctgctggtgttcgccattaacgaccggcagagtttcaacgaggtgggcaagctcttcacgcagattctgcgggtcaaggaccgcgacgacttccccgttgtgttggtcgggaacaaggcagatctggagtcacagcgccaggtcccccgatcagaagcctctgccttcggcgcctcccaccacgtggcctactttgaggcctcggccaaactgcgtctcaacgtggacgaggcttttgagcagctggtgcgggctgtccggaaataccaggaacaagagctcccaccgagccctcccagtgcccccaggaagaagggcgggggctgcccctgcgtcctcctgtagcccaggcaagagagaagcaaccaccacaagctctcgggactagctgccttcgcaccttgctgtgtgacctgaggccctcactgagcctcaatttcctcatctgggtctcccaggacacatcacatacccacccttacttcctggcctcttctgggctactgccactgtgtgccttctgccaacgcctcctgtccccacctaagcctggtgggggtgaggggctccgggtcactgctgtatataactcccctcccccagaaaaataaatgtcactgccaacgaaaaaaaaaaaaaaaaaaaaaaaaaaaaaa

SEQ ID NO: 175 - protein, 218 aa, Homo sapiens
MSSGAASGTGRGRPRGGGPGPGDPPPSETHKLVVVGGGGVGKSALTIQFIQSYFVSDYDPTIEDSYTKICSVDGIPARLDILDTAGQEEFGAMREQYMRAGHGFLLVFAINDRQSFNEVGKLFTQILRVKDRDDFPVVLVGNKADLESQRQVPRSEASAFGASHHVAYFEASAKLRLNVDEAFEQLVRAVRKYQEQELPPSPPSAPRKKGGGCPCVLL

SEQ ID NO: 176 - DNA, 1231 bp, Homo sapiens
aggtctcagccggtcgtcgcgacgttcgcccgctcgctctgaggctcctgaagccgaaactagctagactttcctccttcccgcctgcctgtagcggcgttgttgccactccgccaccatgttcgaggcgcgcctggtccagggctccatcctcaagaaggtgttggaggcactcaaggacctcatcaacgaggcctgctgggatattagctccagcggtgtaaacctgcagagcatggactcgtcccacgtctctttggtgcagctcaccctgcggtctgagggcttcgacacctaccgctgcgaccgcaacctggccatgggcgtgaacctcaccagtatgtccaaaatactaaaatgcgccggcaatgaagatatcattacactaagggccgaagataacgcggataccttggcgctagtatttgaagcaccaaaccaggagaaagtttcagactatgaaatgaagttgatggatttagatgttgaacaacttggaattccagaacaggagtacagctgtgtagtaaagatgccttctggtgaatttgcacgtatatgccgagatctcagccatattggagatgctgttgtaatttcctgtgcaaaagacggagtgaaattttctgcaagtggagaacttggaaatggaaacattaaattgtcacagacaagtaatgtcgataaagaggaggaagctgttaccatagagatgaatgaaccagttcaactaacttttgcactgaggtacctgaacttctttacaaaagccactccactctcttcaacggtgacactcagtatgtctgcagatgtaccccttgttgtagagtataaaattgcggatatgggacacttaaaatactacttggctcccaagatcgaggatgaagaaggatcttaggcattcttaaaattcaagaaaataaaactaagctctttgagaactgcttctaagatgccagcatatactgaagtcttttctgtcaccaaatttgtacctctaagtacatatgtagatattgttttctgtaaataacctattttttttctctattctctccaatttgtttaaagaataaagtccaaagtctgatctggtctagttaacctagaagtatttttgtctcttagaaatacttgtgatttttataatacaaaagggtcttgactctaaatgcagttttaagaagtgtttttgaatttaaataaagttacttgaatttcaaac

SEQ ID NO: 177 - protein, 261 aa, Homo sapiens
MFEARLVQGSILKKVLEALKDLINEACWDISSSGVNLQSMDSSHVSLVQLTLRSEGFDTYRCDRNLAMGVNLTSMSKILKCAGNEDIITLRAEDNADTLALVFEAPNQEKVSDYEMKLMDLDVEQLGIPEQEYSCVVKMPSGEFARICRDLSHIGDAVVISCAKDGVKFSASGELGNGNIKLSQTSNVDKEEEAVTIEMNEPVQLTFALRYLNFFTKATPLSSTVTLSMSADVPLVVEYKIADMGHLKYYLAPKIEDEEGS

SEQ ID NO: 178 - DNA, 10386 bp, Homo sapiens
  misc_feature (9521)..(9521): n is a, c, g, or t
attgaggactcggaaatgaggtccaagggtagccaaggatggctgcagcttcatatgatcagttgttaaagcaagttgaggcactgaagatggagaactcaaatcttcgacaagagctagaagataattccaatcatcttacaaaactggaaactgaggcatctaatatgaaggaagtacttaaacaactacaaggaagtattgaagatgaagctatggcttcttctggacagattgatttattagagcgtcttaaagagcttaacttagatagcagtaatttccctggagtaaaactgcggtcaaaaatgtccctccgttcttatggaagccgggaaggatctgtatcaagccgttctggagagtgcagtcctgttcctatgggttcatttccaagaagagggtttgtaaatggaagcagagaaagtactggatatttagaagaacttgagaaagagaggtcattgcttcttgctgatcttgacaaagaagaaaaggaaaaagactggtattacgctcaacttcagaatctcactaaaagaatagatagtcttcctttaactgaaaatttttccttacaaacagatatgaccagaaggcaattggaatatgaagcaaggcaaatcagagttgcgatggaagaacaactaggtacctgccaggatatggaaaaacgagcacagcgaagaatagccagaattcagcaaatcgaaaaggacatacttcgtatacgacagcttttacagtcccaagcaacagaagcagagaggtcatctcagaacaagcatgaaaccggctcacatgatgctgagcggcagaatgaaggtcaaggagtgggagaaatcaacatggcaacttctggtaatggtcagggttcaactacacgaatggaccatgaaacagccagtgttttgagttctagtagcacacactctgcacctcgaaggctgacaagtcatctgggaaccaaggtggaaatggtgtattcattgttgtcaatgcttggtactcatgataaggatgatatgtcgcgaactttgctagctatgtctagctcccaagacagctgtatatccatgcgacagtctggatgtcttcctctcctcatccagcttttacatggcaatgacaaagactctgtattgttgggaaattcccggggcagtaaagaggctcgggccagggccagtgcagcactccacaacatcattcactcacagcctgatgacaagagaggcaggcgtgaaatccgagtccttcatcttttggaacagatacgcgcttactgtgaaacctgttgggagtggcaggaagctcatgaaccaggcatggaccaggacaaaaatccaatgccagctcctgttgaacatcagatctgtcctgctgtgtgtgttctaatgaaactttcatttgatgaagagcatagacatgcaatgaatgaactagggggactacaggccattgcagaattattgcaagtggactgtgaaatgtacgggcttactaatgaccactacagtattacactaagacgatatgctggaatggctttgacaaacttgacttttggagatgtagccaacaaggctacgctatgctctatgaaaggctgcatgagagcacttgtggcccaactaaaatctgaaagtgaagacttacagcaggttattgcaagtgttttgaggaatttgtcttggcgagcagatgtaaatagtaaaaagacgttgcgagaagttggaagtgtgaaagcattgatggaatgtgctttagaagttaaaaaggaatcaaccctcaaaagcgtattgagtgccttatggaatttgtcagcacattgcactgagaataaagctgatatatgtgctgtagatggtgcacttgcatttttggttggcactcttacttaccggagccagacaaacactttagccattattgaaagtggaggtgggatattacggaatgtgtccagcttgatagctacaaatgaggaccacaggcaaatcctaagagagaacaactgtctacaaactttattacaacacttaaaatctcatagtttgacaatagtcagtaatgcatgtggaactttgtggaatctctcagcaagaaatcctaaagaccaggaagcattatgggacatgggggcagttagcatgctcaagaacctcattcattcaaagcacaaaatgattgctatgggaagtgctgcagctttaaggaatctcatggcaaataggcctgcgaagtacaaggatgccaatattatgtctcctggctcaagcttgccatctcttcatgttaggaaacaaaaagccctagaagcagaattagatgctcagcacttatcagaaacttttgacaatatagacaatttaagtcccaaggcatctcatcgtagtaagcagagacacaagcaaagtctctatggtgattatgtttttgacaccaatcgacatgatgataataggtcagacaattttaatactggcaacatgactgtcctttcaccatatttgaatactacagtgttacccagctcctcttcatcaagaggaagcttagatagttctcgttctgaaaaagatagaagtttggagagagaacgcggaattggtctaggcaactaccatccagcaacagaaaatccaggaacttcttcaaagcgaggtttgcagatctccaccactgcagcccagattgccaaagtcatggaagaagtgtcagccattcatacctctcaggaagacagaagttctgggtctaccactgaattacattgtgtgacagatgagagaaatgcacttagaagaagctctgctgcccatacacattcaaacacttacaatttcactaagtcggaaaattcaaataggacatgttctatgccttatgccaaattagaatacaagagatcttcaaatgatagtttaaatagtgtcagtagtagtgatggttatggtaaaagaggtcaaatgaaaccctcgattgaatcctattctgaagatgatgaaagtaagttttgcagttatggtcaatacccagccgacctagcccataaaatacatagtgcaaatcatatggatgataatgatggagaactagatacaccaataaattatagtcttaaatattcagatgagcagttgaactctggaaggcaaagtccttcacagaatgaaagatgggcaagacccaaacacataatagaagatgaaataaaacaaagtgagcaaagacaatcaaggaatcaaagtacaacttatcctgtttatactgagagcactgatgataaacacctcaagttccaaccacattttggacagcaggaatgtgtttctccatacaggtcacggggagccaatggttcagaaacaaatcgagtgggttctaatcatggaattaatcaaaatgtaagccagtctttgtgtcaagaagatgactatgaagatgataagcctaccaattatagtgaacgttactctgaagaagaacagcatgaagaagaagagagaccaacaaattatagcataaaatataatgaagagaaacgtcatgtggatcagcctattgattatagtttaaaatatgccacagatattccttcatcacagaaacagtcattttcattctcaaagagttcatctggacaaagcagtaaaaccgaacatatgtcttcaagcagtgagaatacgtccacaccttcatctaatgccaagaggcagaatcagctccatccaagttctgcacagagtagaagtggtcagcctcaaaaggctgccacttgcaaagtttcttctattaaccaagaaacaatacagacttattgtgtagaagatactccaatatgtttttcaagatgtagttcattatcatctttgtcatcagctgaagatgaaataggatgtaatcagacgacacaggaagcagattctgctaataccctgcaaatagcagaaataaaagaaaagattggaactaggtcagctgaagatcctgtgagcgaagttccagcagtgtcacagcaccctagaaccaaatccagcagactgcagggttctagtttatcttcagaatcagccaggcacaaagctgttgaattttcttcaggagcgaaatctccctccaaaagtggtgctcagacacccaaaagtccacctgaacactatgttcaggagaccccactcatgtttagcagatgtacttctgtcagttcacttgatagttttgagagtcgttcgattgccagctccgttcagagtgaaccatgcagtggaatggtaagtggcattataagccccagtgatcttccagatagccctggacaaaccatgccaccaagcagaagtaaaacacctccaccacctcctcaaacagctcaaaccaagcgagaagtacctaaaaataaagcacctactgctgaaaagagagagagtggacctaagcaagctgcagtaaatgctgcagttcagagggtccaggttcttccagatgctgatactttattacattttgccacggaaagtactccagatggattttcttgttcatccagcctgagtgctctgagcctcgatgagccatttatacagaaagatgtggaattaagaataatgcctccagttcaggaaaatgacaatgggaatgaaacagaatcagagcagcctaaagaatcaaatgaaaaccaagagaaagaggcagaaaaaactattgattctgaaaaggacctattagatgattcagatgatgatgatattgaaatactagaagaatgtattatttctgccatgccaacaaagtcatcacgtaaagcaaaaaagccagcccagactgcttcaaaattacctccacctgtggcaaggaaaccaagtcagctgcctgtgtacaaacttctaccatcacaaaacaggttgcaaccccaaaagcatgttagttttacaccgggggatgatatgccacgggtgtattgtgttgaagggacacctataaacttttccacagctacatctctaagtgatctaacaatcgaatcccctccaaatgagttagctgctggagaaggagttagaggaggagcacagtcaggtgaatttgaaaaacgagataccattcctacagaaggcagaagtacagatgaggctcaaggaggaaaaacctcatctgtaaccatacctgaattggatgacaataaagcagaggaaggtgatattcttgcagaatgcattaattctgctatgcccaaagggaaaagtcacaagcctttccgtgtgaaaaagataatggaccaggtccagcaagcatctgcgtcgtcttctgcacccaacaaaaatcagttagatggtaagaaaaagaaaccaacttcaccagtaaaacctataccacaaaatactgaatataggacacgtgtaagaaaaaatgcagactcaaaaaataatttaaatgctgagagagttttctcagacaacaaagattcaaagaaacagaatttgaaaaataattccaaggacttcaatgataagctcccaaataatgaagatagagtcagaggaagttttgcttttgattcacctcatcattacacgcctattgaaggaactccttactgtttttcacgaaatgattctttgagttctctagattttgatgatgatgatgttgacctttccagggaaaaggctgaattaagaaaggcaaaagaaaataaggaatcagaggctaaagttaccagccacacagaactaacctccaaccaacaatcagctaataagacacaagctattgcaaagcagccaataaatcgaggtcagcctaaacccatacttcagaaacaatccacttttccccagtcatccaaagacataccagacagaggggcagcaactgatgaaaagttacagaattttgctattgaaaatactccagtttgcttttctcataattcctctctgagttctctcagtgacattgaccaagaaaacaacaataaagaaaatgaacctatcaaagagactgagccccctgactcacagggagaaccaagtaaacctcaagcatcaggctatgctcctaaatcatttcatgttgaagataccccagtttgtttctcaagaaacagttctctcagttctcttagtattgactctgaagatgacctgttgcaggaatgtataagctccgcaatgccaaaaaagaaaaagccttcaagactcaagggtgataatgaaaaacatagtcccagaaatatgggtggcatattaggtgaagatctgacacttgatttgaaagatatacagagaccagattcagaacatggtctatcccctgattcagaaaattttgattggaaagctattcaggaaggtgcaaattccatagtaagtagtttacatcaagctgctgctgctgcatgtttatctagacaagcttcgtctgattcagattccatcctttccctgaaatcaggaatctctctgggatcaccatttcatcttacacctgatcaagaagaaaaaccctttacaagtaataaaggcccacgaattctaaaaccaggggagaaaagtacattggaaactaaaaagatagaatctgaaagtaaaggaatcaaaggaggaaaaaaagtttataaaagtttgattactggaaaagttcgatctaattcagaaatttcaggccaaatgaaacagccccttcaagcaaacatgccttcaatctctcgaggcaggacaatgattcatattccaggagttcgaaatagctcctcaagtacaagtcctgtttctaaaaaaggcccaccccttaagactccagcctccaaaagccctagtgaaggtcaaacagccaccacttctcctagaggagccaagccatctgtgaaatcagaattaagccctgttgccaggcagacatcccaaataggtgggtcaagtaaagcaccttctagatcaggatctagagattcgaccccttcaagacctgcccagcaaccattaagtagacctatacagtctcctggccgaaactcaatttcccctggtagaaatggaataagtcctcctaacaaattatctcaacttccaaggacatcatcccctagtactgcttcaactaagtcctcaggttctggaaaaatgtcatatacatctccaggtagacagatgagccaacagaaccttaccaaacaaacaggtttatccaagaatgccagtagtattccaagaagtgagtctgcctccaaaggactaaatcagatgaataatggtaatggagccaataaaaaggtagaactttctagaatgtcttcaactaaatcaagtggaagtgaatctgatagatcagaaagacctgtattagtacgccagtcaactttcatcaaagaagctccaagcccaaccttaagaagaaaattggaggaatctgcttcatttgaatctctttctccatcatctagaccagcttctcccactaggtcccaggcacaaactccagttttaagtccttcccttcctgatatgtctctatccacacattcgtctgttcaggctggtggatggcgaaaactcccacctaatctcagtcccactatagagtataatgatggaagaccagcaaagcgccatgatattgcacggtctcattctgaaagtccttctagacttccaatcaataggtcaggaacctggaaacgtgagcacagcaaacattcatcatcccttcctcgagtaagcacttggagaagaactggaagttcatcttcaattctttctgcttcatcagaatccagtgaaaaagcaaaaagtgaggatgaaaaacatgtgaactctatttcaggaaccaaacaaagtaaagaaaaccaagtatccgcaaaaggaacatggagaaaaataaaagaaaatgaattttctcccacaaatagtacttctcagaccgtttcctcaggtgctacaaatggtgctgaatcaaagactctaatttatcaaatggcacctgctgtttctaaaacagaggatgtttgggtgagaattgaggactgtcccattaacaatcctagatctggaagatctcccacaggtaatactcccccggtgattgacagtgtttcagaaaaggcaaatccaaacattaaagattcaaaagataatcaggcaaaacaaaatgtgggtaatggcagtgttcccatgcgtaccgtgggtttggaaaatcgcctgaactcctttattcaggtggatgcccctgaccaaaaaggaactgagataaaaccaggacaaaataatcctgtccctgtatcagagactaatgaaagttctatagtggaacgtaccccattcagttctagcagctcaagcaaacacagttcacctagtgggactgttgctgccagagtgactccttttaattacaacccaagccctaggaaaagcagcgcagatagcacttcagctcggccatctcagatcccaactccagtgaataacaacacaaagaagcgagattccaaaactgacagcacagaatccagtggaacccaaagtcctaagcgccattctgggtcttaccttgtgacatctgtttaaaagagaggaagaatgaaactaagaaaattctatgttaattacaactgctatatagacattttgtttcaaatgaaactttaaaagactgaaaaattttgtaaataggtttgattcttgttagagggtttttgttctggaagccatatttgatagtatactttgtcttcactggtcttattttgggaggcactcttgatggttaggaaaaaaatagtaaagccaagtatgtttgtacagtatgttttacatgtatttaaagtagcatcccatcccaacttcctttaattattgcttgtcttaaaataatgaacactacagatagaaaatatgatatattgctgttatcaatcatttctagattataaactgactaaacttacatcagggaaaaattggtatttatgcaaaaaaaaatgtttttgtccttgtgagtccatctaacatcataattaatcatgtggctgtgaaattcacagtaatatggttcccgatgaacaagctttacccagcctgtttgctttactgcatgaatgaaactgatggttcaatttcagaagtaatgattaacagttatgtggtcacatgatgtgcatagagatagctacagtgtaataatttacactattttgtgctccaaacaaaacaaaaatctgtgtaactgtaaaacattgaatgaaactattttacctgaactagattttatctgaaagtaggtagaatttttgctatgctgtaatttgttgtatattctggtatttgaggtgagatggctgctcttttattaatgagacatgaattgtgtctcaacagaaactaaatgaacatttcagaataaattattgctgtatgtaaactgttactgaaattggtatttgtttgaagggtcttgtttcacatttgtattaataattgtttaaaatgcctcttttaaaagcttatataaattttttncttcagcttctatgcattaagagtaaaattcctcttactgtaataaaaacaattgaagaagactgttgccacttaaccattccatgcgttggcacttatctattcctgaaattcttttatgtgattagctcatcttgatttttaacatttttccacttaaacttttttttcttactccactggagctcagtaaaagtaaattcatgtaatagcaatgcaagcagcctagcacagactaagcattgagcataataggcccacataatttcctctttcttaatattatagaaattctgtacttgaaattgattcttagacattgcagtctcttcgaggctttacagtgtaaactgtcttgccccttcatcttcttgttgcaactgggtctgacatgaacactttttatcaccctgtatgttagggcaagatctcagcagtgaagtataatcagcactttgccatgctcagaaaattcaaatcacatggaactttagaggtagatttaatacgattaagatattcagaagtatattttagaatccctgcctgttaaggaaactttatttgtggtaggtacagttctggggtacatgttaagtgtccccttatacagtggagggaagtcttccttcctgaaggaaaataaactgacacttattaactaagataatttacttaatatatcttccctgatttgttttaaaagatcagagggtgactgatgatacatgcatacatatttgttgaataaatgaaaatttatttttagtgataagattcatacactctgtatttggggagagaaaacctttttaagcatggtggggcactcagataggagtgaatacacctacctggtggtcat

SEQ ID NO: 179 - protein, 2843 aa, Homo sapiens
MAAASYDQLLKQVEALKMENSNLRQELEDNSNHLTKLETEASNMKEVLKQLQGSIEDEAMASSGQIDLLERLKELNLDSSNFPGVKLRSKMSLRSYGSREGSVSSRSGECSPVPMGSFPRRGFVNGSRESTGYLEELEKERSLLLADLDKEEKEKDWYYAQLQNLTKRIDSLPLTENFSLQTDMTRRQLEYEARQIRVAMEEQLGTCQDMEKRAQRRIARIQQIEKDILRIRQLLQSQATEAERSSQNKHETGSHDAERQNEGQGVGEINMATSGNGQGSTTRMDHETASVLSSSSTHSAPRRLTSHLGTKVEMVYSLLSMLGTHDKDDMSRTLLAMSSSQDSCISMRQSGCLPLLIQLLHGNDKDSVLLGNSRGSKEARARASAALHNIIHSQPDDKRGRREIRVLHLLEQIRAYCETCWEWQEAHEPGMDQDKNPMPAPVEHQICPAVCVLMKLSFDEEHRHAMNELGGLQAIAELLQVDCEMYGLTNDHYSITLRRYAGMALTNLTFGDVANKATLCSMKGCMRALVAQLKSESEDLQQVIASVLRNLSWRADVNSKKTLREVGSVKALMECALEVKKESTLKSVLSALWNLSAHCTENKADICAVDGALAFLVGTLTYRSQTNTLAIIESGGGILRNVSSLIATNEDHRQILRENNCLQTLLQHLKSHSLTIVSNACGTLWNLSARNPKDQEALWDMGAVSMLKNLIHSKHKMIAMGSAAALRNLMANRPAKYKDANIMSPGSSLPSLHVRKQKALEAELDAQHLSETFDNIDNLSPKASHRSKQRHKQSLYGDYVFDTNRHDDNRSDNFNTGNMTVLSPYLNTTVLPSSSSSRGSLDSSRSEKDRSLERERGIGLGNYHPATENPGTSSKRGLQISTTAAQIAKVMEEVSAIHTSQEDRSSGSTTELHCVTDERNALRRSSAAHTHSNTYNFTKSENSNRTCSMPYAKLEYKRSSNDSLNSVSSSDGYGKRGQMKPSIESYSEDDESKFCSYGQYPADLAHKIHSANHMDDNDGELDTPINYSLKYSDEQLNSGRQSPSQNERWARPKHIIEDEIKQSEQRQSRNQSTTYPVYTESTDDKHLKFQPHFGQQECVSPYRSRGANGSETNRVGSNHGINQNVSQSLCQEDDYEDDKPTNYSERYSEEEQHEEEERPTNYSIKYNEEKRHVDQPIDYSLKYATDIPSSQKQSFSFSKSSSGQSSKTEHMSSSSENTSTPSSNAKRQNQLHPSSAQSRSGQPQKAATCKVSSINQETIQTYCVEDTPICFSRCSSLSSLSSAEDEIGCNQTTQEADSANTLQIAEIKEKIGTRSAEDPVSEVPAVSQHPRTKSSRLQGSSLSSESARHKAVEFSSGAKSPSKSGAQTPKSPPEHYVQETPLMFSRCTSVSSLDSFESRSIASSVQSEPCSGMVSGIISPSDLPDSPGQTMPPSRSKTPPPPPQTAQTKREVPKNKAPTAEKRESGPKQAAVNAAVQRVQVLPDADTLLHFATESTPDGFSCSSSLSALSLDEPFIQKDVELRIMPPVQENDNGNETESEQPKESNENQEKEAEKTIDSEKDLLDDSDDDDIEILEECIISAMPTKSSRKAKKPAQTASKLPPPVARKPSQLPVYKLLPSQNRLQPQKHVSFTPGDDMPRVYCVEGTPINFSTATSLSDLTIESPPNELAAGEGVRGGAQSGEFEKRDTIPTEGRSTDEAQGGKTSSVTIPELDDNKAEEGDILAECINSAMPKGKSHKPFRVKKIMDQVQQASASSSAPNKNQLDGKKKKPTSPVKPIPQNTEYRTRVRKNADSKNNLNAERVFSDNKDSKKQNLKNNSKDFNDKLPNNEDRVRGSFAFDSPHHYTPIEGTPYCFSRNDSLSSLDFDDDDVDLSREKAELRKAKENKESEAKVTSHTELTSNQQSANKTQAIAKQPINRGQPKPILQKQSTFPQSSKDIPDRGAATDEKLQNFAIENTPVCFSHNSSLSSLSDIDQENNNKENEPIKETEPPDSQGEPSKPQASGYAPKSFHVEDTPVCFSRNSSLSSLSIDSEDDLLQECISSAMPKKKKPSRLKGDNEKHSPRNMGGILGEDLTLDLKDIQRPDSEHGLSPDSENFDWKAIQEGANSIVSSLHQAAAAACLSRQASSDSDSILSLKSGISLGSPFHLTPDQEEKPFTSNKGPRILKPGEKSTLETKKIESESKGIKGGKKVYKSLITGKVRSNSEISGQMKQPLQANMPSISRGRTMIHIPGVRNSSSSTSPVSKKGPPLKTPASKSPSEGQTATTSPRGAKPSVKSELSPVARQTSQIGGSSKAPSRSGSRDSTPSRPAQQPLSRPIQSPGRNSISPGRNGISPPNKLSQLPRTSSPSTASTKSSGSGKMSYTSPGRQMSQQNLTKQTGLSKNASSIPRSESASKGLNQMNNGNGANKKVELSRMSSTKSSGSESDRSERPVLVRQSTFIKEAPSPTLRRKLEESASFESLSPSSRPASPTRSQAQTPVLSPSLPDMSLSTHSSVQAGGWRKLPPNLSPTIEYNDGRPAKRHDIARSHSESPSRLPINRSGTWKREHSKHSSSLPRVSTWRRTGSSSSILSASSESSEKAKSEDEKHVNSISGTKQSKENQVSAKGTWRKIKENEFSPTNSTSQTVSSGATNGAESKTLIYQMAPAVSKTEDVWVRIEDCPINNPRSGRSPTGNTPPVIDSVSEKANPNIKDSKDNQAKQNVGNGSVPMRTVGLENRLNSFIQVDAPDQKGTEIKPGQNNPVPVSETNESSIVERTPFSSSSSSKHSSPSGTVAARVTPFNYNPSPRKSSADSTSARPSQIPTPVNNNTKKRDSKTDSTESSGTQSPKRHSGSYLVTSV

SEQ ID NO: 180 - DNA, 2977 bp, Homo sapiens
ccgaatgtgaccgcctcccgctccctcacccgccgcggggaggaggagcgggcgagaagctgccgccgaacgacaggacgttggggcggcctggctccctcaggtttaagaattgtttaagctgcatcaatggagcacatacagggagcttggaagacgatcagcaatggttttggattcaaagatgccgtgtttgatggctccagctgcatctctcctacaatagttcagcagtttggctatcagcgccgggcatcagatgatggcaaactcacagatccttctaagacaagcaacactatccgtgttttcttgccgaacaagcaaagaacagtggtcaatgtgcgaaatggaatgagcttgcatgactgccttatgaaagcactcaaggtgaggggcctgcaaccagagtgctgtgcagtgttcagacttctccacgaacacaaaggtaaaaaagcacgcttagattggaatactgatgctgcgtctttgattggagaagaacttcaagtagatttcctggatcatgttcccctcacaacacacaactttgctcggaagacgttcctgaagcttgccttctgtgacatctgtcagaaattcctgctcaatggatttcgatgtcagacttgtggctacaaatttcatgagcactgtagcaccaaagtacctactatgtgtgtggactggagtaacatcagacaactcttattgtttccaaattccactattggtgatagtggagtcccagcactaccttctttgactatgcgtcgtatgcgagagtctgtttccaggatgcctgttagttctcagcacagatattctacacctcacgccttcacctttaacacctccagtccctcatctgaaggttccctctcccagaggcagaggtcgacatccacacctaatgtccacatggtcagcaccacgctgcctgtggacagcaggatgattgaggatgcaattcgaagtcacagcgaatcagcctcaccttcagccctgtccagtagccccaacaatctgagcccaacaggctggtcacagccgaaaacccccgtgccagcacaaagagagcgggcaccagtatctgggacccaggagaaaaacaaaattaggcctcgtggacagagagattcaagctattattgggaaatagaagccagtgaagtgatgctgtccactcggattgggtcaggctcttttggaactgtttataagggtaaatggcacggagatgttgcagtaaagatcctaaaggttgtcgacccaaccccagagcaattccaggccttcaggaatgaggtggctgttctgcgcaaaacacggcatgtgaacattctgcttttcatggggtacatgacaaaggacaacctggcaattgtgacccagtggtgcgagggcagcagcctctacaaacacctgcatgtccaggagaccaagtttcagatgttccagctaattgacattgcccggcagacggctcagggaatggactatttgcatgcaaagaacatcatccatagagacatgaaatccaacaatatatttctccatgaaggcttaacagtgaaaattggagattttggtttggcaacagtaaagtcacgctggagtggttctcagcaggttgaacaacctactggctctgtcctctggatggccccagaggtgatccgaatgcaggataacaacccattcagtttccagtcggatgtctactcctatggcatcgtattgtatgaactgatgacgggggagcttccttattctcacatcaacaaccgagatcagatcatcttcatggtgggccgaggatatgcctccccagatcttagtaagctatataagaactgccccaaagcaatgaagaggctggtagctgactgtgtgaagaaagtaaaggaagagaggcctctttttccccagatcctgtcttccattgagctgctccaacactctctaccgaagatcaaccggagcgcttccgagccatccttgcatcgggcagcccacactgaggatatcaatgcttgcacgctgaccacgtccccgaggctgcctgtcttctagttgactttgcacctgtcttcaggctgccaggggaggaggagaagccagcaggcaccacttttctgctccctttctccagaggcagaacacatgttttcagagaagctctgctaaggaccttctagactgctcacagggccttaacttcatgttgccttcttttctatccctttgggccctgggagaaggaagccatttgcagtgctggtgtgtcctgctccctccccacattccccatgctcaaggcccagccttctgtagatgcgcaagtggatgttgatggtagtacaaaaagcaggggcccagccccagctgttggctacatgagtatttagaggaagtaaggtagcaggcagtccagccctgatgtggagacacatgggattttggaaatcagcttctggaggaatgcatgtcacaggcgggactttcttcagagagtggtgcagcgccagacattttgcacataaggcaccaaacagcccaggactgccgagactctggccgcccgaaggagcctgctttggtactatggaacttttcttaggggacacgtcctcctttcacagcttctaaggtgtccagtgcattgggatggttttccaggcaaggcactcggccaatccgcatctcagccctctcaggagcagtcttccatcatgctgaattttgtcttccaggagctgcccctatggggcgggccgcagggccagcctgtttctctaacaaacaaacaaacaaacagccttgtttctctagtcacatcatgtgtatacaaggaagccaggaatacaggttttcttgatgatttgggttttaattttgtttttattgcacctgacaaaatacagttatctgatggtccctcaattatgttattttaataaaataaattaaattt

SEQ ID NO: 181 - protein, 648 aa, Homo sapiens [sequence omitted]

SEQ ID NO: 182 - DNA, 2310 bp, Homo sapiens
acttccgtttttgctgggtaggcgacccggacggagggccggcgaggtgcggggtctggtgatgcgagctgcgcctctcggcaagatttcgcgctgcccatcccgggccctttcatcagtaatcggtagtggatcactctgccaagcggcaggaagaattaaggaaacgacaaggagacgctcggctctctcccgcttggctccttgcggcctcctcttcccttcgctccggcccggtgaaactgaacttataatcgtcactggattgtaagtacccgaggcgaagagagctcgctgagccctgattttttgagtgtctttgttccgggagagtttgtgagttgaaagtatctctgctgggctttctgggccgaaaaccgttccgggggagccgccatttgctttcctgttccctagctagctagctagctctctccgcgttgtccggcagcggcacctagaggttgggacttggcattgcatctgatttaatgaacttaagtctgtgaataagcctttgtgttaacgactggtattcggtcacagcatatttagagaaaagacttggagcttaaataaaaactaaggcaaaatagacgcttagctgctgatctacagagaacttcttgtaattaaaagatttcaattcatagcaaactggtgttttaaactattgcagtagctggaactttttagtgtaaccagcatttattggagaagtgaatcacaaggaaataaagatgagtaaaagcaaagatgatgctcctcacgaactggagagccagtttatcttacgtctgcctccagaatatgcctctactgtgagaagggcagtacagtctggtcatgtcaacctcaaggacagactgacaattgagttacatcctgatgggcgtcatggaatcgtcagagtggaccgtgttccattggcctcaaaattagtagacctgccctgtgttatggaaagcttgaaaaccattgataaaaaaactttttacaagacagctgatatctgtcagatgcttgtatccacagttgatggtgatctctatcctcctgtggaggagccagttgctagcactgatcctaaagcaagcaagaaaaaggataaggacaaagagaaaaagtttatctggaaccacggaattactctgcctctaaagaatgtcaggaagagaaggttccggaagacagcaaagaagaaatatattgaatctccagatgttgaaaaagaagtgaaacgattgctgagtacagatgctgaagctgttagtactcggtgggaaataattgccgaagatgaaacaaaggaggcagaaaatcaaggcctggatatctcttctccaggaatgtctggtcacaggcagggccatgactcattagaacatgatgagcttcgggagatattcaatgacctcagcagcagcagtgaggatgaagatgagacccagcatcaagatgaagaagatataaacatcattgacacggaggaagatctggagagacagctacaggacaagctaaatgaatcagatgaacagcaccaggaaaatgaaggaaccaatcagctggttatgggaattcagaagcagattgacaacatgaaaggcaagctccaagagacccaggacagggcaaaacgacaagaggatctcatcatgaaagtggaaaatctggctctcaagaacagatttcaggctgtactggatgagctcaaacaaaaggaagaccgagaaaaggagcaactcagctctttgcaagaggagctagaatcactcctagagaagtaaaaagaactgatatttaatttcagtcttcagactggtcagcattagaaaattcttggctttattgtactgggtattaagaccttgctcttcctagtccttttaatgctgtgtgttctgttaagttctttcatttgtttgtaattttgtttttcagcaaatttatattgttttgctaggtgttcatcctataagaagcaggattgtataggcagaaaaatgattgtaggaaagttgcaggattagcggaatgtatggttcaaccttaattatagcttcattgcaggactttactgtttctccattttctagaagctgctgttgctgctttgtgatgacgtgagatcaataagaagaacctagtctagagacaatgatgctagtttgcatatgttttcctatgcaataattgttttcccagttattcaaagcagctttctatatgtagagatgcaaattattaagttgtttccaatacaataaataaaagcatctgtttttcactttaaaaaaaaaaaaaaaa

SEQ ID NO: 183 - protein, 349 aa, Homo sapiens
MSKSKDDAPHELESQFILRLPPEYASTVRRAVQSGHVNLKDRLTIELHPDGRHGIVRVDRVPLASKLVDLPCVMESLKTIDKKTFYKTADICQMLVSTVDGDLYPPVEEPVASTDPKASKKKDKDKEKKFIWNHGITLPLKNVRKRRFRKTAKKKYIESPDVEKEVKRLLSTDAEAVSTRWEIIAEDETKEAENQGLDISSPGMSGHRQGHDSLEHDELREIFNDLSSSSEDEDETQHQDEEDINIIDTEEDLERQLQDKLNESDEQHQENEGTNQLVMGIQKQIDNMKGKLQETQDRAKRQEDLIMKVENLALKNRFQAVLDELKQKEDREKEQLSSLQEELESLLEK

SEQ ID NO: 184 - DNA, 4238 bp, Homo sapiens
gcgctctcaggcgggctccggcggcagcgacgcgagcgcggcgatggggagcggcggcgtggtccactgtaggtgtgccaagtgtttctgttatcctacaaagcgaagaataaggaggaggccccgaaacctgaccatcttgagtctccccgaagatgtgctctttcacatcctgaaatggctttctgtagaggacatcctggccgtccgagctgtacactcccagctgaaggacctggtggacaaccacgccagtgtgtgggcatgtgccagcttccaggagctgtggccgtctccagggaacctgaagctctttgaaagggctgctgaaaaggggaatttcgaagctgctgtgaagctgggcatagcctacctctacaatgaaggcctgtctgtgtctgatgaggcccgcgcagaagtgaatggcctgaaggcctctcgcttcttcagtctcgctgagcggctgaatgtgggtgccgcacctttcatctggctcttcatccgccctccgtggtcggtgagcggaagctgctgcaaggccgtggttcacgagagcctcagggcagagtgccagctgcagaggactcacaaagcatccatattgcactgcttgggcagagtgctgagtctgttcgaggatgaggagaagcagcagcaggcccatgacctgtttgaggaggctgctcatcagggatgtctgaccagctcctacctcctctgggaaagcgacaggaggacagatgtgtcagatcctgggcgatgcctccacagcttccgaaaactcagggactacgctcgcaaaggctgctgggaagcgcagctgtctttagccaaagcctgtgcaaatgcaaaccagcttggactggaggtgagagcttccagtgagatcgtctgccagctatttcaggcttcccaggctgtcagtaaacaacaagtcttctccgtgcagaagggactcaatgacacaatgaggtacattctgatcgactggctggtggaagttgccaccatgaatgacttcacaagcctgtgcctgcacctgaccgtggagtgtgtggaccggtacctgcggaggaggctggtgccgcggtacaggctccagctgctgggcatcgcctgcatggtcatctgcacccggtttatcagtaaagagatcctgaccatccgggaggccgtatggctcacggacaacacttacaagtacgaggacctggtgagaatgatgggcgagatcgtctccgccttggaagggaagattcgagtccccactgtggtggattacaaggaggtcctgctgacgctagtccctgtggagctgagaacccagcacctgtgcagcttcctctgcgagctctccctgctgcacaccagcctgtccgcctacgccccagcccgcctggctgccgcagccctgctcctggccagactgacgcacgggcagacacagccctggaccactcagctgtgggacctcaccggattctcctatgaagacctcattccctgcgtcttgagcctccataagaagtgcttccatgatgacgcccccaaggactacaggcaagtctctctgaccgccgtgaagcagcggtttgaggacaagcgctatggagaaatcagccaggaagaggtgctgagctacagccagttgtgtgctgcattaggagtgacacaagacagccccgaccccccgactttcctcagcacaggggagatccacgccttcctcagctctccctcggggcggagaaccaaacggaagcgggagaacagcctccaggaagacagaggcagcttcgttaccacccccactgcggagctgtccagccaggaggagaccgtgctgggcagcttcctcgactggagcctggactgctgctctggctatgaaggcgaccaggagagtgagggcgagaaggagggcgacgtgacagctcccagcggcatcctcgatgtcaccgtggtctacctgaacccagaacagcattgctgccaggaatccagtgatgaggaggcttgtccagaggcaaagggaccccaggacccacaggcactggcgctggacacccagatccctgcaacccctggacccaaacccctggtccgcaccagccgggagccagggaaggacgtcacgacctcagggtactcctccgtcagcaccgcaagtcccacaagctccgtggacggtggcttgggggccctgccccaacctacctcagtgctgtccctgcacagtgactcgcacacacagccctgccaccatcaggccaggaagtcatgtttacagtgtcgtcccccaagtcccccggagagcagtgttccccagcaacaggtgaagcggataaacctatgcatacacagtgaggaggaggacatgaacctgggccttgtgaggctgtaagtgtgtcagcacatttgccgcagtggatgtgtactgagggggctggaggcgaagggtgggagcatagcataggaacgctgcatagaccatggaggcctttgcgcagagagcagagaggatgacttgcggccaccaagtttctgtctccgcgggagtcccgtgcaagccatcagaatgttgaaatgagggtgaagagctcagatccctctctttggaaagtttagcctggaagcagttggccacactgtgtggagggcacctctctgtcccttccgtgtctcactgtctctggaagcttcagcccatgtgtgtcctggtgttcccagccccaccagagccccgtgccgggagctgacagctttcacgcttaaggcacgtgtgacctgggtagtcagacaccacttgagcccctgcccacatctgctggtttggggcttcagtggggagctgacagctgtgagcacaccactgtcccctcatccacctcggcctgcatggggcacccacttccttctgggtggggcttccatggtaagggggcctgcgtccctgcacactgcgaggactgccttgccacaggcccactccctacgacacgtgactcgttttagagctctgtcccagaggcgttcgtatgtgacccacagatggcgtcaatgtgaacacctctctttgtgctgaatttctgggccattcttttcctgtcttatttctaaatttccttcttccaagatgaaaacaaaagaaaaacttaaaacagaaggtattaaaaaaacaagagattcccaccattatttaggttcacctgcaaaacaaaaatcttactccagcccctcaatgccatcctgacacactttatgcaaaaagaattttcccagataggctagccagaaaaaacttcaagtcctctgtaacatctgaggtgaccaagaggcagaagagcagagcagtcgggggccgtgtcctggctgatcccaactgcagctctgctgtgggggcccgtgggagggaggcagacccctgggctttcctgctggccacggagactctgctcctgcatggaaagggagcctgggagccagcagcccacgcctggggagcctgcctggggccatgtgaccatggcctctccctgggaacgggctgaccacaacacaccctgctgccatccacttctgtttactctgcaaatgtaagaaagaaccacttggccagaagtgtcccccagatgcttttttttttttttttttggagacagttttgctcttgtctccccggctggagtgcagtggcatgatctcaactctcaactcactgtaacctccgcctcccggatactcctgcctcagcctcctgggtagctgggattacaagcacccaaccacgcccagctaatttttgtattttcggtagagacgggatttcaccatgttggccaggctagtctcgaactcatgacctcaagtgatccgcccacttcggtctcccaaagtgctgggattacaggcatgagccacggcgcctggcccccaaatgctcttgaaccggaaacccagggatgggagatgctcactgagctgctgcttttatgtgtgctggtgctatgtgtgttcatgtccgcggcagctgtctttttgctactataagggaattctggccaccctgggtggggtgtggtcggggtgagaacccaagcgttggaactgtagacccgtcctgtcgactgtgtgcccctgggcatgtgtgagcctcagtttcctcatctgtaaggggggcaatgatacctacctcacagggggttgtgaggattaaatgtgaggaggatagtggcaac

SEQ ID NO: 185 - protein, 786 aa, Homo sapiens
MGSGGVVHCRCAKCFCYPTKRRIRRRPRNLTILSLPEDVLFHILKWLSVEDILAVRAVHSQLKDLVDNHASVWACASFQELWPSPGNLKLFERAAEKGNFEAAVKLGIAYLYNEGLSVSDEARAEVNGLKASRFFSLAERLNVGAAPFIWLFIRPPWSVSGSCCKAVVHESLRAECQLQRTHKASILHCLGRVLSLFEDEEKQQQAHDLFEEAAHQGCLTSSYLLWESDRRTDVSDPGRCLHSFRKLRDYARKGCWEAQLSLAKACANANQLGLEVRASSEIVCQLFQASQAVSKQQVFSVQKGLNDTMRYILIDWLVEVATMNDFTSLCLHLTVECVDRYLRRRLVPRYRLQLLGIACMVICTRFISKEILTIREAVWLTDNTYKYEDLVRMMGEIVSALEGKIRVPTVVDYKEVLLTLVPVELRTQHLCSFLCELSLLHTSLSAYAPARLAAAALLLARLTHGQTQPWTTQLWDLTGFSYEDLIPCVLSLHKKCFHDDAPKDYRQVSLTAVKQRFEDKRYGEISQEEVLSYSQLCAALGVTQDSPDPPTFLSTGEIHAFLSSPSGRRTKRKRENSLQEDRGSFVTTPTAELSSQEETVLGSFLDWSLDCCSGYEGDQESEGEKEGDVTAPSGILDVTVVYLNPEQHCCQESSDEEACPEAKGPQDPQALALDTQIPATPGPKPLVRTSREPGKDVTTSGYSSVSTASPTSSVDGGLGALPQPTSVLSLHSDSHTQPCHHQARKSCLQCRPPSPPESSVPQQQVKRINLCIHSEEEDMNLGLVRL

SEQ ID NO: 186 - DNA, 1362 bp, Homo sapiens
ggccgcggcggcggaggcagcagcggcggcggcagtggcggcggcgaaggtggcggcggctcggccagtactcccggcccccgccatttcggactgggagcgagcgcggcgcaggcactgaaggcggcggcggggccagaggctcagcggctcccaggtgcgggagagaggcctgctgaaaatgactgaatataaacttgtggtagttggagctggtggcgtaggcaagagtgccttgacgatacagctaattcagaatcattttgtggacgaatatgatccaacaatagaggattcctacaggaagcaagtagtaattgatggagaaacctgtctcttggatattctcgacacagcaggtcaagaggagtacagtgcaatgagggaccagtacatgaggactggggagggctttctttgtgtatttgccataaataatactaaatcatttgaagatattcaccattatagagaacaaattaaaagagttaaggactctgaagatgtacctatggtcctagtaggaaataaatgtgatttgccttctagaacagtagacacaaaacaggctcaggacttagcaagaagttatggaattccttttattgaaacatcagcaaagacaagacagggtgttgatgatgccttctatacattagttcgagaaattcgaaaacataaagaaaagatgagcaaagatggtaaaaagaagaaaaagaagtcaaagacaaagtgtgtaattatgtaaatacaatttgtacttttttcttaaggcatactagtacaagtggtaatttttgtacattacactaaattattagcatttgttttagcattacctaatttttttcctgctccatgcagactgttagcttttaccttaaatgcttattttaaaatgacagtggaagtttttttttcctcgaagtgccagtattcccagagttttggtttttgaactagcaatgcctgtgaaaaagaaactgaatacctaagatttctgtcttggggtttttggtgcatgcagttgattacttcttatttttcttaccaagtgtgaatgttggtgtgaaacaaattaatgaagcttttgaatcatccctattctgtgttttatctagtcacataaatggattaattactaatttcagttgagaccttctaattggtttttactgaaacattgagggaacacaaatttatgggcttcctgatgatgattcttctaggcatcatgtcctatagtttgtcatccctgatgaatgtaaagttacactgttcacaaaggttttgtctcctttccactgctattagtcatggtcactctccccaaaatattatattttttctataaaaaaaaaa

SEQ ID NO: 187 - protein, 188 aa, Homo sapiens [sequence omitted]

SEQ ID NO: 188 - DNA, 1486 bp, Homo sapiens
ggccgcggcggcggaggcagcagcggcggcggcagtggcggcggcgaaggtggcggcggctcggccagtactcccggcccccgccatttcggactgggagcgagcgcggcgcaggcactgaaggcggcggcggggccagaggctcagcggctcccaggtgcgggagagaggcctgctgaaaatgactgaatataaacttgtggtagttggagctggtggcgtaggcaagagtgccttgacgatacagctaattcagaatcattttgtggacgaatatgatccaacaatagaggattcctacaggaagcaagtagtaattgatggagaaacctgtctcttggatattctcgacacagcaggtcaagaggagtacagtgcaatgagggaccagtacatgaggactggggagggctttctttgtgtatttgccataaataatactaaatcatttgaagatattcaccattatagagaacaaattaaaagagttaaggactctgaagatgtacctatggtcctagtaggaaataaatgtgatttgccttctagaacagtagacacaaaacaggctcaggacttagcaagaagttatggaattccttttattgaaacatcagcaaagacaagacagagagtggaggatgctttttatacattggtgagagagatccgacaatacagattgaaaaaaatcagcaaagaagaaaagactcctggctgtgtgaaaattaaaaaatgcattataatgtaatctgggtgttgatgatgccttctatacattagttcgagaaattcgaaaacataaagaaaagatgagcaaagatggtaaaaagaagaaaaagaagtcaaagacaaagtgtgtaattatgtaaatacaatttgtacttttttcttaaggcatactagtacaagtggtaatttttgtacattacactaaattattagcatttgttttagcattacctaatttttttcctgctccatgcagactgttagcttttaccttaaatgcttattttaaaatgacagtggaagtttttttttcctcgaagtgccagtattcccagagttttggtttttgaactagcaatgcctgtgaaaaagaaactgaatacctaagatttctgtcttggggtttttggtgcatgcagttgattacttcttatttttcttaccaagtgtgaatgttggtgtgaaacaaattaatgaagcttttgaatcatccctattctgtgttttatctagtcacataaatggattaattactaatttcagttgagaccttctaattggtttttactgaaacattgagggaacacaaatttatgggcttcctgatgatgattcttctaggcatcatgtcctatagtttgtcatccctgatgaatgtaaagttacactgttcacaaaggttttgtctcctttccactgctattagtcatggtcactctccccaaaatattatattttttctataaaaaaaaaa

SEQ ID NO: 189 - protein, 189 aa, Homo sapiens [sequence omitted]

SEQ ID NO: 190 - DNA, 1474 bp, Homo sapiens
agccctcccagtttccgcgcgcctctttggcagctggtcacatggtgagggtgggggtgagggggcctctctagcttgcggcctgtgtctatggtcgggccctctgcgtccagctgctccggaccgagctcgggtgtatggggccgtaggaaccggctccggggccccgataacgggccgcccccacagcaccccgggctggcgtgagggtctcccttgatctgagaatggctacctctcgatatgagccagtggctgaaattggtgtcggtgcctatgggacagtgtacaaggcccgtgatccccacagtggccactttgtggccctcaagagtgtgagagtccccaatggaggaggaggtggaggaggccttcccatcagcacagttcgtgaggtggctttactgaggcgactggaggcttttgagcatcccaatgttgtccggctgatggacgtctgtgccacatcccgaactgaccgggagatcaaggtaaccctggtgtttgagcatgtagaccaggacctaaggacatatctggacaaggcacccccaccaggcttgccagccgaaacgatcaaggatctgatgcgccagtttctaagaggcctagatttccttcatgccaattgcatcgttcaccgagatctgaagccagagaacattctggtgacaagtggtggaacagtcaagctggctgactttggcctggccagaatctacagctaccagatggcacttacacccgtggttgttacactctggtaccgagctcccgaagttcttctgcagtccacatatgcaacacctgtggacatgtggagtgttggctgtatctttgcagagatgtttcgtcgaaagcctctcttctgtggaaactctgaagccgaccagttgggcaaaatctttgacctgattgggctgcctccagaggatgactggcctcgagatgtatccctgccccgtggagcctttccccccagagggccccgcccagtgcagtcggtggtacctgagatggaggagtcgggagcacagctgctgctggaaatgctgacttttaacccacacaagcgaatctctgcctttcgagctctgcagcactcttatctacataaggatgaaggtaatccggagtgagcaatggagtggctgccatggaaggaagaaaagctgccatttcccttctggacactgagagggcaatctttgcctttatctctgaggctatggagggtcctcctccatctttctacagagattactttgctgccttaatgacattcccctcccacctctccttttgaggcttctccttctccttcccatttctctacactaaggggtatgttccctcttgtccctttccctacctttatatttggggtccttttttatacaggaaaaacaaaacaaagaaataatggtcttttttttttttttaaaaaaaaaaaaaaaaaaaaaaaaaaaaaaaa

SEQ ID NO: 191 - protein, 303 aa, Homo sapiens
MATSRYEPVAEIGVGAYGTVYKARDPHSGHFVALKSVRVPNGGGGGGGLPISTVREVALLRRLEAFEHPNVVRLMDVCATSRTDREIKVTLVFEHVDQDLRTYLDKAPPPGLPAETIKDLMRQFLRGLDFLHANCIVHRDLKPENILVTSGGTVKLADFGLARIYSYQMALTPVVVTLWYRAPEVLLQSTYATPVDMWSVGCIFAEMFRRKPLFCGNSEADQLGKIFDLIGLPPEDDWPRDVSLPRGAFPPRGPRPVQSVVPEMEESGAQLLLEMLTFNPHKRISAFRALQHSYLHKDEGNPE

SEQ ID NO: 192 - DNA, 1347 bp, Homo sapiens
ggcacgagggagaactagtctcgatttttttttttttttttttctttgttttgtttttcctgtataaaaaaggaccccaaatataaaggtagggaaagggacaagagggaacataccccttagtgtagagaaatgggaaggagaaggagaagcctcaaaaggagaggtgggaggggaatgtcattaaggcagcaaagtaatctctgtagaaagatggaggaggaccctccatagcctcagagataaaggcaaagattgccctctcagtgtccagaagggaaatggcagcttttcttccttccatggcagccactccattgctcactccggattaccttcatccttatgtagataagagtgctgcagagctcgaaaggcagagattcgcttgtgtgggttaaaagtcagcatttccagcagcagctgtgctcccgactcctccatctcaggtaccaccgactgcactgggcggggccctctggggggaaaggctccacggggcagggatacatctcgaggccagtcatcctctggaggcagcccaatcaggtcaaagattttgcccaactggtcggcttcagagtttccacagaagagaggctttcgacgaaacatctctgcaaagatacagccaacactccacatgtccacaggtgttgcatatgtggactgcagaagaacttcgggagctcggtaccagagtgtaacaaccacgggtgtaagtgccatctggtagctgtagattctggccaggccaaagtcagccagcttgactgttccaccacttgtcaccagaatgttctctggcttcagatctcggtgaacgatgcaattggcatgaaggaaatctaggcctcttagaaactggcgcatcagatccttgatcgtttcggctggcaagcctggtgggggtgccttgtccagatatgtccttaggtcctggtctacatgctcaaacaccagggttaccttgatctcccggtcagttcgggatgtggcacagacgtccatcagccggacaacattgggatgctcaaaagcctccagtcgcctcagtaaagccacctcacgaactgtgctgatgggaaggcctcctccacctcctcctccattggggactctcacactcttgagggccacaaagtggccactgtggggatcacgggccttgtacactgtcccataggcaccgacaccaatttcagccactggctcatatcgagaggtagccattctcagatcaagggagaccctcacgccagcccggggtgctgtgggggcggcccgttatcggggccccggagccggttcctacggccccatacacccgagctcggtccggagcag

SEQ ID NO: 193 - protein, 30 aa, Homo sapiens
MSTGVAYVDCRRTSGARYQSVTTTGVSAIW

SEQ ID NO: 194 - DNA, 1122 bp, Homo sapiens
agccctcccagtttccgcgcgcctctttggcagctggtcacatggtgagggtgggggtgagggggcctctctagcttgcggcctgtgtctatggtcgggccctctgcgtccagctgctccggaccgagctcgggtgtatggggccgtaggaaccggctccggggccccgataacgggccgcccccacagcaccccgggctggcgtgagggtctcccttgatctgagaatggctacctctcgatatgagccagtggctgaaattggtgtcggtgcctatgggacagtgtacaaggcccgtgatccccacagtggccactttgtggccctcaagagtgtgagagtccccaatggaggaggaggtggaggaggccttcccatcagcacagttcgtgaggtggctttactgaggcgactggaggcttttgagcatcccaatgttgtccggctgatggacgtctgtgccacatcccgaactgaccgggagatcaagagatgtttcgtcgaaagcctctcttctgtggaaactctgaagccgaccagttgggcaaaatctttgacctgattgggctgcctccagaggatgactggcctcgagatgtatccctgccccgtggagcctttccccccagagggccccgcccagtgcagtcggtggtacctgagatggaggagtcgggagcacagctgctgctggaaatgctgacttttaacccacacaagcgaatctctgcctttcgagctctgcagcactcttatctacataaggatgaaggtaatccggagtgagcaatggagtggctgccatggaaggaagaaaagctgccatttcccttctggacactgagagggcaatctttgcctttatctctgaggctatggagggtcctcctccatctttctacagagattactttgctgccttaatgacattcccctcccacctctccttttgaggcttctccttctccttcccatttctctacactaaggggtatgttccctcttgtccctttccctacctttatatttggggtccttttttatacaggaaaaacaaaacaaagaaataatggtcttttttttttttttaaaaaaaaaaaaaaaaaaaaaaaaaaaaaaaa

SEQ ID NO: 195 - protein, 111 aa, Homo sapiens
MATSRYEPVAEIGVGAYGTVYKARDPHSGHFVALKSVRVPNGGGGGGGLPISTVREVALLRRLEAFEHPNVVRLMDVCATSRTDREIKRCFVESLSSVETLKPTSWAKSLT

SEQ ID NO: 196 - DNA, 1682 bp, Homo sapiens
cggcagccagcctattctttggccgggtcggtgcgagtggtcggctgggcagagtgcacgctgcttggcgccgcaggctgatcccgccgtccactcccgggagcagtgatgttgggcaactctgcgccggggcctgcgacccgcgaggcgggctcggcgctgctagcattgcagcagacggcgctccaagaggaccaggagaatatcaacccggaaaaggcagcgcccgtccaacaaccgcggacccgggccgcgctggcggtactgaagtccgggaacccgcggggtctagcgcagcagcagaggccgaagacgagacgggttgcaccccttaaggatcttcctgtaaatgatgagcatgtcaccgttcctccttggaaagcaaacagtaaacagcctgcgttcaccattcatgtggatgaagcagaaaaagaagctcagaagaagccagctgaatctcaaaaaatagagcgtgaagatgccctggcttttaattcagccattagtttacctggacccagaaaaccattggtccctcttgattatccaatggatggtagttttgagtcaccacatactatggacatgtcaattgtattagaagatgaaaagccagtgagtgttaatgaagtaccagactaccatgaggatattcacacataccttagggaaatggaggttaaatgtaaacctaaagtgggttacatgaagaaacagccagacatcactaacagtatgagagctatcctcgtggactggttagttgaagtaggagaagaatataaactacagaatgagaccctgcatttggctgtgaactacattgataggttcctgtcttccatgtcagtgctgagaggaaaacttcagcttgtgggcactgctgctatgctgttagcctcaaagtttgaagaaatataccccccagaagtagcagagtttgtgtacattacagatgatacctacaccaagaaacaagttctgagaatggagcatctagttttgaaagtccttacttttgacttagctgctccaacagtaaatcagtttcttacccaatactttctgcatcagcagcctgcaaactgcaaagttgaaagtttagcaatgtttttgggagaattaagtttgatagatgctgacccatacctcaagtatttgccatcagttattgctggagctgcctttcatttagcactctacacagtcacgggacaaagctggcctgaatcattaatacgaaagactggatataccctggaaagtcttaagccttgtctcatggaccttcaccagacctacctcaaagcaccacagcatgcacaacagtcaataagagaaaagtacaaaaattcaaagtatcatggtgtttctctcctcaacccaccagagacactaaatctgtaacaatgaaagactgcctttgttttctaagatgtaaatcactcaaagtatatggtgtacagtttttaacttaggttttaattttacaatcatttctgaatacagaagttgtggccaagtacaaattatggtatctattactttttaaatggttttaatttgtatatcttttgtatatgtatctgtcttagatatttggctaattttaagtggttttgttaaagtattaatgatgccagctgtcaggataataaattgatttggaaaacttaaaaaaa

SEQ ID NO: 197 - protein, 432 aa, Homo sapiens
MLGNSAPGPATREAGSALLALQQTALQEDQENINPEKAAPVQQPRTRAALAVLKSGNPRGLAQQQRPKTRRVAPLKDLPVNDEHVTVPPWKANSKQPAFTIHVDEAEKEAQKKPAESQKIEREDALAFNSAISLPGPRKPLVPLDYPMDGSFESPHTMDMSIVLEDEKPVSVNEVPDYHEDIHTYLREMEVKCKPKVGYMKKQPDITNSMRAILVDWLVEVGEEYKLQNETLHLAVNYIDRFLSSMSVLRGKLQLVGTAAMLLASKFEEIYPPEVAEFVYITDDTYTKKQVLRMEHLVLKVLTFDLAAPTVNQFLTQYFLHQQPANCKVESLAMFLGELSLIDADPYLKYLPSVIAGAAFHLALYTVTGQSWPESLIRKTGYTLESLKPCLMDLHQTYLKAPQHAQQSIREKYKNSKYHGVSLLNPPETLNL

SEQ ID NO: 198 - DNA, 1578 bp, Homo sapiens
acgaacaggccaataaggagggagcagtgcggggtttaaatctgaggctaggctggctcttctcggcgtgctgcggcggaacggctgttggtttctgctggttgtaggtccttggctggtcgggcctccggtgttctgcttctccccgctgagctgctgcctggtgaagaggaagccatggcgctccgagtcaccaggaactcgaaaattaatgctgaaaataaggcgaagatcaacatggcaggcgcaaagcgcgttcctacggcccctgctgcaacctccaagcccggactgaggccaagaacagctcttggggacattggtaacaaagtcagtgaacaactgcaggccaaaatgcctatgaagaaggaagcaaaaccttcagctactggaaaagtcattgataaaaaactaccaaaacctcttgaaaaggtacctatgctggtgccagtgccagtgtctgagccagtgccagagccagaacctgagccagaacctgagcctgttaaagaagaaaaactttcgcctgagcctattttggttgatactgcctctccaagcccaatggaaacatctggatgtgcccctgcagaagaagacctgtgtcaggctttctctgatgtaattcttgcagtaaatgatgtggatgcagaagatggagctgatccaaacctttgtagtgaatatgtgaaagatatttatgcttatctgagacaacttgaggaagagcaagcagtcagaccaaaatacctactgggtcgggaagtcactggaaacatgagagccatcctaattgactggctagtacaggttcaaatgaaattcaggttgttgcaggagaccatgtacatgactgtctccattattgatcggttcatgcagaataattgtgtgcccaagaagatgctgcagctggttggtgtcactgccatgtttattgcaagcaaatatgaagaaatgtaccctccagaaattggtgactttgcttttgtgactgacaacacttatactaagcaccaaatcagacagatggaaatgaagattctaagagctttaaactttggtctgggtcggcctctacctttgcacttccttcggagagcatctaagattggagaggttgatgtcgagcaacatactttggccaaatacctgatggaactaactatgttggactatgacatggtgcactttcctccttctcaaattgcagcaggagctttttgcttagcactgaaaattctggataatggtgaatggacaccaactctacaacattacctgtcatatactgaagaatctcttcttccagttatgcagcacctggctaagaatgtagtcatggtaaatcaaggacttacaaagcacatgactgtcaagaacaagtatgccacatcgaagcatgctaagatcagcactctaccacagctgaattctgcactagttcaagatttagccaaggctgtggcaaaggtgtaacttgtaaacttgagttggagtactatatttacaaataaaattggcaccatgtgccatctgtaaaaaaaaaaaaaaaaaaaaaaaaaaaaaaaaaaaaaa

SEQ ID NO: 199 - protein, 433 aa, Homo sapiens
MALRVTRNSKINAENKAKINMAGAKRVPTAPAATSKPGLRPRTALGDIGNKVSEQLQAKMPMKKEAKPSATGKVIDKKLPKPLEKVPMLVPVPVSEPVPEPEPEPEPEPVKEEKLSPEPILVDTASPSPMETSGCAPAEEDLCQAFSDVILAVNDVDAEDGADPNLCSEYVKDIYAYLRQLEEEQAVRPKYLLGREVTGNMRAILIDWLVQVQMKFRLLQETMYMTVSIIDRFMQNNCVPKKMLQLVGVTAMFIASKYEEMYPPEIGDFAFVTDNTYTKHQIRQMEMKILRALNFGLGRPLPLHFLRRASKIGEVDVEQHTLAKYLMELTMLDYDMVHFPPSQIAAGAFCLALKILDNGEWTPTLQHYLSYTEESLLPVMQHLAKNVVMVNQGLTKHMTVKNKYATSKHAKISTLPQLNSALVQDLAKAVAKV

SEQ ID NO: 200 - DNA, 2049 bp, Homo sapiens
gagcgcgcctagccggctcgcgagacttgacccaatgaaagaagcatatggcacttgtgaagataaatgttactcctccctttttaattggaacttctgcttaggacctgtgtatgacgtttcacctgtgatctgttctttcggtagccactgactttgagttacaggaaggtctccgaagatttgtgtcaaatgacgtcaatggccagcttgttttcttttactagtccagcagtaaagcgattgttgggctggaaacaaggtgatgaggaggagaaatgggcagaaaaggcagttgatgctttggtgaagaaactaaaaaagaaaaagggtgccatggaggaactggagaaagccttgagcagtccaggacagccgagtaaatgtgtcactattcccagatctttagatggacgcctgcaggtttctcacagaaaaggcttaccccatgttatatattgtcgtgtttggcgctggccggatttgcagagtcatcatgagctaaagccgttggatatttgtgaatttccttttggatctaagcaaaaagaagtttgtatcaacccataccactataagagagtggagagtccagtcttacctccagtattagtgcctcgtcataatgaattcaatccacaacacagccttctggttcagtttaggaacctgagccacaatgaaccacacatgccacaaaatgccacgtttccagattctttccaccagcccaacaacactccttttcccttatctccaaacagcccttatcccccttctcctgctagcagcacatatcccaactccccagcaagttctggaccaggaagtccatttcagctcccagctgatacgcctcctcctgcctatatgccacctgatgatcagatgggtcaagataattcccagcctatggatacaagcaataatatgattcctcagattatgcccagtatatccagcagggatgttcagcctgttgcctatgaagagcctaaacattggtgttcaatagtctactatgaattaaacaatcgtgttggagaagcttttcatgcatcttctactagtgtgttagtagatggattcacagatccttcaaataacaaaagtagattctgcttgggtttgttgtcaaatgttaatcgtaattcgacaattgaaaacactaggcgacatattggaaaaggtgttcatctgtactatgttggtggagaggtgtatgcggaatgcctcagtgacagcagcatatttgtacagagtaggaactgcaactttcatcatggctttcatcccaccactgtctgtaagattcccagcagctgcagcctcaaaatttttaacaatcaggagtttgctcagcttctggctcaatctgtcaaccatgggtttgaggcagtatatgagctcaccaaaatgtgtaccattcggatgagttttgtcaagggttggggagcagaatatcaccggcaggatgtaaccagcaccccatgttggattgagattcatcttcatgggcctcttcagtggctggataaagtccttactcagatgggctcccctctgaaccccatatcttctgtttcataatgcagaagtattcttttcaattatattgttagtggacttgttttaattttagagaaactttgagtacagatactgtgagcttacattgaaaacagatattacagcttatttttttctacataattgtgaccaatacatttgtattttgtgatgaatctacatttgtttgtattcatgttcatgtgattaactcttagaagtgttgtaaaagatgcagagtaagtattatgccccagttcagaaatttggcattgatcttaaactggaacatgcttttactttattgccctaacaattttttattaaatttatttgaaaatgcatcacatgatgaaaaattatagtagcttataagagggcatatacagtgaagagtaagttttccctcctactctcgatcttccagaagctgtacttttaccagtttctttgtcccaccaacttaaaaaaaaaaaaaaa

SEQ ID NO: 201 - protein, 465 aa, Homo sapiens
MTSMASLFSFTSPAVKRLLGWKQGDEEEKWAEKAVDALVKKLKKKKGAMEELEKALSSPGQPSKCVTIPRSLDGRLQVSHRKGLPHVIYCRVWRWPDLQSHHELKPLDICEFPFGSKQKEVCINPYHYKRVESPVLPPVLVPRHNEFNPQHSLLVQFRNLSHNEPHMPQNATFPDSFHQPNNTPFPLSPNSPYPPSPASSTYPNSPASSGPGSPFQLPADTPPPAYMPPDDQMGQDNSQPMDTSNNMIPQIMPSISSRDVQPVAYEEPKHWCSIVYYELNNRVGEAFHASSTSVLVDGFTDPSNNKSRFCLGLLSNVNRNSTIENTRRHIGKGVHLYYVGGEVYAECLSDSSIFVQSRNCNFHHGFHPTTVCKIPSSCSLKIFNNQEFAQLLAQSVNHGFEAVYELTKMCTIRMSFVKGWGAEYHRQDVTSTPCWIEIHLHGPLQWLDKVLTQMGSPLNPISSVS

SEQ ID NO: 202 - DNA, 1427 bp, Homo sapiens
tgggtgttggaggctttaaggtagctttaaattcgtgttgtcctgggagctcgcccttttcggctggagtcgggctttacggcgccggatggctctggacgtgaagtctcgggcaaagcgttatgagaagctggacttccttggggagggacagtttgccaccgtttacaaggccagagataagaataccaaccaaattgtcgccattaagaaaatcaaacttggacatagatcagaagctaaagatggtataaatagaaccgccttaagagagataaaattattacaggagctaagtcatccaaatataattggtctccttgatgcttttggacataaatctaatattagccttgtctttgattttatggaaactgatctagaggttataataaaggataatagtcttgtgctgacaccatcacacatcaaagcctacatgttgatgactcttcaaggattagaatatttacatcaacattggatcctacatagggatctgaaaccaaacaacttgttgctagatgaaaatggagttctaaaactggcagattttggcctggccaaatcttttgggagccccaatagagcttatacacatcaggttgtaaccaggtggtatcgggcccccgagttactatttggagctaggatgtatggtgtaggtgtggacatgtgggctgttggctgtatattagcagagttacttctaagggttccttttttgccaggagattcagaccttgatcagctaacaagaatatttgaaactttgggcacaccaactgaggaacagtggccggacatgtgtagtcttccagattatgtgacatttaagagtttccctggaatacctttgcatcacatcttcagtgcagcaggagacgacttactagatctcatacaaggcttattcttatttaatccatgtgctcgaattacggccacacaggcactgaaaatgaagtatttcagtaatcggccagggccaacacctggatgtcagctgccaagaccaaactgtccagtggaaaccttaaaggagcaatcaaatccagctttggcaataaaaaggaaaagaacagaggccttagaacaaggaggattgcccaagaaactaattttttaaagagaacactggacaacattttactactgagggaaatagccaaaaaggcaaataatggaaaaatagtaaacattaagtaaatgctgtagaagtgagtttgtaaatattctacacatgtaaaatatgtaaaactatgggttatttttattaaatgtattttaaaataaaaatttaattctggtttttctgattagagtcccaaagtgagaaaagttcaatactcttgaaatgtagaattgaaaatgcattagggaaaacttaataaaaattattaccagttatttggaaaaaaaaaaaa

SEQ ID NO: 203 - protein, 346 aa, Homo sapiens
MALDVKSRAKRYEKLDFLGEGQFATVYKARDKNTNQIVAIKKIKLGHRSEAKDGINRTALREIKLLQELSHPNIIGLLDAFGHKSNISLVFDFMETDLEVIIKDNSLVLTPSHIKAYMLMTLQGLEYLHQHWILHRDLKPNNLLLDENGVLKLADFGLAKSFGSPNRAYTHQVVTRWYRAPELLFGARMYGVGVDMWAVGCILAELLLRVPFLPGDSDLDQLTRIFETLGTPTEEQWPDMCSLPDYVTFKSFPGIPLHHIFSAAGDDLLDLIQGLFLFNPCARITATQALKMKYFSNRPGPTPGCQLPRPNCPVETLKEQSNPALAIKRKRTEALEQGGLPKKLIF

SEQ ID NO: 204 - DNA, 670 bp, Homo sapiens
cggccacgaggcggaatcccttctgctctcccagcgcagcgccgccgcccggcccctccagcttcccggaccatggccaacctggagcgcaccttcatcgccatcaagccggacggcgtgcagcgcggcctggtgggcgagatcatcaagcgcttcgagcagaagggattccgcctcgtggccatgaagttcctccgggcctctgaagaacacctgaagcagcactacattgacctgaaagaccgaccattcttccctgggctggtgaagtacatgaactcagggccggttgtggccatggtctgggaggggctgaacgtggtgaagacaggccgagtgatgcttggggagaccaatccagcagattcaaagccaggcaccattcgtggggacttctgcattcaggttggcaggaacatcattcatggcagtgattcagtaaaaagtgctgaaaaagaaatcagcctatggtttaagcctgaagaactggttgactacaagtcttgtgctcatgactgggtctatgaataagaggtggacacaacagcagtctccttcagcacggcgtggtgtgtccctggacacagctcttcattccattgacttagaggcaacaggattgatcattcttttatagagcatatttgccaataaagcttttggaagccgg

SEQ ID NO: 205 - protein, 152 aa, Homo sapiens
MANLERTFIAIKPDGVQRGLVGEIIKRFEQKGFRLVAMKFLRASEEHLKQHYIDLKDRPFFPGLVKYMNSGPVVAMVWEGLNVVKTGRVMLGETNPADSKPGTIRGDFCIQVGRNIIHGSDSVKSAEKEISLWFKPEELVDYKSCAHDWVYE

SEQ ID NO: 206 - DNA, 732 bp, Homo sapiens
tgctgcgaaccacgtgggtcccgggcgcgtttcgggtgctggcggctgcagccggagttcaaacctaagcagctggaaggaaccatggccaactgtgagcgtaccttcattgcgatcaaaccagatggggtccagcggggtcttgtgggagagattatcaagcgttttgagcagaaaggattccgccttgttggtctgaaattcatgcaagcttccgaagatcttctcaaggaacactacgttgacctgaaggaccgtccattctttgccggcctggtgaaatacatgcactcagggccggtagttgccatggtctgggaggggctgaatgtggtgaagacgggccgagtcatgctcggggagaccaaccctgcagactccaagcctgggaccatccgtggagacttctgcatacaagttggcaggaacattatacatggcagtgattctgtggagagtgcagagaaggagatcggcttgtggtttcaccctgaggaactggtagattacacgagctgtgctcagaactggatctatgaatgacaggagggcagaccacattgcttttcacatccatttcccctccttcccatgggcagaggaccaggctgtaggaaatctagttatttacaggaacttcatcataatttggagggaagctcttggagctgtgagttctccctgtacagtgttaccatccccgaccatctgattaaaatgcttcctcccagc

SEQ ID NO: 207 - protein, 152 aa, Homo sapiens
MANCERTFIAIKPDGVQRGLVGEIIKRFEQKGFRLVGLKFMQASEDLLKEHYVDLKDRPFFAGLVKYMHSGPVVAMVWEGLNVVKTGRVMLGETNPADSKPGTIRGDFCIQVGRNIIHGSDSVESAEKEIGLWFHPEELVDYTSCAQNWIYE

SEQ ID NO: 208 - DNA, 3255 bp, Homo sapiens
ggagcgcaaatggcgtccaaccccgaacggggggagattctgctcacggaactgcagggggattcccgaagtcttccgttttctgagaatgtgagtgctgttcaaaaattagacttttcagatacaatggtgcagcagaaattggatgatatcaaggatcgaattaagagagaaataaggaaagaactgaaaatcaaagaaggagctgaaaatctgaggaaagtcacaacagataaaaaaagtttggcttatgtagacaacattttgaaaaaatcaaataaaaaattagaagaactacatcacaagctgcaggaattaaatgcacatattgttgtatcagatccagaagatattacagattgcccaaggactccagatactccaaataatgaccctcgttgttctactagcaacaatagattgaaggccttacaaaaacaattggatatagaacttaaagtaaaacaaggtgcagagaatatgatacagatgtattcaaatggatcttcaaaggatcggaaactccatggtacagctcagcaactgctccaggacagcaagacaaaaatagaagtcatacgaatgcagattcttcaggcagtccagactaatgaattggcttttgataatgcaaaacctgtgataagtcctcttgaacttcggatggaagaattaaggcatcattttaggatagagtttgcagtagcagaaggtgcaaagaatgtaatgaaattacttggctcaggaaaagtaacagacagaaaagcactttcagaagctcaagcaagatttaatgaatcaagtcagaagttggaccttttaaagtattcattagagcaaagattaaacgaagtccccaagaatcatcccaaaagcaggattattattgaagaactttcacttgttgctgcatcaccaacactaagtccacgtcaaagtatgatatctacgcaaaatcaatatagtacactatccaaaccagcagcactaacaggtactttggaagttcgtcttatgggctgccaagatatcctagagaatgtccctggacggtcaaaagcaacatcagttgcactgcctggttggagtccaagtgaaaccagatcatctttcatgagcagaacgagtaaaagtaaaagcggaagtagtcgaaatcttctaaaaaccgatgacttgtccaatgatgtctgtgctgttttgaagctcgataatactgtggttggccaaactagctggaaacccatttccaatcagtcatgggaccagaagtttacactggaactggacaggtcacgtgaactggaaatttcagtttattggcgtgattggcggtctctgtgtgctgtaaaatttctgaggttagaagattttttagacaaccaacggcatggcatgtgtctctatttggaaccacagggtactttatttgcagaggttaccttttttaatccagttattgaaagaagaccaaaacttcaaagacaaaagaaaattttttcaaagcaacaaggcaaaacatttctcagagctcctcaaatgaatattaatattgccacttggggaaggctagtaagaagagctattcctacagtaaatcattctggcaccttcagccctcaagctcctgtgcctactacagtgccagtggttgatgtacgcatccctcaactagcacctccagctagtgattctacagtaaccaaattggactttgatcttgagcctgaacctcctccagccccaccacgagcttcttctcttggagaaatagatgaatcttctgaattaagagttttggatataccaggacaggattcagagactgtttttgatattcagaatgacagaaatagtatacttccaaaatctcaatctgaatacaagcctgatactcctcagtcaggcctagaatatagtggtattcaagaacttgaggacagaagatctcagcaaaggtttcagtttaatctacaagatttcaggtgttgtgctgtcttgggaagaggacattttggaaaggtgcttttagctgaatataaaaacacaaatgagatgtttgctataaaagccttaaagaaaggagatattgtggctcgagatgaagtagacagcctgatgtgtgaaaaaagaatttttgaaactgtgaatagtgtaaggcatccctttttggtgaacctttttgcatgtttccaaaccaaagagcatgtttgctttgtaatggaatatgctgccggtggggacctaatgatgcacattcatactgatgtcttttctgaaccaagagctgtattttatgctgcttgtgtagttcttgggttgcagtatttacatgaacacaaaattgtttatagagatttgaaattggataacttattgctagatacagagggctttgtgaaaattgctgattttggtctttgcaaagaaggaatgggatatggagatagaacaagcacattttgtggcactcctgaatttcttgccccagaagtattaacagaaacttcttatacaagggctgtagattggtggggccttggcgtgcttatatatgaaatgcttgttggtgagtctccctttcctggtgatgatgaagaggaagtttttgacagtattgtaaatgatgaagtaaggtatccaaggttcttatctacagaagccatttctataatgagaaggctgttaagaagaaatcctgaacggcgccttggggctagcgagaaagatgcagaggatgtaaaaaagcacccatttttccggctaattgattggagcgctctgatggacaaaaaagtaaagccaccatttatacctaccataagaggacgagaagatgttagtaattttgatgatgaatttacctcagaagcacctattctgactccacctcgagaaccaaggatactttcggaagaggagcaggaaatgttcagagattttgactacattgctgattggtgttaagttgctagacactgcgaaaccaagctgactcacaagaagacctcttaaaaatagcaacccttcatttgctctctgtgccaccaatagcttctgagttttttgttgttgttgtttttattgaaacacgtgaagatttgtttaaaagtaccattctaatacttcttcaaaagtggctcctcattgtacttcagcgtaaatatgagcactggaaacagtttcatggagtttaagttgagtgaacatcggccatgaaaatccatcacgaatacttttggatcaatagtctatttt

SEQ ID NO: 209 - protein, 984 aa, Homo sapiens
MASNPERGEILLTELQGDSRSLPFSENVSAVQKLDFSDTMVQQKLDDIKDRIKREIRKELKIKEGAENLRKVTTDKKSLAYVDNILKKSNKKLEELHHKLQELNAHIVVSDPEDITDCPRTPDTPNNDPRCSTSNNRLKALQKQLDIELKVKQGAENMIQMYSNGSSKDRKLHGTAQQLLQDSKTKIEVIRMQILQAVQTNELAFDNAKPVISPLELRMEELRHHFRIEFAVAEGAKNVMKLLGSGKVTDRKALSEAQARFNESSQKLDLLKYSLEQRLNEVPKNHPKSRIIIEELSLVAASPTLSPRQSMISTQNQYSTLSKPAALTGTLEVRLMGCQDILENVPGRSKATSVALPGWSPSETRSSFMSRTSKSKSGSSRNLLKTDDLSNDVCAVLKLDNTVVGQTSWKPISNQSWDQKFTLELDRSRELEISVYWRDWRSLCAVKFLRLEDFLDNQRHGMCLYLEPQGTLFAEVTFFNPVIERRPKLQRQKKIFSKQQGKTFLRAPQMNINIATWGRLVRRAIPTVNHSGTFSPQAPVPTTVPVVDVRIPQLAPPASDSTVTKLDFDLEPEPPPAPPRASSLGEIDESSELRVLDIPGQDSETVFDIQNDRNSILPKSQSEYKPDTPQSGLEYSGIQELEDRRSQQRFQFNLQDFRCCAVLGRGHFGKVLLAEYKNTNEMFAIKALKKGDIVARDEVDSLMCEKRIFETVNSVRHPFLVNLFACFQTKEHVCFVMEYAAGGDLMMHIHTDVFSEPRAVFYAACVVLGLQYLHEHKIVYRDLKLDNLLLDTEGFVKIADFGLCKEGMGYGDRTSTFCGTPEFLAPEVLTETSYTRAVDWWGLGVLIYEMLVGESPFPGDDEEEVFDSIVNDEVRYPRFLSTEAISIMRRLLRRNPERRLGASEKDAEDVKKHPFFRLIDWSALMDKKVKPPFIPTIRGREDVSNFDDEFTSEAPILTPPREPRILSEEEQEMFRDFDYIADWC

SEQ ID NO: 210 - DNA, 4264 bp, Homo sapiens
atttcccgccagcaggagccgcgcggtagatgcggtgcttttaggagctccgtccgacagaacggttgggccttgccggctgtcggtatgtcgcgacagagcaccctgtacagcttcttccccaagtctccggcgctgagtgatgccaacaaggcctcggccagggcctcacgcgaaggcggccgtgccgccgctgcccccggggcctctccttccccaggcggggatgcggcctggagcgaggctgggcctgggcccaggcccttggcgcgatccgcgtcaccgcccaaggcgaagaacctcaacggagggctgcggagatcggtagcgcctgctgcccccaccagttgtgacttctcaccaggagatttggtttgggccaagatggagggttacccctggtggccttgtctggtttacaaccacccctttgatggaacattcatccgcgagaaagggaaatcagtccgtgttcatgtacagttttttgatgacagcccaacaaggggctgggttagcaaaaggcttttaaagccatatacaggttcaaaatcaaaggaagcccagaagggaggtcatttttacagtgcaaagcctgaaatactgagagcaatgcaacgtgcagatgaagccttaaataaagacaagattaagaggcttgaattggcagtttgtgatgagccctcagagccagaagaggaagaagagatggaggtaggcacaacttacgtaacagataagagtgaagaagataatgaaattgagagtgaagaggaagtacagcctaagacacaaggatctaggcgaagtagccgccaaataaaaaaacgaagggtcatatcagattctgagagtgacattggtggctctgatgtggaatttaagccagacactaaggaggaaggaagcagtgatgaaataagcagtggagtgggggatagtgagagtgaaggcctgaacagccctgtcaaagttgctcgaaagcggaagagaatggtgactggaaatggctctcttaaaaggaaaagctctaggaaggaaacgccctcagccaccaaacaagcaactagcatttcatcagaaaccaagaatactttgagagctttctctgcccctcaaaattctgaatcccaagcccacgttagtggaggtggtgatgacagtagtcgccctactgtttggtatcatgaaactttagaatggcttaaggaggaaaagagaagagatgagcacaggaggaggcctgatcaccccgattttgatgcatctacactctatgtgcctgaggatttcctcaattcttgtactcctgggatgaggaagtggtggcagattaagtctcagaactttgatcttgtcatctgttacaaggtggggaaattttatgagctgtaccacatggatgctcttattggagtcagtgaactggggctggtattcatgaaaggcaactgggcccattctggctttcctgaaattgcatttggccgttattcagattccctggtgcagaagggctataaagtagcacgagtggaacagactgagactccagaaatgatggaggcacgatgtagaaagatggcacatatatccaagtatgatagagtggtgaggagggagatctgtaggatcattaccaagggtacacagacttacagtgtgctggaaggtgatccctctgagaactacagtaagtatcttcttagcctcaaagaaaaagaggaagattcttctggccatactcgtgcatatggtgtgtgctttgttgatacttcactgggaaagtttttcataggtcagttttcagatgatcgccattgttcgagatttaggactctagtggcacactatcccccagtacaagttttatttgaaaaaggaaatctctcaaaggaaactaaaacaattctaaagagttcattgtcctgttctcttcaggaaggtctgatacccggctcccagttttgggatgcatccaaaactttgagaactctccttgaggaagaatattttagggaaaagctaagtgatggcattggggtgatgttaccccaggtgcttaaaggtatgacttcagagtctgattccattgggttgacaccaggagagaaaagtgaattggccctctctgctctaggtggttgtgtcttctacctcaaaaaatgccttattgatcaggagcttttatcaatggctaattttgaagaatatattcccttggattctgacacagtcagcactacaagatctggtgctatcttcaccaaagcctatcaacgaatggtgctagatgcagtgacattaaacaacttggagatttttctgaatggaacaaatggttctactgaaggaaccctactagagagggttgatacttgccatactccttttggtaagcggctcctaaagcaatggctttgtgccccactctgtaaccattatgctattaatgatcgtctagatgccatagaagacctcatggttgtgcctgacaaaatctccgaagttgtagagcttctaaagaagcttccagatcttgagaggctactcagtaaaattcataatgttgggtctcccctgaagagtcagaaccacccagacagcagggctataatgtatgaagaaactacatacagcaagaagaagattattgattttctttctgctctggaaggattcaaagtaatgtgtaaaattatagggatcatggaagaagttgctgatggttttaagtctaaaatccttaagcaggtcatctctctgcagacaaaaaatcctgaaggtcgttttcctgatttgactgtagaattgaaccgatgggatacagcctttgaccatgaaaaggctcgaaagactggacttattactcccaaagcaggctttgactctgattatgaccaagctcttgctgacataagagaaaatgaacagagcctcctggaatacctagagaaacagcgcaacagaattggctgtaggaccatagtctattgggggattggtaggaaccgttaccagctggaaattcctgagaatttcaccactcgcaatttgccagaagaatacgagttgaaatctaccaagaagggctgtaaacgatactggaccaaaactattgaaaagaagttggctaatctcataaatgctgaagaacggagggatgtatcattgaaggactgcatgcggcgactgttctataactttgataaaaattacaaggactggcagtctgctgtagagtgtatcgcagtgttggatgttttactgtgcctggctaactatagtcgagggggtgatggtcctatgtgtcgcccagtaattctgttgccggaagataccccccccttcttagagcttaaaggatcacgccatccttgcattacgaagactttttttggagatgattttattcctaatgacattctaataggctgtgaggaagaggagcaggaaaatggcaaagcctattgtgtgcttgttactggaccaaatatggggggcaagtctacgcttatgagacaggctggcttattagctgtaatggcccagatgggttgttacgtccctgctgaagtgtgcaggctcacaccaattgatagagtgtttactagacttggtgcctcagacagaataatgtcaggtgaaagtacattttttgttgaattaagtgaaactgccagcatactcatgcatgcaacagcacattctctggtgcttgtggatgaattaggaagaggtactgcaacatttgatgggacggcaatagcaaatgcagttgttaaagaacttgctgagactataaaatgtcgtacattattttcaactcactaccattcattagtagaagattattctcaaaatgttgctgtgcgcctaggacatatggcatgcatggtagaaaatgaatgtgaagaccccagccaggagactattacgttcctctataaattcattaagggagcttgtcctaaaagctatggctttaatgcagcaaggcttgctaatctcccagaggaagttattcaaaagggacatagaaaagcaagagaatttgagaagatgaatcagtcactacgattatttcgggaagtttgcctggctagtgaaaggtcaactgtagatgctgaagctgtccataaattgctgactttgattaaggaattatagactgactacattggaagctttgagttgacttctgaccaaaggtggtaaattcagacaacattatgatctaataaactttattttttaaaaatga

SEQ ID NO: 211 - protein, 1360 aa, Homo sapiens
MSRQSTLYSFFPKSPALSDANKASARASREGGRAAAAPGASPSPGGDAAWSEAGPGPRPLARSASPPKAKNLNGGLRRSVAPAAPTSCDFSPGDLVWAKMEGYPWWPCLVYNHPFDGTFIREKGKSVRVHVQFFDDSPTRGWVSKRLLKPYTGSKSKEAQKGGHFYSAKPEILRAMQRADEALNKDKIKRLELAVCDEPSEPEEEEEMEVGTTYVTDKSEEDNEIESEEEVQPKTQGSRRSSRQIKKRRVISDSESDIGGSDVEFKPDTKEEGSSDEISSGVGDSESEGLNSPVKVARKRKRMVTGNGSLKRKSSRKETPSATKQATSISSETKNTLRAFSAPQNSESQAHVSGGGDDSSRPTVWYHETLEWLKEEKRRDEHRRRPDHPDFDASTLYVPEDFLNSCTPGMRKWWQIKSQNFDLVICYKVGKFYELYHMDALIGVSELGLVFMKGNWAHSGFPEIAFGRYSDSLVQKGYKVARVEQTETPEMMEARCRKMAHISKYDRVVRREICRIITKGTQTYSVLEGDPSENYSKYLLSLKEKEEDSSGHTRAYGVCFVDTSLGKFFIGQFSDDRHCSRFRTLVAHYPPVQVLFEKGNLSKETKTILKSSLSCSLQEGLIPGSQFWDASKTLRTLLEEEYFREKLSDGIGVMLPQVLKGMTSESDSIGLTPGEKSELALSALGGCVFYLKKCLIDQELLSMANFEEYIPLDSDTVSTTRSGAIFTKAYQRMVLDAVTLNNLEIFLNGTNGSTEGTLLERVDTCHTPFGKRLLKQWLCAPLCNHYAINDRLDAIEDLMVVPDKISEVVELLKKLPDLERLLSKIHNVGSPLKSQNHPDSRAIMYEETTYSKKKIIDFLSALEGFKVMCKIIGIMEEVADGFKSKILKQVISLQTKNPEGRFPDLTVELNRWDTAFDHEKARKTGLITPKAGFDSDYDQALADIRENEQSLLEYLEKQRNRIGCRTIVYWGIGRNRYQLEIPENFTTRNLPEEYELKSTKKGCKRYWTKTIEKKLANLINAEERRDVSLKDCMRRLFYNFDKNYKDWQSAVECIAVLDVLLCLANYSRGGDGPMCRPVILLPEDTPPFLELKGSRHPCITKTFFGDDFIPNDILIGCEEEEQENGKAYCVLVTGPNMGGKSTLMRQAGLLAVMAQMGCYVPAEVCRLTPIDRVFTRLGASDRIMSGESTFFVELSETASILMHATAHSLVLVDELGRGTATFDGTAIANAVVKELAETIKCRTLFSTHYHSLVEDYSQNVAVRLGHMACMVENECEDPSQETITFLYKFIKGACPKSYGFNAARLANLPEEVIQKGHRKAREFEKMNQSLRLFREVCLASERSTVDAEAVHKLLTLIKEL

SEQ ID NO: 212 - DNA, 925 bp, Homo sapiens
ggcacgagccgagatgtctcgctccgtggccttagctgtgctcgcgctactctctctttctggcctggaggctatccagcgtactccaaagattcaggtttactcacgtcatccagcagagaatggaaagtcaaatttcctgaattgctatgtgtctgggtttcatccatccgacattgaagttgacttactgaagaatggagagagaattgaaaaagtggagcattcagacttgtctttcagcaaggactggtctttctatctcttgtactacactgaattcacccccactgaaaaagatgagtatgcctgccgtgtgaaccatgtgactttgtcacagcccaagatagttaagtgggatcgagacatgtaagcagcatcatggaggtttgaagatgccgcatttggattggatgaattccaaattctgcttgcttgctttttaatattgatatgcttatacacttacactttatgcacaaaatgtagggttataataatgttaacatggacatgatcttctttataattctactttgagtgctgtctccatgtttgatgtatctgagcaggttgctccacaggtagctctaggagggctggcaacttagaggtggggagcagagaattctcttatccaacatcaacatcttggtcagatttgaactcttcaatctcttgcactcaaagcttgttaagatagttaagcgtgcataagttaacttccaatttacatactctgcttagaatttgggggaaaatttagaaatataattgacaggattattggaaatttgttataatgaatgaaacattttgtcatataagattcatatttacttcttatacatttgataaagtaaggcatggttgtggttaatctggtttatttttgttccacaagttaaataaatcataaaacttg

SEQ ID NO: 213 - protein, 119 aa, Homo sapiens
MSRSVALAVLALLSLSGLEAIQRTPKIQVYSRHPAENGKSNFLNCYVSGFHPSDIEVDLLKNGERIEKVEHSDLSFSKDWSFYLLYYTEFTPTEKDEYACRVNHVTLSQPKIVKWDRDM

SEQ ID NO: 214 - DNA, 2188 bp, Homo sapiens
ctctttcccttcggtgtgccactgaagatcctggtgtcgccatgggccgccgccccgcccgttgttaccggtattgtaagaacaagccgtacccaaagtctcgcttctgccgaggtgtccctgatgccaagattcgcatttttgacctggggcggaaaaaggcaaaagtggatgagtttccgctttgtggccacatggtgtcagatgaatatgagcagctgtcctctgaagccctggaggctgcccgaatttgtgccaataagtacatggtaaaaagttgtggcaaagatggcttccatatccgggtgcggctccaccccttccacgtcatccgcatcaacaagatgttgtcctgtgctggggctgacaggctccaaacaggcatgcgaggtgcctttggaaagccccagggcactgtggccagggttcacattggccaagttatcatgtccatccgcaccaagctgcagaacaaggagcatgtgattgaggccctgcgcagggccaagttcaagtttcctggccgccagaagatccacatctcaaagaagtggggcttcaccaagttcaatgctgatgaatttgaagacatggtggctgaaaagcggctcatcccagatggctgtggggtcaagtacatccccagtcgtggccctctggacaagtggcgggccctgcactcatgagggcttccaatgtgctgcccccctcttaatactcaccaataaattctacttcctgtccacctatgtctttgtatctacattcttgacggggaaggaacttcctctgggaacctttgggtcattgccctttcacttcagaaacaggttgacaactcagccctgctcatgaggcagcaaaccctgcaaagggctgggactggtggccttatgtcagttgtctactctggagcttgacttggacctccccaggtcctaggcagtaggttgaaaaacactgaagtgcttttcatgaagcacagctgcagcaaagccttgcaatcccaggctggggtcagcctacagttgtgttgcttattacaacacatgcggaccaagaggggcttgtgggctagaggctgaccagcagcgtttatttagcaagggtaggtgtgcatcacattgggcttgttctcacccatctggtttggccattcctccttggtgggaatcatccaggtactgctgaggtcacctgcgatttgccccatttcctatctctagcaacctcctgggccccatgcccccaccccttctagaacctgcattcccagggccttcaccacctgaccaaaggtctaggctaacctttggtcatttgtaacaagacctcggaacagacacgtgtgtggcatggtttggcctggggatcttagatgtctgacctgaactattgtagaacagcgctggcttttgggggagcagcaaaaatgagaggagtgctaggtgggtggcctgagcatctgtatccagggacaggactccaaaggcttttggtcccagagctggggtatgttggccccagcccccagcctgtggctcccaaaaggcctctggttttttgtaatctcagtttacagccatttcttaggtttttaattacctttattttattttgccaaacatacctgggaataccttttattttttttttaccttggggtgatggttccaaaccataaatgtgattatagttaacacatgacccttctagcgtcccagccagtgtttttcctgacctctcttctttggagaggaggatggaagggaggggtccggcatgctgctggcattttgctgtgtcctgcagcccctttccgggacacctgggttcacacagctttttagcttacataactggtgcagattttctgtgtggagatgttgccttgaccagccttggctggactttaccaggcatgcagaagcctgtaccaacacagactacagcacccaggaggtgcgagtgtggctgctcagcggttataacaggcctgactgcattgttcaccggattataatgagccaaaatgtttcccggtgtttgctggtttcagggaaggagtttgatatagcagattaaccaccctccttgtagctattggggcttaatggtttcctggtgattcttaccaatccacaataaacatggcccattggcatatctgcaaaaaaaaaaaaaaaaa

SEQ ID NO: 215 - protein, 214 aa, Homo sapiens
MGRRPARCYRYCKNKPYPKSRFCRGVPDAKIRIFDLGRKKAKVDEFPLCGHMVSDEYEQLSSEALEAARICANKYMVKSCGKDGFHIRVRLHPFHVIRINKMLSCAGADRLQTGMRGAFGKPQGTVARVHIGQVIMSIRTKLQNKEHVIEALRRAKFKFPGRQKIHISKKWGFTKFNADEFEDMVAEKRLIPDGCGVKYIPSRGPLDKWRALHS

SEQ ID NO: 216 - DNA, 2444 bp, Homo sapiens
gcgttctcgggaagctgctgccgtagctgccgccgccgctaccaccgcgttcgggtgtagaatttggaatccctgcgccgcgttaacaatgaagcagagttcgaacgtgccggctttcctcagcaagctgtggacgcttgtggaggaaacccacactaacgagttcatcacctggagccagaatggccaaagttttctggtcttggatgagcaacgatttgcaaaagaaattcttcccaaatatttcaagcacaataatatggcaagctttgtgaggcaactgaatatgtatggtttccgtaaagtagtacatatcgactctggaattgtaaagcaagaaagagatggtcctgtagaatttcagcatccttacttcaaacaaggacaggatgacttgttggagaacattaaaaggaaggtttcatcttcaaaaccagaagaaaataaaattcgtcaggaagatttaacaaaaattataagtagtgctcagaaggttcagataaaacaggaaactattgagtccaggctttctgaattaaaaagtgagaatgagtccctttggaaggaggtgtcagaattacgagcaaagcatgcacaacagcaacaagttattcgaaagattgtccagtttattgttacattggttcaaaataaccaacttgtgagtttaaaacgtaaaaggcctctacttctaaacactaatggagcccaaaagaagaacctgtttcagcacatagtcaaagaaccaactgataatcatcatcataaagttccacacagtaggactgaaggtttaaagccaagggagaggatttcagatgacatcattatttatgatgttactgatgataatgcagatgaagaaaatatcccagttattccagaaactaatgaggatgttatatctgatccctccaactgtagccagtaccctgatattgtcatcgttgaagatgacaatgaagatgagtatgcacctgtcattcagagtggagagcagaatgaaccagccagagaatccctaagttcaggcagtgatggcagcagccctctcatgtctagtgctgtccagctaaatggctcatccagtctgacctcagaagatccagtgaccatgatggattccattttgaatgataacatcaatcttttgggaaaggttgagctgttggattatcttgacagtattgactgcagtttagaggacttccaggccatgctatcaggaagacaatttagcatagacccagatctcctggttgatcttttcactagttctgtgcagatgaatcccacagattacatcaataatacaaaatctgagaataaaggattagaaactaccaagaacaatgtagttcagccagtttcggaagagggaagaaaatctaaatccaaaccagataagcagcttatccagtataccgcctttccacttcttgcattcctcgatgggaaccctgcttcttctgttgaacaggcgagtacaacagcatcatcagaagttttgtcctctgtagataaacccatagaagttgatgagcttctggatagcagcctagacccagaaccaacccaaagtaagcttgttcgcctggagccattgactgaagctgaagctagtgaagctacactgttttatttatgtgaacttgctcctgcacctctggatagtgatatgccacttttagatagctaaatccccaggaagtggactttacatgtatatattcatcaaaatgatgaactatttattttaaagtatcatttggtactttttttgtaaattgctttgttttgtttaatcagatactgtggaataaaagcaccttttgcttttctcactaaccacacactcttgcagagctttcaggtgttactcagctgcatagttacgcagatgtaatgcacattattggcgtatctttaagttggattcaaatggccatttttctccaattttggtaaattggatatcttttttttacaaatacgaccattaacctcagttaaatttttgtttgttttcctgtttgatgctgtctatttgcattgagtgtaagtcatttgaactaatggtataactcctaaagcttctctgctccagttatttttattaaatatttttcacttggcttatttttaaaactgggaacataaagtgcctgtatcttgtaaaacttcatttgtttcttttggttcagagaagttcatttatgttcaaagacgtttattcatgttcaacaggaaagacaaagtgtacgtgaatgctcgctgtctgatagggttccagctccatatatatagaaagatcgggggtgggatgggatggagtgagccccatccagttagttggactagttttaaataaaggttttccggtttgtgtttttttgaaccatactgtttataaaataaatacaatgaatgttgagtactagtgg

SEQ ID NO: 217 - protein, 536 aa, Homo sapiens
MKQSSNVPAFLSKLWTLVEETHTNEFITWSQNGQSFLVLDEQRFAKEILPKYFKHNNMASFVRQLNMYGFRKVVHIDSGIVKQERDGPVEFQHPYFKQGQDDLLENIKRKVSSSKPEENKIRQEDLTKIISSAQKVQIKQETIESRLSELKSENESLWKEVSELRAKHAQQQQVIRKIVQFIVTLVQNNQLVSLKRKRPLLLNTNGAQKKNLFQHIVKEPTDNHHHKVPHSRTEGLKPRERISDDIIIYDVTDDNADEENIPVIPETNEDVISDPSNCSQYPDIVIVEDDNEDEYAPVIQSGEQNEPARESLSSGSDGSSPLMSSAVQLNGSSSLTSEDPVTMMDSILNDNINLLGKVELLDYLDSIDCSLEDFQAMLSGRQFSIDPDLLVDLFTSSVQMNPTDYINNTKSENKGLETTKNNVVQPVSEEGRKSKSKPDKQLIQYTAFPLLAFLDGNPASSVEQASTTASSEVLSSVDKPIEVDELLDSSLDPEPTQSKLVRLEPLTEAEASEATLFYLCELAPAPLDSDMPLLDS

SEQ ID NO: 218 - DNA, 1958 bp, Homo sapiens
agcagccggcgcggccgccagcgcggtgtagggggcaggcgcggatcccgccaccgccgcgcgctcggcccgccgactcccggcgccgccgccgccactgccgtcgccgccgccgcctgccgggactggagcgcgccgtccgccgcggacaagaccctggcctcaggccggagcagccccatcatgccgagggagcgcagggagcgggatgcgaaggagcgggacaccatgaaggaggacggcggcgcggagttctcggctcgctccaggaagaggaaggcaaacgtgaccgtttttttgcaggatccagatgaagaaatggccaaaatcgacaggacggcgagggaccagtgtgggagccagccttgggacaataatgcagtctgtgcagacccctgctccctgatccccacacctgacaaagaagatgatgaccgggtttacccaaactcaacgtgcaagcctcggattattgcaccatccagaggctccccgctgcctgtactgagctgggcaaatagagaggaagtctggaaaatcatgttaaacaaggaaaagacatacttaagggatcagcactttcttgagcaacaccctcttctgcagccaaaaatgcgagcaattcttctggattggttaatggaggtgtgtgaagtctataaacttcacagggagaccttttacttggcacaagatttctttgaccggtatatggcgacacaagaaaatgttgtaaaaactcttttacagcttattgggatttcatctttatttattgcagccaaacttgaggaaatctatcctccaaagttgcaccagtttgcgtatgtgacagatggagcttgttcaggagatgaaattctcaccatggaattaatgattatgaaggcccttaagtggcgtttaagtcccctgactattgtgtcctggctgaatgtatacatgcaggttgcatatctaaatgacttacatgaagtgctactgccgcagtatccccagcaaatctttatacagattgcagagctgttggatctctgtgtcctggatgttgactgccttgaatttccttatggtatacttgctgcttcggccttgtatcatttctcgtcatctgaattgatgcaaaaggtttcagggtatcagtggtgcgacatagagaactgtgtcaagtggatggttccatttgccatggttataagggagacggggagctcaaaactgaagcacttcaggggcgtcgctgatgaagatgcacacaacatacagacccacagagacagcttggatttgctggacaaagcccgagcaaagaaagccatgttgtctgaacaaaatagggcttctcctctccccagtgggctcctcaccccgccacagagcggtaagaagcagagcagcgggccggaaatggcgtgaccaccccatccttctccaccaaagacagttgcgcgcctgctccacgttctcttctgtctgttgcagcggaggcgtgcgtttgcttttacagatatctgaatggaagagtgtttcttccacaacagaagtatttctgtggatggcatcaaacagggcaaagtgttttttattgaatgcttataggttttttttaaataagtgggtcaagtacaccagccacctccagacaccagtgcgtgctcccgatgctgctatggaaggtgctacttgacctaagggactcccacaacaacaaaagcttgaagctgtggagggccacggtggcgtggctctcctcgcaggtgttctgggctccgttgtaccaagtggagcaggtggttgcgggcaagcgttgtgcagagcccatagccagctgggcagggggctgccctctccacattatcagttgacagtgtacaatgcctttgatgaactgttttgtaagtgctgctatatctatccattttttaataaagataatactgtttttgagacaaaaaaaa

SEQ ID NO: 219 - protein, 410 aa, Homo sapiens
MPRERRERDAKERDTMKEDGGAEFSARSRKRKANVTVFLQDPDEEMAKIDRTARDQCGSQPWDNNAVCADPCSLIPTPDKEDDDRVYPNSTCKPRIIAPSRGSPLPVLSWANREEVWKIMLNKEKTYLRDQHFLEQHPLLQPKMRAILLDWLMEVCEVYKLHRETFYLAQDFFDRYMATQENVVKTLLQLIGISSLFIAAKLEEIYPPKLHQFAYVTDGACSGDEILTMELMIMKALKWRLSPLTIVSWLNVYMQVAYLNDLHEVLLPQYPQQIFIQIAELLDLCVLDVDCLEFPYGILAASALYHFSSSELMQKVSGYQWCDIENCVKWMVPFAMVIRETGSSKLKHFRGVADEDAHNIQTHRDSLDLLDKARAKKAMLSEQNRASPLPSGLLTPPQSGKKQSSGPEMA

SEQ ID NO: 220 - DNA, 1787 bp, Homo sapiens
gtgctcacccggcccggtgccacccgggtccacagggatgcgaaggagcgggacaccatgaaggaggacggcggcgcggagttctcggctcgctccaggaagaggaaggcaaacgtgaccgtttttttgcaggatccagatgaagaaatggccaaaatcgacaggacggcgagggaccagtgtgggagccagccttgggacaataatgcagtctgtgcagacccctgctccctgatccccacacctgacaaagaagatgatgaccgggtttacccaaactcaacgtgcaagcctcggattattgcaccatccagaggctccccgctgcctgtactgagctgggcaaatagagaggaagtctggaaaatcatgttaaacaaggaaaagacatacttaagggatcagcactttcttgagcaacaccctcttctgcagccaaaaatgcgagcaattcttctggattggttaatggaggtgtgtgaagtctataaacttcacagggagaccttttacttggcacaagatttctttgaccggtatatggcgacacaagaaaatgttgtaaaaactcttttacagcttattgggatttcatctttatttattgcagccaaacttgaggaaatctatcctccaaagttgcaccagtttgcgtatgtgacagatggagcttgttcaggagatgaaattctcaccatggaattaatgattatgaaggcccttaagtggcgtttaagtcccctgactattgtgtcctggctgaatgtatacatgcaggttgcatatctaaatgacttacatgaagtgctactgccgcagtatccccagcaaatctttatacagattgcagagctgttggatctctgtgtcctggatgttgactgccttgaatttccttatggtatacttgctgcttcggccttgtatcatttctcgtcatctgaattgatgcaaaaggtttcagggtatcagtggtgcgacatagagaactgtgtcaagtggatggttccatttgccatggttataagggagacggggagctcaaaactgaagcacttcaggggcgtcgctgatgaagatgcacacaacatacagacccacagagacagcttggatttgctggacaaagcccgagcaaagaaagccatgttgtctgaacaaaatagggcttctcctctccccagtgggctcctcaccccgccacagagcggtaagaagcagagcagcgggccggaaatggcgtgaccaccccatccttctccaccaaagacagttgcgcgcctgctccacgttctcttctgtctgttgcagcggaggcgtgcgtttgcttttacagatatctgaatggaagagtgtttcttccacaacagaagtatttctgtggatggcatcaaacagggcaaagtgttttttattgaatgcttataggttttttttaaataagtgggtcaagtacaccagccacctccagacaccagtgcgtgctcccgatgctgctatggaaggtgctacttgacctaagggactcccacaacaacaaaagcttgaagctgtggagggccacggtggcgtggctctcctcgcaggtgttctgggctccgttgtaccaagtggagcaggtggttgcgggcaagcgttgtgcagagcccatagccagctgggcagggggctgccctctccacattatcagttgacagtgtacaatgcctttgatgaactgttttgtaagtgctgctatatctatccattttttaataaagataatactgtttttgagacaaaaaaaa

SEQ ID NO: 221 - protein, 395 aa, Homo sapiens
MKEDGGAEFSARSRKRKANVTVFLQDPDEEMAKIDRTARDQCGSQPWDNNAVCADPCSLIPTPDKEDDDRVYPNSTCKPRIIAPSRGSPLPVLSWANREEVWKIMLNKEKTYLRDQHFLEQHPLLQPKMRAILLDWLMEVCEVYKLHRETFYLAQDFFDRYMATQENVVKTLLQLIGISSLFIAAKLEEIYPPKLHQFAYVTDGACSGDEILTMELMIMKALKWRLSPLTIVSWLNVYMQVAYLNDLHEVLLPQYPQQIFIQIAELLDLCVLDVDCLEFPYGILAASALYHFSSSELMQKVSGYQWCDIENCVKWMVPFAMVIRETGSSKLKHFRGVADEDAHNIQTHRDSLDLLDKARAKKAMLSEQNRASPLPSGLLTPPQSGKKQSSGPEMA

SEQ ID NO: 222 - DNA, 1574 bp, Homo sapiens
cagacagaccaatcacgcgcattcttcggccacgacaagcgcgcctctgatcacgtgaccaggtccgctacccacgtgggggctcagcgtgcacccttctttgtgctcgggttaggaggagctaggctgccatcgggccggtgcagatacggggttgctcttttgctcataagaggggcttcgctggcagtctgaacggcaagcttgagtcaggacccttaattaagatcctcaattggctggagggcagatctcgcgagtagggcaacgcggtaaaaatattgcttcggtgggtgacgcggtacagctgcccaagggcgttcgtaacgggaatgccgaagcgtgggaaaaagggagcggtggcggaagacggggatgagctcaggacagagccagaggccaagaagagtaagacggccgcaaagaaaaatgacaaagaggcagcaggagagggcccagccctgtatgaggaccccccagatcagaaaacctcacccagtggcaaacctgccacactcaagatctgctcttggaatgtggatgggcttcgagcctggattaagaagaaaggattagattgggtaaaggaagaagccccagatatactgtgccttcaagagaccaaatgttcagagaacaaactaccagctgaacttcaggagctgcctggactctctcatcaatactggtcagctccttcggacaaggaagggtacagtggcgtgggcctgctttcccgccagtgcccactcaaagtttcttacggcataggcgatgaggagcatgatcaggaaggccgggtgattgtggctgaatttgactcgtttgtgctggtaacagcatatgtacctaatgcaggccgaggtctggtacgactggagtaccggcagcgctgggatgaagcctttcgcaagttcctgaagggcctggcttcccgaaagccccttgtgctgtgtggagacctcaatgtggcacatgaagaaattgaccttcgcaaccccaaggggaacaaaaagaatgctggcttcacgccacaagagcgccaaggcttcggggaattactgcaggctgtgccactggctgacagctttaggcacctctaccccaacacaccctatgcctacaccttttggacttatatgatgaatgctcgatccaagaatgttggttggcgccttgattactttttgttgtcccactctctgttacctgcattgtgtgacagcaagatccgttccaaggccctcggcagtgatcactgtcctatcaccctatacctagcactgtgacaccacccctaaatcactttgagcctgggaaataagccccctcaactaccattccttctttaaacactcttcagagaaatctgcattctatttctcatgtataaaactaggaatcctccaaccaggctcctgtgatagagttcttttaagcccaagattttttatttgagggttttttgttttttaaaaaaaaattgaacaaagactactaatgactttgtttgaattatccacatgaaaataaagagccatagtttcaaaaaaaaaaaaaaaaaaaaaaaaaaa

SEQ ID NO: 223 - protein, 318 aa, Homo sapiens
MPKRGKKGAVAEDGDELRTEPEAKKSKTAAKKNDKEAAGEGPALYEDPPDQKTSPSGKPATLKICSWNVDGLRAWIKKKGLDWVKEEAPDILCLQETKCSENKLPAELQELPGLSHQYWSAPSDKEGYSGVGLLSRQCPLKVSYGIGDEEHDQEGRVIVAEFDSFVLVTAYVPNAGRGLVRLEYRQRWDEAFRKFLKGLASRKPLVLCGDLNVAHEEIDLRNPKGNKKNAGFTPQERQGFGELLQAVPLADSFRHLYPNTPYAYTFWTYMMNARSKNVGWRLDYFLLSHSLLPALCDSKIRSKALGSDHCPITLYLAL

SEQ ID NO: 224 - DNA, 1501 bp, Homo sapiens
cagacagaccaatcacgcgcattcttcggccacgacaagcgcgcctctgatcacgtgaccaggtccgctacccacgtgggggctcagcgtgcacccttctttgtgctcgggttaggaggagctaggctgccatcgggccggtgcagatacggggttgctcttttgctcataagaggggcttcgctggcagtctgaacggcaacgcggtaaaaatattgcttcggtgggtgacgcggtacagctgcccaagggcgttcgtaacgggaatgccgaagcgtgggaaaaagggagcggtggcggaagacggggatgagctcaggacagagccagaggccaagaagagtaagacggccgcaaagaaaaatgacaaagaggcagcaggagagggcccagccctgtatgaggaccccccagatcagaaaacctcacccagtggcaaacctgccacactcaagatctgctcttggaatgtggatgggcttcgagcctggattaagaagaaaggattagattgggtaaaggaagaagccccagatatactgtgccttcaagagaccaaatgttcagagaacaaactaccagctgaacttcaggagctgcctggactctctcatcaatactggtcagctccttcggacaaggaagggtacagtggcgtgggcctgctttcccgccagtgcccactcaaagtttcttacggcataggcgatgaggagcatgatcaggaaggccgggtgattgtggctgaatttgactcgtttgtgctggtaacagcatatgtacctaatgcaggccgaggtctggtacgactggagtaccggcagcgctgggatgaagcctttcgcaagttcctgaagggcctggcttcccgaaagccccttgtgctgtgtggagacctcaatgtggcacatgaagaaattgaccttcgcaaccccaaggggaacaaaaagaatgctggcttcacgccacaagagcgccaaggcttcggggaattactgcaggctgtgccactggctgacagctttaggcacctctaccccaacacaccctatgcctacaccttttggacttatatgatgaatgctcgatccaagaatgttggttggcgccttgattactttttgttgtcccactctctgttacctgcattgtgtgacagcaagatccgttccaaggccctcggcagtgatcactgtcctatcaccctatacctagcactgtgacaccacccctaaatcactttgagcctgggaaataagccccctcaactaccattccttctttaaacactcttcagagaaatctgcattctatttctcatgtataaaactaggaatcctccaaccaggctcctgtgatagagttcttttaagcccaagattttttatttgagggttttttgttttttaaaaaaaaattgaacaaagactactaatgactttgtttgaattatccacatgaaaataaagagccatagtttcaaaaaaaaaaaaaaaaaaaa

SEQ ID NO: 225 - DNA, 1511 bp, Homo sapiens
cagacagaccaatcacgcgcattcttcggccacgacaagcgcgcctctgatcacgtgaccaggtccgctacccacgtgggggctcagcgtgcacccttctttgtgctcgggttaggaggagctaggctgccatcgggccggtgcagatacggggttgctcttttgctcataagaggggcttcgctggcagtctgaacggcaagcttgagcaacgcggtaaaaatattgcttcggtgggtgacgcggtacagctgcccaagggcgttcgtaacgggaatgccgaagcgtgggaaaaagggagcggtggcggaagacggggatgagctcaggacagagccagaggccaagaagagtaagacggccgcaaagaaaaatgacaaagaggcagcaggagagggcccagccctgtatgaggaccccccagatcagaaaacctcacccagtggcaaacctgccacactcaagatctgctcttggaatgtggatgggcttcgagcctggattaagaagaaaggattagattgggtaaaggaagaagccccagatatactgtgccttcaagagaccaaatgttcagagaacaaactaccagctgaacttcaggagctgcctggactctctcatcaatactggtcagctccttcggacaaggaagggtacagtggcgtgggcctgctttcccgccagtgcccactcaaagtttcttacggcataggcgatgaggagcatgatcaggaaggccgggtgattgtggctgaatttgactcgtttgtgctggtaacagcatatgtacctaatgcaggccgaggtctggtacgactggagtaccggcagcgctgggatgaagcctttcgcaagttcctgaagggcctggcttcccgaaagccccttgtgctgtgtggagacctcaatgtggcacatgaagaaattgaccttcgcaaccccaaggggaacaaaaagaatgctggcttcacgccacaagagcgccaaggcttcggggaattactgcaggctgtgccactggctgacagctttaggcacctctaccccaacacaccctatgcctacaccttttggacttatatgatgaatgctcgatccaagaatgttggttggcgccttgattactttttgttgtcccactctctgttacctgcattgtgtgacagcaagatccgttccaaggccctcggcagtgatcactgtcctatcaccctatacctagcactgtgacaccacccctaaatcactttgagcctgggaaataagccccctcaactaccattccttctttaaacactcttcagagaaatctgcattctatttctcatgtataaaactaggaatcctccaaccaggctcctgtgatagagttcttttaagcccaagattttttatttgagggttttttgttttttaaaaaaaaattgaacaaagactactaatgactttgtttgaattatccacatgaaaataaagagccatagtttcaaaaaaaaaaaaaaaaaaaa

SEQ ID NO: 226 - DNA, 4975 bp, Homo sapiens
ctctcacacacacacacccctcccctgccatccctccccggactccggctccggctccgattgcaatttgcaacctccgctgccgtcgccgcagcagccaccaattcgccagcggttcaggtggctcttgcctcgatgtcctagcctaggggcccccgggccggacttggctgggctcccttcaccctctgcggagtcatgagggcgaacgacgctctgcaggtgctgggcttgcttttcagcctggcccggggctccgaggtgggcaactctcaggcagtgtgtcctgggactctgaatggcctgagtgtgaccggcgatgctgagaaccaataccagacactgtacaagctctacgagaggtgtgaggtggtgatggggaaccttgagattgtgctcacgggacacaatgccgacctctccttcctgcagtggattcgagaagtgacaggctatgtcctcgtggccatgaatgaattctctactctaccattgcccaacctccgcgtggtgcgagggacccaggtctacgatgggaagtttgccatcttcgtcatgttgaactataacaccaactccagccacgctctgcgccagctccgcttgactcagctcaccgagattctgtcagggggtgtttatattgagaagaacgataagctttgtcacatggacacaattgactggagggacatcgtgagggaccgagatgctgagatagtggtgaaggacaatggcagaagctgtcccccctgtcatgaggtttgcaaggggcgatgctggggtcctggatcagaagactgccagacattgaccaagaccatctgtgctcctcagtgtaatggtcactgctttgggcccaaccccaaccagtgctgccatgatgagtgtgccgggggctgctcaggccctcaggacacagactgctttgcctgccggcacttcaatgacagtggagcctgtgtacctcgctgtccacagcctcttgtctacaacaagctaactttccagctggaacccaatccccacaccaagtatcagtatggaggagtttgtgtagccagctgtccccataactttgtggtggatcaaacatcctgtgtcagggcctgtcctcctgacaagatggaagtagataaaaatgggctcaagatgtgtgagccttgtgggggactatgtcccaaagcctgtgagggaacaggctctgggagccgcttccagactgtggactcgagcaacattgatggatttgtgaactgcaccaagatcctgggcaacctggactttctgatcaccggcctcaatggagacccctggcacaagatccctgccctggacccagagaagctcaatgtcttccggacagtacgggagatcacaggttacctgaacatccagtcctggccgccccacatgcacaacttcagtgttttttccaatttgacaaccattggaggcagaagcctctacaaccggggcttctcattgttgatcatgaagaacttgaatgtcacatctctgggcttccgatccctgaaggaaattagtgctgggcgtatctatataagtgccaataggcagctctgctaccaccactctttgaactggaccaaggtgcttcgggggcctacggaagagcgactagacatcaagcataatcggccgcgcagagactgcgtggcagagggcaaagtgtgtgacccactgtgctcctctgggggatgctggggcccaggccctggtcagtgcttgtcctgtcgaaattatagccgaggaggtgtctgtgtgacccactgcaactttctgaatggggagcctcgagaatttgcccatgaggccgaatgcttctcctgccacccggaatgccaacccatggggggcactgccacatgcaatggctcgggctctgatacttgtgctcaatgtgcccattttcgagatgggccccactgtgtgagcagctgcccccatggagtcctaggtgccaagggcccaatctacaagtacccagatgttcagaatgaatgtcggccctgccatgagaactgcacccaggggtgtaaaggaccagagcttcaagactgtttaggacaaacactggtgctgatcggcaaaacccatctgacaatggctttgacagtgatagcaggattggtagtgattttcatgatgctgggcggcacttttctctactggcgtgggcgccggattcagaataaaagggctatgaggcgatacttggaacggggtgagagcatagagcctctggaccccagtgagaaggctaacaaagtcttggccagaatcttcaaagagacagagctaaggaagcttaaagtgcttggctcgggtgtctttggaactgtgcacaaaggagtgtggatccctgagggtgaatcaatcaagattccagtctgcattaaagtcattgaggacaagagtggacggcagagttttcaagctgtgacagatcatatgctggccattggcagcctggaccatgcccacattgtaaggctgctgggactatgcccagggtcatctctgcagcttgtcactcaatatttgcctctgggttctctgctggatcatgtgagacaacaccggggggcactggggccacagctgctgctcaactggggagtacaaattgccaagggaatgtactaccttgaggaacatggtatggtgcatagaaacctggctgcccgaaacgtgctactcaagtcacccagtcaggttcaggtggcagattttggtgtggctgacctgctgcctcctgatgataagcagctgctatacagtgaggccaagactccaattaagtggatggcccttgagagtatccactttgggaaatacacacaccagagtgatgtctggagctatggtgtgacagtttgggagttgatgaccttcggggcagagccctatgcagggctacgattggctgaagtaccagacctgctagagaagggggagcggttggcacagccccagatctgcacaattgatgtctacatggtgatggtcaagtgttggatgattgatgagaacattcgcccaacctttaaagaactagccaatgagttcaccaggatggcccgagacccaccacggtatctggtcataaagagagagagtgggcctggaatagcccctgggccagagccccatggtctgacaaacaagaagctagaggaagtagagctggagccagaactagacctagacctagacttggaagcagaggaggacaacctggcaaccaccacactgggctccgccctcagcctaccagttggaacacttaatcggccacgtgggagccagagccttttaagtccatcatctggatacatgcccatgaaccagggtaatcttggggggtcttgccaggagtctgcagtttctgggagcagtgaacggtgcccccgtccagtctctctacacccaatgccacggggatgcctggcatcagagtcatcagaggggcatgtaacaggctctgaggctgagctccaggagaaagtgtcaatgtgtagaagccggagcaggagccggagcccacggccacgcggagatagcgcctaccattcccagcgccacagtctgctgactcctgttaccccactctccccacccgggttagaggaagaggatgtcaacggttatgtcatgccagatacacacctcaaaggtactccctcctcccgggaaggcaccctttcttcagtgggtctcagttctgtcctgggtactgaagaagaagatgaagatgaggagtatgaatacatgaaccggaggagaaggcacagtccacctcatccccctaggccaagttcccttgaggagctgggttatgagtacatggatgtggggtcagacctcagtgcctctctgggcagcacacagagttgcccactccaccctgtacccatcatgcccactgcaggcacaactccagatgaagactatgaatatatgaatcggcaacgagatggaggtggtcctgggggtgattatgcagccatgggggcctgcccagcatctgagcaagggtatgaagagatgagagcttttcaggggcctggacatcaggccccccatgtccattatgcccgcctaaaaactctacgtagcttagaggctacagactctgcctttgataaccctgattactggcatagcaggcttttccccaaggctaatgcccagagaacgtaactcctgctccctgtggcactcagggagcatttaatggcagctagtgcctttagagggtaccgtcttctccctattccctctctctcccaggtcccagccccttttccccagtcccagacaattccattcaatctttggaggcttttaaacattttgacacaaaattcttatggtatgtagccagctgtgcactttcttctctttcccaaccccaggaaaggttttccttattttgtgtgctttcccagtcccattcctcagcttcttcacaggcactcctggagatatgaaggattactctccatatcccttcctctcaggctcttgactacttggaactaggctcttatgtgtgcctttgtttcccatcagactgtcaagaagaggaaagggaggaaacctagcagaggaaagtgtaattttggtttatgactcttaaccccctagaaagacagaagcttaaaatctgtgaagaaagaggttaggagtagatattgattactatcataattcagcacttaactatgagccaggcatcatactaaacttcacctacattatctcacttagtcctttatcatccttaaaacaattctgtgacatacatattatctcattttacacaaagggaagtcgggcatggtggctcatgcctgtaatctcagcactttgggaggctgaggcagaaggattacctgaggcaaggagtttgagaccagcttagccaacatagtaagacccccatctc

SEQ ID NO: 227 - protein, 1342 aa, Homo sapiens
MRANDALQVLGLLFSLARGSEVGNSQAVCPGTLNGLSVTGDAENQYQTLYKLYERCEVVMGNLEIVLTGHNADLSFLQWIREVTGYVLVAMNEFSTLPLPNLRVVRGTQVYDGKFAIFVMLNYNTNSSHALRQLRLTQLTEILSGGVYIEKNDKLCHMDTIDWRDIVRDRDAEIVVKDNGRSCPPCHEVCKGRCWGPGSEDCQTLTKTICAPQCNGHCFGPNPNQCCHDECAGGCSGPQDTDCFACRHFNDSGACVPRCPQPLVYNKLTFQLEPNPHTKYQYGGVCVASCPHNFVVDQTSCVRACPPDKMEVDKNGLKMCEPCGGLCPKACEGTGSGSRFQTVDSSNIDGFVNCTKILGNLDFLITGLNGDPWHKIPALDPEKLNVFRTVREITGYLNIQSWPPHMHNFSVFSNLTTIGGRSLYNRGFSLLIMKNLNVTSLGFRSLKEISAGRIYISANRQLCYHHSLNWTKVLRGPTEERLDIKHNRPRRDCVAEGKVCDPLCSSGGCWGPGPGQCLSCRNYSRGGVCVTHCNFLNGEPREFAHEAECFSCHPECQPMGGTATCNGSGSDTCAQCAHFRDGPHCVSSCPHGVLGAKGPIYKYPDVQNECRPCHENCTQGCKGPELQDCLGQTLVLIGKTHLTMALTVIAGLVVIFMMLGGTFLYWRGRRIQNKRAMRRYLERGESIEPLDPSEKANKVLARIFKETELRKLKVLGSGVFGTVHKGVWIPEGESIKIPVCIKVIEDKSGRQSFQAVTDHMLAIGSLDHAHIVRLLGLCPGSSLQLVTQYLPLGSLLDHVRQHRGALGPQLLLNWGVQIAKGMYYLEEHGMVHRNLAARNVLLKSPSQVQVADFGVADLLPPDDKQLLYSEAKTPIKWMALESIHFGKYTHQSDVWSYGVTVWELMTFGAEPYAGLRLAEVPDLLEKGERLAQPQICTIDVYMVMVKCWMIDENIRPTFKELANEFTRMARDPPRYLVIKRESGPGIAPGPEPHGLTNKKLEEVELEPELDLDLDLEAEEDNLATTTLGSALSLPVGTLNRPRGSQSLLSPSSGYMPMNQGNLGGSCQESAVSGSSERCPRPVSLHPMPRGCLASESSEGHVTGSEAELQEKVSMCRSRSRSRSPRPRGDSAYHSQRHSLLTPVTPLSPPGLEEEDVNGYVMPDTHLKGTPSSREGTLSSVGLSSVLGTEEEDEDEEYEYMNRRRRHSPPHPPRPSSLEELGYEYMDVGSDLSASLGSTQSCPLHPVPIMPTAGTTPDEDYEYMNRQRDGGGPGGDYAAMGACPASEQGYEEMRAFQGPGHQAPHVHYARLKTLRSLEATDSAFDNPDYWHSRLFPKANAQRT

SEQ ID NO: 228 - DNA, 1375 bp, Homo sapiens
tcgaattccggaagccgctcccgacaccctttgcctggctctgtccatattagttcccaggcggccgtcgcgttccagcagcggcacgcagcgcaggcggagcggcagcggggcctcggctctatagagccgagccgctggtacccgcccggtaccgcgcgagccagtgcccctggatcttgcctctgctccgacgccgttccccaccagttagcgacagcgcccgcccctctgaggagacacgaaggtggttccccagccgctcaaatttccggaccaccgcgctttcccctcctcagcctgggctgtgctctctctagaatcctcgggcccccactttcttcccaaactcatcctaaatctctcacacacgcgagtgttcccagccctcaagccagctgctcctcctccgttcattttctgcccctcttcgcaaagcacccccgggatcatcctccgagggcgactttttgagaaatctcggtggagtagtggaccagagcaggggagtttttaaaagccggggcgcgagaaacaggaaggtactatggcttcctcgtctggcaacgatgatgatctcactatccccagagctgctatcaataaaatgatcaaagagactcttcctaatgtccgggtggccaacgatgctcgagagctggtggtgaactgctgcactgaattcattcaccttatatcttctgaagccaatgagatttgtaacaaatcggaaaagaagaccatctcaccagagcatgtcatacaagcactagaaagtttgggatttggctcttacatcagtgaagtaaaagaagtcttgcaagagtgtaaaacagtagcattaaaaagaagaaaggccagttctcgtttggaaaaccttggcattcctgaagaagagttattgagacagcaacaagaattatttgcaaaagctagacagcaacaagcagaattggcccaacaggaatggcttcaaatgcagcaagctgcccaacaagcccagcttgctgctgcctcagccagtgcatctaatcaggcgggatcttctcaggatgaagaagatgatgatgatatctgaaattcaccagctgagtttctatttcttctataaatgtttttccctgcacaacaaaaacagtgaaagaaatgcttatctgtaattttgtatgcatcttggtggacttgtcattggtattctagagatgtctgctataagtttcatctgttgtgtgctatacatgtaaaaactgtctctttgaactattgaaaatttaaggttcagtataatatcaattttgaatttttcctggtgtttatgaaattttagatagcagcaagtcttcgtttgatcataaacagtgtacagataactcaa

SEQ ID NO: 229 - protein, 176 aa, Homo sapiens
MASSSGNDDDLTIPRAAINKMIKETLPNVRVANDARELVVNCCTEFIHLISSEANEICNKSEKKTISPEHVIQALESLGFGSYISEVKEVLQECKTVALKRRKASSRLENLGIPEEELLRQQQELFAKARQQQAELAQQEWLQMQQAAQQAQLAAASASASNQAGSSQDEEDDDDI

SEQ ID NO: 230 - DNA, 1713 bp, Homo sapiens
gcgcgagtgctcccgggaactctgcctgcgcggcggcagcgaccggaggccaggcccagcacgccggagctggcctgctggggaggggcgggaggcgcgcgcgggagggtccgcccggccaggccccgggccctcgcagaggccggccgcgctcccagcccgcccggagcccatgcccggcggctggccagtgctgcggcagaagggggggcccggctctgcatggccccggctgctgacatgacttctttgccactcggtgtcaaagtggaggactccgccttcggcaagccggcggggggaggcgcgggccaggcccccagcgccgccgcggccacggcagccgccatgggcgcggacgaggagggggccaagcccaaagtgtccccttcgctcctgcccttcagcgtggaggcgctcatggccgaccacaggaagccgggggccaaggagagcgccctggcgccctccgagggcgtgcaggcggcgggtggctcggcgcagccactgggcgtcccgccggggtcgctgggagccccggacgcgccctcttcgccgcggccgctcggccatttctcggtggggggactcctcaagctgccagaagatgcgctcgtcaaagccgagagccccgagaagcccgagaggaccccgtggatgcagagcccccgcttctccccgccgccggccaggcggctgagccccccagcctgcaccctccgcaaacacaagacgaaccgtaagccgcggacgcccttcaccaccgcgcagctgctggcgctggagcgcaagttccgccagaagcagtacctgtccatcgccgagcgcgcggagttctccagctcgctcagcctcactgagacgcaggtgaagatatggttccagaaccgccgcgccaaggcaaagagactacaagaggcagagctggagaagctgaagatggccgccaagcccatgctgccaccggctgccttcggcctctccttccctctcggcggccccgcagctgtagcggccgcggcgggtgcctcgctctacggtgcctctggccccttccagcgcgccgcgctgcctgtggcgcccgtgggactctacacggcccatgtgggctacagcatgtaccacctgacatagagggtcccaggtccccacctgtgggccagccgattcctccagccctggtgctgtacccccgacgtgctcccctgctcggcaccgccagccgccttccctttaaccctcacactgctccagtttcacctctttgctccctgagttcactctccgaagtctgatccctgccaaaaagtggctggaagagtcccttagtactcttctagcatttagatctacactctcgagttaaagatggggaaactgagggcagagaggttaacagatttatctagggtccccagcagaattgacagttgaacagagctagaggccatgtctcctgcatagcttttccctgtcctgacaccaggcaagaaaagcgcagagaaatcggtgtctgacgattttggaaatgagaacaatctcaaaaaaaaaaaaaaaaaaaaaaaaaaaagaaaagagaaaaaaaagactagccagccaggaagatgaatcctagcttcttccattggaaaatttaagacaagttcaacaacaaaacatttgctctggggggcagggaaaacacagatgtgttgcaaaggtaggttgaaggga

SEQ ID NO: 231 - protein, 297 aa, Homo sapiens
MTSLPLGVKVEDSAFGKPAGGGAGQAPSAAAATAAAMGADEEGAKPKVSPSLLPFSVEALMADHRKPGAKESALAPSEGVQAAGGSAQPLGVPPGSLGAPDAPSSPRPLGHFSVGGLLKLPEDALVKAESPEKPERTPWMQSPRFSPPPARRLSPPACTLRKHKTNRKPRTPFTTAQLLALERKFRQKQYLSIAERAEFSSSLSLTETQVKIWFQNRRAKAKRLQEAELEKLKMAAKPMLPPAAFGLSFPLGGPAAVAAAAGASLYGASGPFQRAALPVAPVGLYTAHVGYSMYHLT

SEQ ID NO: 232 - DNA, 3304 bp, Homo sapiens
gcgaccgaacgcggcggtcggcagcgttcgcgcgggggcctgcgaagcgctgctcggggccggcactgcccgcggggaggacgcgccgccgccgccacccagcgccgccgccgccgccgcctccagccgggccgccgcgcgtcccgggggccggccccgcgagcgcaggagtaaacaccgccggagtcttggagccgctgcagaagggaataaagagagatgcagggatttgtgaggttacggcgccccagctgcaagatgcactagccggctgaacccgggatcggctgacttgttggaaccggagtgctctgcacggagagtggtggatgagttgaagttgccttcccggggctcattttccacgctgccgagaggaatccgagaggcaaggcaatcacttcgtcttgccattgattgggtatcgggagctttttttttctcccctctctctttcttttcctccgtcttgttgcatgcaagaaaattacagtccgctgctcgcccgccctgggtgcgagatattcagccccgctctctcccgtgcattgtgcaacccaaagatgaaagaccgaaggggagaaagttaaagaaatcgcccacatgcgctggatcagtccacggcttggggaaaggcatccagagaaggtgggagcggagagtttgaagtctttacaggcgggaagatggcggactggagctgaaagtgttgattgggaaacttgggtgattcttgtgtttatttacaatcctcttgacccaggcaggacacatgcaggccaaaaaacgctatttcatcctgctctcagctggctcttgtctcgcccttttgttttatttcggaggcttgcagtttagggcatcgaggagccacagccggagagaagaacacagcggtaggaatggcttgcaccaccccagtccggatcatttctggccccgcttcccggagcctctgcgccccttcgttccttgggatcaattggaaaacgaggattccagcgtgcacatttccccccggcagaagcgagatgccaactccagcatctacaaaggcaagaagtgccgcatggagtcctgcttcgatttcaccctttgcaagaaaaacggcttcaaagtctacgtatacccacagcaaaaaggggagaaaatcgccgaaagttaccaaaacattctagcggccatcgagggctccaggttctacacctcggaccccagccaggcgtgcctctttgtcctgagtctggatactttagacagagaccagttgtcacctcagtatgtgcacaatttgagatccaaagtgcagagtctccacttgtggaacaatggtaggaatcatttaatttttaatttatattccggcacttggcctgactacaccgaggacgtggggtttgacatcggccaggcgatgctggccaaagccagcatcagtactgaaaacttccgacccaactttgatgtttctattcccctcttttctaaggatcatcccaggacaggaggggagagggggtttttgaagttcaacaccatccctcctctcaggaagtacatgctggtattcaaggggaagaggtacctgacagggataggatcagacaccaggaatgccttatatcacgtccataacggggaggacgttgtgctcctcaccacctgcaagcatggcaaagactggcaaaagcacaaggattctcgctgtgacagagacaacaccgagtatgagaagtatgattatcgggaaatgctgcacaatgccactttctgtctggttcctcgtggtcgcaggcttgggtccttcagattcctggaggctttgcaggctgcctgcgtccctgtgatgctcagcaatggatgggagttgccattctctgaagtgattaattggaaccaagctgccgtcataggcgatgagagattgttattacagattccttctacaatcaggtctattcatcaggataaaatcctagcacttagacagcagacacaattcttgtgggaggcttatttttcttcagttgagaagattgtattaactacactagagattattcaggacagaatattcaagcacatatcacgtaacagtttaatatggaacaaacatcctggaggattgttcgtactaccacagtattcatcttatctgggagattttccttactactatgctaatttaggtttaaagcccccctccaaattcactgcagtcatccatgcggtgacccccctggtctctcagtcccagccagtgttgaagcttctcgtggctgcagccaagtcccagtactgtgcccagatcatagttctatggaattgtgacaagcccctaccagccaaacaccgctggcctgccactgctgtgcctgtcgtcgtcattgaaggagagagcaaggttatgagcagccgttttctgccctacgacaacatcatcacagacgccgtgctcagccttgacgaggacacggtgctttcaacaacagaggtggatttcgccttcacagtgtggcagagcttccctgagaggattgtggggtaccccgcgcgcagccacttctgggataactctaaggagcggtggggatacacatcaaagtggacgaacgactactccatggtgttgacaggagctgctatttaccacaaatattatcactacctatactcccattacctgccagccagcctgaagaacatggtggaccaattggccaattgtgaggacattctcatgaacttcctggtgtctgctgtgacaaaattgcctccaatcaaagtgacccagaagaagcagtataaggagacaatgatgggacagacttctcgggcttcccgttgggctgaccctgaccactttgcccagcgacagagctgcatgaatacgtttgccagctggtttggctacatgccgctgatccactctcagatgaggctcgaccccgtcctctttaaagaccaggtctctattttgaggaagaaataccgagacattgagcgactttgaggaatccggctgagtgggggaggggaagcaagaagggatgggggtcaagctgctctctcttcccagtgcagatccactcatcagcagagccagattgtgccaactatccaaaaacttagatgagcagaatgacaaaaaaaaaaaaggccaatgagaactcaactcctggctcctgggactgcaccagactgctccaaactcacctcactggcttctgtgtcccaagactaggttggtacagtttaattatggaacattaaataattatttttgaaaaaaaaaaaaaaaaaa

SEQ ID NO: 233 - protein, 746 aa, Homo sapiens
MQAKKRYFILLSAGSCLALLFYFGGLQFRASRSHSRREEHSGRNGLHHPSPDHFWPRFPEPLRPFVPWDQLENEDSSVHISPRQKRDANSSIYKGKKCRMESCFDFTLCKKNGFKVYVYPQQKGEKIAESYQNILAAIEGSRFYTSDPSQACLFVLSLDTLDRDQLSPQYVHNLRSKVQSLHLWNNGRNHLIFNLYSGTWPDYTEDVGFDIGQAMLAKASISTENFRPNFDVSIPLFSKDHPRTGGERGFLKFNTIPPLRKYMLVFKGKRYLTGIGSDTRNALYHVHNGEDVVLLTTCKHGKDWQKHKDSRCDRDNTEYEKYDYREMLHNATFCLVPRGRRLGSFRFLEALQAACVPVMLSNGWELPFSEVINWNQAAVIGDERLLLQIPSTIRSIHQDKILALRQQTQFLWEAYFSSVEKIVLTTLEIIQDRIFKHISRNSLIWNKHPGGLFVLPQYSSYLGDFPYYYANLGLKPPSKFTAVIHAVTPLVSQSQPVLKLLVAAAKSQYCAQIIVLWNCDKPLPAKHRWPATAVPVVVIEGESKVMSSRFLPYDNIITDAVLSLDEDTVLSTTEVDFAFTVWQSFPERIVGYPARSHFWDNSKERWGYTSKWTNDYSMVLTGAAIYHKYYHYLYSHYLPASLKNMVDQLANCEDILMNFLVSAVTKLPPIKVTQKKQYKETMMGQTSRASRWADPDHFAQRQSCMNTFASWFGYMPLIHSQMRLDPVLFKDQVSILRKKYRDIERL

SEQ ID NO: 234 - DNA, 3216 bp, Homo sapiens
gctttgccgccatggccgcagtcaaggagcctttggagttccatgccaagcggccttggcgccccgaggaggcagtagaagatccggacgaggaggatgaggataatactagtgaagccgagaatgggttctccctggaggaagtgttacggctcggaggcaccaagcaagattaccttatgctggctactttggatgagaatgaggaagtgatagatggaggcaaaaaaggagcaatcgatgaccttcagcaaggtgaattggaagcatttattcaaaatcttaatttggcgaagtatacaaaagcttccttaattgaagaagatgaaccagctgaaaaagaaaattccagcaaaaaagaagtaaaaatacctaaaataaataataaaaatacagcagaaagtcaaaggacatcagttaataaggtgaaaaataagaataggccagaaccacattctgatgagaatggcagtaccacaccgaaagtaaagaaagataaacagaacatctttgaattttttgagagacagactttgttacttaggcctggaggcaaatggtatgatctggagtacagcaatgaatattctttgaaaccccagcctcaggatgttgtatctaagtacaaaacccttgctcagaagctgtatcagcatgaaatcaacttattcaaaagtaagacgaatagtcaaaagggagcctcttctacctggatgaaggcaattgtgtcatcggggacactaggtgacaggatggcagccatgattcttcttattcaggatgatgccgttcacacacttcagtttgtagaaactcttgtgaaccttgttaaaaagaagggcagcaaacagcagtgccttatggccttggatactttcaaagagttgcttatcacagaccttttgccagacaatcggaagctgaggattttcagccagcgtccttttgacaaactggaacagttgtccagtggcaacaaggactcaagagatagaagactgatattatggtattttgaacaccagctgaaacacttagtggctgaatttgtgcaggtcttagaaactttaagtcatgatacattagtaaccactaaaactcgagcccttaccgtggctcatgagctgctttgtaacaagcctgaggaagaaaaggctcttcttgtgcaagtggtaaataaactgggagatcctcagaacagaattgccacaaaagcatcccatctgttagagacattactttgtaaacatcccaatatgaaaggagttgtgtctggtgaagtagaaaggctactcttccgctcaaatatcagctccaaagctcaatattatgcaatttgctttttaaatcaaatggctctgtcccatgaagaaagtgaattggctaacaaattaataactgtttacttttgcttttttcggacttgtgtcaaaaaaaaagatgttgaatcaaaaatgcttagcgcccttttaacaggtgtgaatagggcatacccttattcccagactggtgatgacaaagtaagggagcagattgacacactgtttaaagtgttgcatattgtgaattttaataccagtgtccaggctttaatgttgcttttccaagtaatgaattctcagcagacaatatcggatcgatattacacagcattatacaggaagatgttggatccagggttgatgacgtgttccaagcaagctatgtttcttaaccttgtctacaaatctctgaaagctgacattgtgttgcgccgggtgaaggcttttgtgaaggggttacttcaagttacttgtcaacagatgccaccatttatatgtggagctttatatcttgtgtctgagatccttaaagcaaaaccaggtttaagaagccaactagatgatcatccggagtctgatgatgaagaaaattttattgatgcaaatgatgatgaagacatggaaaaattcactgatgcagacaaagaaacagagatagtgaaaaaacttgagacagaggaaacagttcctgaaactgatgtagaaaccaaaaaaccagaggttgcttcctgggtgcactttgataatttgaaaggtgggaaacagttaaataaatacgatccattcagtagaaaccctctgttctgtggagctgaaaatacaagtctttgggaactcaaaaagttatctgtgcattttcatccctccgtggccctttttgcaaagaccatccttcagggaaactatattcagtattcaggggacccactgcaggatttcactctaatgagatttttggatcgatttgtataccgaaatccaaagccccataaaggcaaagaaaacacagatagtgttgtgatgcagccgaaaagaaaacattttattaaggatattcgtcatcttcctgtgaacagtaaggagttccttgcaaaagaagaaagccaaataccagtggatgaagtgtttttccacaggtattataaaaaagttgctgttaaagagaaacaaaaacgggatgcagatgaagaaagtatagaagacgtggatgatgaagaatttgaagagctgattgacacatttgaagatgataactgtttcagctctggaaaggatgatatggattttgctggaaacgtgaaaaagagaacaaaaggagctaaggataacacattagatgaagattcagaaggtagtgatgatgaacttggtaacctggatgacgatgaagtttctttaggaagtatggatgatgaagaatttgctgaagttgatgaagatggaggaacattcatggatgtgttagatgatgaaagtgagagcgttccagaacttgaagtccactccaaagtcagtactaagaaaagcaagagaaaaggtacagatgattttgactttgctggctcatttcaagggccaagaaaaaagaaaagaaacttaaatgattccagcctatttgtatctgctgaagagtttggccatctattggatgaaaatatgggatccaagtttgataacattgcatgaatgccatggctaacaaagataatgcaagtctcaaacagcttagatgggaggctgaacgtgatgactggctacacaacagagatgcaaaaagtatcatcaagaaaaagaaacattttaaaaagaagaggattaaaaccactcaaaaaactaaaaaacaaaggaaatgagttattaatgtaaattatagattaaaattctacttacatct

SEQ ID NO: 235 - protein, 998 aa, Homo sapiens
MAAVKEPLEFHAKRPWRPEEAVEDPDEEDEDNTSEAENGFSLEEVLRLGGTKQDYLMLATLDENEEVIDGGKKGAIDDLQQGELEAFIQNLNLAKYTKASLIEEDEPAEKENSSKKEVKIPKINNKNTAESQRTSVNKVKNKNRPEPHSDENGSTTPKVKKDKQNIFEFFERQTLLLRPGGKWYDLEYSNEYSLKPQPQDVVSKYKTLAQKLYQHEINLFKSKTNSQKGASSTWMKAIVSSGTLGDRMAAMILLIQDDAVHTLQFVETLVNLVKKKGSKQQCLMALDTFKELLITDLLPDNRKLRIFSQRPFDKLEQLSSGNKDSRDRRLILWYFEHQLKHLVAEFVQVLETLSHDTLVTTKTRALTVAHELLCNKPEEEKALLVQVVNKLGDPQNRIATKASHLLETLLCKHPNMKGVVSGEVERLLFRSNISSKAQYYAICFLNQMALSHEESELANKLITVYFCFFRTCVKKKDVESKMLSALLTGVNRAYPYSQTGDDKVREQIDTLFKVLHIVNFNTSVQALMLLFQVMNSQQTISDRYYTALYRKMLDPGLMTCSKQAMFLNLVYKSLKADIVLRRVKAFVKGLLQVTCQQMPPFICGALYLVSEILKAKPGLRSQLDDHPESDDEENFIDANDDEDMEKFTDADKETEIVKKLETEETVPETDVETKKPEVASWVHFDNLKGGKQLNKYDPFSRNPLFCGAENTSLWELKKLSVHFHPSVALFAKTILQGNYIQYSGDPLQDFTLMRFLDRFVYRNPKPHKGKENTDSVVMQPKRKHFIKDIRHLPVNSKEFLAKEESQIPVDEVFFHRYYKKVAVKEKQKRDADEESIEDVDDEEFEELIDTFEDDNCFSSGKDDMDFAGNVKKRTKGAKDNTLDEDSEGSDDELGNLDDDEVSLGSMDDEEFAEVDEDGGTFMDVLDDESESVPELEVHSKVSTKKSKRKGTDDFDFAGSFQGPRKKKRNLNDSSLFVSAEEFGHLLDENMGSKFDNIA

SEQ ID NO: 236 - DNA, 1300 bp, Homo sapiens
ctctccctccctcgcccagccttcgtcctcctggcccgctcctctcatccctcccattctccatttcccttccgttccctccctgtcagggcgtaattgagtcaaaggcaggatcaggttccccgccttccagtccaaaaatcccgccaagagagccccagagcagaggaaaatccaaagtggagagaggggaagaaagagaccagtgagtcatccgtccagaaggcggggagagcagcagcggcccaagcaggagctgcagcgagccgggtacctggactcagcggtagcaacctcgccccttgcaacaaaggcagactgagcgccagagaggacgtttccaactcaaaaatgcaggctcaacagtaccagcagcagcgtcgaaaatttgcagctgccttcttggcattcattttcatactggcagctgtggatactgctgaagcagggaagaaagagaaaccagaaaaaaaagtgaagaagtctgactgtggagaatggcagtggagtgtgtgtgtgcccaccagtggagactgtgggctgggcacacgggagggcactcggactggagctgagtgcaagcaaaccatgaagacccagagatgtaagatcccctgcaactggaagaagcaatttggcgcggagtgcaaataccagttccaggcctggggagaatgtgacctgaacacagccctgaagaccagaactggaagtctgaagcgagccctgcacaatgccgaatgccagaagactgtcaccatctccaagccctgtggcaaactgaccaagcccaaacctcaagcagaatctaagaagaagaaaaaggaaggcaagaaacaggagaagatgctggattaaaagatgtcacctgtggaacataaaaaggacatcagcaaacaggatcagttaactattgcatttatatgtaccgtaggctttgtattcaaaaattatctatagctaagtacacaataagcaaaaacaaaaagaaaagaaaatttttgtagtagcgttttttaaatgtatactatagtaccagtaggggcttataataaaggactgtaatcttatttaggaagttgacttatagtacatgataaatgatagacaattgaggtaagttttttgaaattatgtgacattttacattaaattttttttacattttttgggcagcaatttaaatgttatgactatgtaaactacttctcttgttaggtaatttttttcacctagatttttttcccaattgagaaaaatatatactaaacaaaaaaaaaaaaaaaaaaaaaaaaaaaaa

SEQ ID NO: 237 - protein, 168 aa, Homo sapiens
MQAQQYQQQRRKFAAAFLAFIFILAAVDTAEAGKKEKPEKKVKKSDCGEWQWSVCVPTSGDCGLGTREGTRTGAECKQTMKTQRCKIPCNWKKQFGAECKYQFQAWGECDLNTALKTRTGSLKRALHNAECQKTVTISKPCGKLTKPKPQAESKKKKKEGKKQEKMLD

SEQ ID NO: 238 - DNA, 2181 bp, Homo sapiens
agagagccgagctctggagcctcagcgagcggaggaggaggcgcagggccgacggccgagtactgcggtgagagccagcgggccagcgccagcctcaacagccgccagaagtacacgaggaaccggcggcggcgtgtgcgtgtaggcccgtgtgcgggcggcggcgcgggaggagcgcggagcggcagccggctggggcgggtggcatcatggacgagaaggtgttcaccaaggagctggaccagtggatcgagcagctgaacgagtgcaagcagctgtccgagtcccaggtcaagagcctctgcgagaaggctaaagaaatcctgacaaaagaatccaacgtgcaagaggttcgatgtccagttactgtctgtggagatgtgcatgggcaatttcatgatctcatggaactgtttagaattggtggcaaatcaccagatacaaattacttgtttatgggagattatgttgacagaggatattattcagttgaaacagttacactgcttgtagctcttaaggttcgttaccgtgaacgcatcaccattcttcgagggaatcatgagagcagacagatcacacaagtttatggtttctatgatgaatgtttaagaaaatatggaaatgcaaatgtttggaaatattttacagatctttttgactatcttcctctcactgccttggtggatgggcagatcttctgtctacatggtggtctctcgccatctatagatacactggatcatatcagagcacttgatcgcctacaagaagttccccatgagggtccaatgtgtgacttgctgtggtcagatccagatgaccgtggtggttggggtatatctcctcgaggagctggttacacctttgggcaagatatttctgagacatttaatcatgccaatggcctcacgttggtgtctagagctcaccagctagtgatggagggatataactggtgccatgaccggaatgtagtaacgattttcagtgctccaaactattgttatcgttgtggtaaccaagctgcaatcatggaacttgacgatactctaaaatactctttcttgcagtttgacccagcacctcgtagaggcgagccacatgttactcgtcgtaccccagactacttcctgtaatgaaattttaaacttgtacagtattgccatgaaccatatatcgacctaatggaaatgggaagagcaacagtaactccaaagtgtcagaaaatagttaacattcaaaaaacttgttttcacatggaccaaaagatgtgccatataaaaatacaaagcctcttgtcatcaacagccgtgaccactttagaatgaaccagttcattgcatgctgaagcgacattgttggtcaagaaaccagtttctggcatagcgctatttgtagttacttttgctttctctgagagactgcagataataagatgtaaacattaacacctcgtgaatacaatttaacttccatttagctatagctttactcagcatgactgtagataaggatagcagcaaacaatcattggagcttaatgaacatttttaaaaataattaccaaggcctcccttctacttgtgagttttgaaattgttctttttattttcagggataccgtttaatttaattatatgatttgtctgcactcagtttattccctactcaaatctcagccccatgttgttctttgttattgtcagaacctggtgagttgttttgaacagaactgttttttccccttcctgtaagacgatgtgactgcacaagagcactgcagtgtttttcataataaacttgtgaactaagaactgagaaggtcaaattttaattgtatcaatgggcaagactggtgctgtttattaaaaaagttaaatcaattgagtaaattttagaatttgtagacttgtaggtaaaataaaaatcaagggcactacataacctctctggtaactccttgacattcttcagattaacttcaggatttatttgtatttcacatattacaatttgtcacattgttggtgtgcactttgtgggttcttcctgcatattaacttgtttgtaagaaaggaaatctgtgctgcttcagtaagacttaattgtaaaaccatataacttgagatttaagtctttgggttgtgttttaataaaacagcatgttttcaggtagag

SEQ ID NO: 239 - protein, 309 aa, Homo sapiens
MDEKVFTKELDQWIEQLNECKQLSESQVKSLCEKAKEILTKESNVQEVRCPVTVCGDVHGQFHDLMELFRIGGKSPDTNYLFMGDYVDRGYYSVETVTLLVALKVRYRERITILRGNHESRQITQVYGFYDECLRKYGNANVWKYFTDLFDYLPLTALVDGQIFCLHGGLSPSIDTLDHIRALDRLQEVPHEGPMCDLLWSDPDDRGGWGISPRGAGYTFGQDISETFNHANGLTLVSRAHQLVMEGYNWCHDRNVVTIFSAPNYCYRCGNQAAIMELDDTLKYSFLQFDPAPRRGEPHVTRRTPDYFL

SEQ ID NO: 240 - DNA, 4005 bp, Homo sapiens
cggctgcggttcctggtgctgctcggcgcgcggccagctttcggaacggaacgctcggcgtcgcgggccccgcccggaaagtttgccgtggagtcgcgacctcttggcccgcgcggcccggcatgaagcggcgttgaggagctgctgccgccgcttgccgctgccgccgccgccgcctgaggaggagctgcagcaccctgggccacgccgatgactactgcaaactgtggcgcccacgacgagctcgacttcaaactcgtctttggcgaggacggggcgccggcgccgccgcccccgggctcgcggcctgcagatcttgagccagatgattgtgcatccatttacatctttaatgtagatccacctccatctactttaaccacaccactttgcttaccacatcatggattaccgtctcactcttctgttttgtcaccatcgtttcagctccaaagtcacaaaaactatgaaggaacttgtgagattcctgaatctaaatatagcccattaggtggtcccaaaccctttgagtgcccaagtattcaaattacatctatctctcctaactgtcatcaagaattagatgcacatgaagatgacctacagataaatgacccagaacgggaatttttggaaaggccttctagagatcatctctatcttcctcttgagccatcctaccgggagtcttctcttagtcctagtcctgccagcagcatctcttctaggagttggttctctgatgcatcttcttgtgaatcgctttcacatatttatgatgatgtggactcagagttgaatgaagctgcagcccgatttacccttggatcccctctgacttctcctggtggctctccagggggctgccctggagaagaaacttggcatcaacagtatggacttggacactcattatcacccaggcaatctccttgccactctcctagatccagtgtcactgatgagaattggctgagccccaggccagcctcaggaccctcatcaaggcccacatccccctgtgggaaacggaggcactccagtgctgaagtttgttatgctgggtccctttcaccccatcactcacctgttccttcacctggtcactcccccaggggaagtgtgacagaagatacgtggctcaatgcttctgtccatggtgggtcaggccttggccctgcagtttttccatttcagtactgtgtagagactgacatccctctcaaaacaaggaaaacttctgaagatcaagctgccatactaccaggaaaattagagctgtgttcagatgaccaagggagtttatcaccagcccgggagacttcaatagatgatggccttggatctcagtatcctttaaagaaagattcatgtggtgatcagtttctttcagttccttcaccctttacctggagcaaaccaaagcctggccacacccctatatttcgcacatcttcattacctccactagactggcctttaccagctcattttggacaatgtgaactgaaaatagaagtgcaacctaaaactcatcatcgagcccattatgaaactgaaggtagccgaggggcagtaaaagcatctactgggggacatcctgttgtgaagctcctgggctataacgaaaagccaataaatctacaaatgtttattgggacagcagatgatcgatatttacgacctcatgcattttaccaggtgcatcgaatcactgggaagacagtcgctactgcaagccaagagataataattgccagtacaaaagttctggaaattccacttcttcctgaaaataatatgtcagccagtattgattgtgcaggtattttgaaactccgcaattcagatatagaacttcgaaaaggagaaactgatattggcagaaagaatactagagtacgacttgtgtttcgtgtacacatcccacagcccagtggaaaagtcctttctctgcagatagcctctatacccgttgagtgctcccagcggtctgctcaagaacttcctcatattgagaagtacagtatcaacagttgttctgtaaatggaggtcatgaaatggttgtgactggatctaattttcttccagaatccaaaatcatttttcttgaaaaaggacaagatggacgacctcagtgggaggtagaagggaagataatcagggaaaaatgtcaaggggctcacattgtccttgaagttcctccatatcataacccagcagttacagctgcagtgcaggtgcacttttatctttgcaatggcaagaggaaaaaaagccagtctcaacgttttacttatacaccagttttgatgaagcaagaacacagagaagagattgatttgtcttcagttccatctttgcctgtgcctcatcctgctcagacccagaggccttcctctgattcagggtgttcacatgacagtgtactgtcaggacagagaagtttgatttgctccatcccacaaacatatgcatccatggtgacctcatcccatctgccacagttgcagtgtagagatgagagtgttagtaaagaacagcatatgattccttctccaattgtacaccagccttttcaagtcacaccaacacctcctgtggggtcttcctatcagcctatgcaaactaatgttgtgtacaatggaccaacttgtcttcctattaatgctgcctctagtcaagaatttgattcagttttgtttcagcaggatgcaactctttctggtttagtgaatcttggctgtcaaccactgtcatccataccatttcattcttcaaattcaggctcaacaggacatctcttagcccatacacctcattctgtgcataccctgcctcatctgcaatcaatgggatatcattgttcaaatacaggacaaagatctctttcttctccagtggctgaccagattacaggtcagccttcgtctcagttacaacctattacatatggtccttcacattcagggtctgctacaacagcttccccagcagcttctcatcccttggctagttcaccgctttctgggccaccatctcctcagcttcagcctatgccttaccaatctcctagctcaggaactgcctcatcaccgtctccagccaccagaatgcattctggacagcactcaactcaagcacaaagtacgggccaggggggtctttctgcaccttcatccttaatatgtcacagtttgtgtgatccagcgtcatttccacctgatggggcaactgtgagcattaaacctgaaccagaagatcgagagcctaactttgcaaccattggtctgcaggacatcactttagatgatgaccaatttatatctgacttggaacaccagccatcaggttcagcagagaaatggcctaaccacagtgtgctctcatgtccagctcctttctggagaatctagaggtgaacgagataattgggagagacatgtcccagatttctgtttcccaaggagcaggggtgagcaggcaggctcccctcccgagtcctgagtccctggatttaggaagatctgatgggctctaacagtgcttactgcagccttgtgtccaccaccaacttctcagcatgtttctctccttggaccttgggtttccaactctgcagccttcaggtctggggccaggagtgggacccaccatttgtggggaaagtagcattcctccacctcaggccttgggtagatttggcaaaagaacaggagcagcataggctgtttgagctttggggaaatgaactttgctttttatatttaactaggatacttttatatgatgggtgctttgagtgtgaatgcagcaggctctcttgtttccgaggtgctgcttttgcaggtgacctggttacttagctaggattggtgatttgtactgctttatggtcatttgaagggccctttagtttttatgataatttttaaaataggaacttttgataagaccttctagaagcaaaaaaaaaaaaaaaaaaaaaaaaaagaaaaaaaaag

SEQ ID NO: 241 - protein, 1068 aa, Homo sapiens
MTTANCGAHDELDFKLVFGEDGAPAPPPPGSRPADLEPDDCASIYIFNVDPPPSTLTTPLCLPHHGLPSHSSVLSPSFQLQSHKNYEGTCEIPESKYSPLGGPKPFECPSIQITSISPNCHQELDAHEDDLQINDPEREFLERPSRDHLYLPLEPSYRESSLSPSPASSISSRSWFSDASSCESLSHIYDDVDSELNEAAARFTLGSPLTSPGGSPGGCPGEETWHQQYGLGHSLSPRQSPCHSPRSSVTDENWLSPRPASGPSSRPTSPCGKRRHSSAEVCYAGSLSPHHSPVPSPGHSPRGSVTEDTWLNASVHGGSGLGPAVFPFQYCVETDIPLKTRKTSEDQAAILPGKLELCSDDQGSLSPARETSIDDGLGSQYPLKKDSCGDQFLSVPSPFTWSKPKPGHTPIFRTSSLPPLDWPLPAHFGQCELKIEVQPKTHHRAHYETEGSRGAVKASTGGHPVVKLLGYNEKPINLQMFIGTADDRYLRPHAFYQVHRITGKTVATASQEIIIASTKVLEIPLLPENNMSASIDCAGILKLRNSDIELRKGETDIGRKNTRVRLVFRVHIPQPSGKVLSLQIASIPVECSQRSAQELPHIEKYSINSCSVNGGHEMVVTGSNFLPESKIIFLEKGQDGRPQWEVEGKIIREKCQGAHIVLEVPPYHNPAVTAAVQVHFYLCNGKRKKSQSQRFTYTPVLMKQEHREEIDLSSVPSLPVPHPAQTQRPSSDSGCSHDSVLSGQRSLICSIPQTYASMVTSSHLPQLQCRDESVSKEQHMIPSPIVHQPFQVTPTPPVGSSYQPMQTNVVYNGPTCLPINAASSQEFDSVLFQQDATLSGLVNLGCQPLSSIPFHSSNSGSTGHLLAHTPHSVHTLPHLQSMGYHCSNTGQRSLSSPVADQITGQPSSQLQPITYGPSHSGSATTASPAASHPLASSPLSGPPSPQLQPMPYQSPSSGTASSPSPATRMHSGQHSTQAQSTGQGGLSAPSSLICHSLCDPASFPPDGATVSIKPEPEDREPNFATIGLQDITLDDDQFISDLEHQPSGSAEKWPNHSVLSCPAPFWRI

SEQ ID NO: 242 - DNA, 3990 bp, Homo sapiens
cggctgcggttcctggtgctgctcggcgcgcggccagctttcggaacggaacgctcggcgtcgcgggccccgcccggaaagtttgccgtggagtcgcgacctcttggcccgcgcggcccggcatgaagcggcgttgaggagctgctgccgccgcttgccgctgccgccgccgccgcctgaggaggagctgcagcaccctgggccacgccgatgactactgcaaactgtggcgcccacgacgagctcgacttcaaactcgtctttggcgaggacggggcgccggcgccgccgcccccgggctcgcggcctgcagatcttgagccagatgattgtgcatccatttacatctttaatgtagatccacctccatctactttaaccacaccactttgcttaccacatcatggattaccgtctcactcttctgttttgtcaccatcgtttcagctccaaagtcacaaaaactatgaaggaacttgtgagattcctgaatctaaatatagcccattaggtggtcccaaaccctttgagtgcccaagtattcaaattacatctatctctcctaactgtcatcaagaattagatgcacatgaagatgacctacagataaatgacccagaacgggaatttttggaaaggccttctagagatcatctctatcttcctcttgagccatcctaccgggagtcttctcttagtcctagtcctgccagcagcatctcttctaggagttggttctctgatgcatcttcttgtgaatcgctttcacatatttatgatgatgtggactcagagttgaatgaagctgcagcccgatttacccttggatcccctctgacttctcctggtggctctccagggggctgccctggagaagaaacttggcatcaacagtatggacttggacactcattatcacccaggcaatctccttgccactctcctagatccagtgtcactgatgagaattggctgagccccaggccagcctcaggaccctcatcaaggcccacatccccctgtgggaaacggaggcactccagtgctgaagtttgttatgctgggtccctttcaccccatcactcacctgttccttcacctggtcactcccccaggggaagtgtgacagaagatacgtggctcaatgcttctgtccatggtgggtcaggccttggccctgcagtttttccatttcagtactgtgtagagactgacatccctctcaaaacaaggaaaacttctgaagatcaagctgccatactaccaggaaaattagagctgtgttcagatgaccaagggagtttatcaccagcccgggagacttcaatagatgatggccttggatctcagtatcctttaaagaaagattcatgtggtgatcagtttctttcagttccttcaccctttacctggagcaaaccaaagcctggccacacccctatatttcgcacatcttcattacctccactagactggcctttaccagctcattttggacaatgtgaactgaaaatagaagtgcaacctaaaactcatcatcgagcccattatgaaactgaaggtagccgaggggcagtaaaagcatctactgggggacatcctgttgtgaagctcctgggctataacgaaaagccaataaatctacaaatgtttattgggacagcagatgatcgatatttacgacctcatgcattttaccaggtgcatcgaatcactgggaagacagtcgctactgcaagccaagagataataattgccagtacaaaagttctggaaattccacttcttcctgaaaataatatgtcagccagtattgattgtgcaggtattttgaaactccgcaattcagatatagaacttcgaaaaggagaaactgatattggcagaaagaatactagagtacgacttgtgtttcgtgtacacatcccacagcccagtggaaaagtcctttctctgcagatagcctctatacccgttgagtgctcccagcggtctgctcaagaacttcctcatattgagaagtacagtatcaacagttgttctgtaaatggaggtcatgaaatggttgtgactggatctaattttcttccagaatccaaaatcatttttcttgaaaaaggacaagatggacgacctcagtgggaggtagaagggaagataatcagggaaaaatgtcaaggggctcacattgtccttgaagttcctccatatcataacccagcagttacagctgcagtgcaggtgcacttttatctttgcaatggcaagaggaaaaaaagccagtctcaacgttttacttatacaccagttttgatgaagcaagaacacagagaagagattgatttgtcttcagttccatctttgcctgtgcctcatcctgctcagacccagaggccttcctctgattcagggtgttcacatgacagtgtactgtcaggacagagaagtttgatttgctccatcccacaaacatatgcatccatggtgacctcatcccatctgccacagttgcagtgtagagatgagagtgttagtaaagaacagcatatgattccttctccaattgtacaccagccttttcaagtcacaccaacacctcctgtggggtcttcctatcagcctatgcaaactaatgttgtgtacaatggaccaacttgtcttcctattaatgctgcctctagtcaagaatttgattcagttttgtttcagcaggatgcaactctttctggtttagtgaatcttggctgtcaaccactgtcatccataccatttcattcttcaaattcaggctcaacaggacatctcttagcccatacacctcattctgtgcataccctgcctcatctgcaatcaatgggatatcattgttcaaatacaggacaaagatctctttcttctccagtggctgaccagattacaggtcagccttcgtctcagttacaacctattacatatggtccttcacattcagggtctgctacaacagcttccccagcagcttctcatcccttggctagttcaccgctttctgggccaccatctcctcagcttcagcctatgccttaccaatctcctagctcaggaactgcctcatcaccgtctccagccaccagaatgcattctggacagcactcaactcaagcacaaagtacgggccaggggggtctttctgcaccttcatccttaatatgtcacagtttgtgtgatccagcgtcatttccacctgatggggcaactgtgagcattaaacctgaaccagaagatcgagagcctaactttgcaaccattggtctgcaggacatcactttagatgatgatttgtttaccagtaataattttgacttgcttcagttgagacctacgttttggccagtcccagcaggaagatatctgaggaatctagagtgaacgagataattgggagagacatgtcccagatttctgtttcccaaggagcaggggtgagcaggcaggctcccctcccgagtcctgagtccctggatttaggaagatctgatgggctctaacagtgcttactgcagccttgtgtccaccaccaacttctcagcatgtttctctccttggaccttgggtttccaactctgcagccttcaggtctggggccaggagtgggacccaccatttgtggggaaagtagcattcctccacctcaggccttgggtagatttggcaaaagaacaggagcagcataggctgtttgagctttggggaaatgaactttgctttttatatttaactaggatacttttatatgatgggtgctttgagtgtgaatgcagcaggctctcttgtttccgaggtgctgcttttgcaggtgacctggttacttagctaggattggtgatttgtactgctttatggtcatttgaagggccctttagtttttatgataatttttaaaataggaacttttgataagaccttctagaagcaaaaaaaaaaaaaaaaaaaaaaaaaagaaaaaaaaag

SEQ ID NO: 243 - protein, 1065 aa, Homo sapiens
MTTANCGAHDELDFKLVFGEDGAPAPPPPGSRPADLEPDDCASIYIFNVDPPPSTLTTPLCLPHHGLPSHSSVLSPSFQLQSHKNYEGTCEIPESKYSPLGGPKPFECPSIQITSISPNCHQELDAHEDDLQINDPEREFLERPSRDHLYLPLEPSYRESSLSPSPASSISSRSWFSDASSCESLSHIYDDVDSELNEAAARFTLGSPLTSPGGSPGGCPGEETWHQQYGLGHSLSPRQSPCHSPRSSVTDENWLSPRPASGPSSRPTSPCGKRRHSSAEVCYAGSLSPHHSPVPSPGHSPRGSVTEDTWLNASVHGGSGLGPAVFPFQYCVETDIPLKTRKTSEDQAAILPGKLELCSDDQGSLSPARETSIDDGLGSQYPLKKDSCGDQFLSVPSPFTWSKPKPGHTPIFRTSSLPPLDWPLPAHFGQCELKIEVQPKTHHRAHYETEGSRGAVKASTGGHPVVKLLGYNEKPINLQMFIGTADDRYLRPHAFYQVHRITGKTVATASQEIIIASTKVLEIPLLPENNMSASIDCAGILKLRNSDIELRKGETDIGRKNTRVRLVFRVHIPQPSGKVLSLQIASIPVECSQRSAQELPHIEKYSINSCSVNGGHEMVVTGSNFLPESKIIFLEKGQDGRPQWEVEGKIIREKCQGAHIVLEVPPYHNPAVTAAVQVHFYLCNGKRKKSQSQRFTYTPVLMKQEHREEIDLSSVPSLPVPHPAQTQRPSSDSGCSHDSVLSGQRSLICSIPQTYASMVTSSHLPQLQCRDESVSKEQHMIPSPIVHQPFQVTPTPPVGSSYQPMQTNVVYNGPTCLPINAASSQEFDSVLFQQDATLSGLVNLGCQPLSSIPFHSSNSGSTGHLLAHTPHSVHTLPHLQSMGYHCSNTGQRSLSSPVADQITGQPSSQLQPITYGPSHSGSATTASPAASHPLASSPLSGPPSPQLQPMPYQSPSSGTASSPSPATRMHSGQHSTQAQSTGQGGLSAPSSLICHSLCDPASFPPDGATVSIKPEPEDREPNFATIGLQDITLDDDLFTSNNFDLLQLRPTFWPVPAGRYLRNLE

SEQ ID NO: 244 - DNA, 3769 bp, Homo sapiens
cggctgcggttcctggtgctgctcggcgcgcggccagctttcggaacggaacgctcggcgtcgcgggccccgcccggaaagtttgccgtggagtcgcgacctcttggcccgcgcggcccggcatgaagcggcgttgaggagctgctgccgccgcttgccgctgccgccgccgccgcctgaggaggagctgcagcaccctgggccacgccgatgactactgcaaactgtggcgcccacgacgagctcgacttcaaactcgtctttggcgaggacggggcgccggcgccgccgcccccgggctcgcggcctgcagatcttgagccagatgattgtgcatccatttacatctttaatgtagatccacctccatctactttaaccacaccactttgcttaccacatcatggattaccgtctcactcttctgttttgtcaccatcgtttcagctccaaagtcacaaaaactatgaaggaacttgtgagattcctgaatctaaatatagcccattaggtggtcccaaaccctttgagtgcccaagtattcaaattacatctatctctcctaactgtcatcaagaattagatgcacatgaagatgacctacagataaatgacccagaacgggaatttttggaaaggccttctagagatcatctctatcttcctcttgagccatcctaccgggagtcttctcttagtcctagtcctgccagcagcatctcttctaggagttggttctctgatgcatcttcttgtgaatcgctttcacatatttatgatgatgtggactcagagttgaatgaagctgcagcccgatttacccttggatcccctctgacttctcctggtggctctccagggggctgccctggagaagaaacttggcatcaacagtatggacttggacactcattatcacccaggcaatctccttgccactctcctagatccagtgtcactgatgagaattggctgagccccaggccagcctcaggaccctcatcaaggcccacatccccctgtgggaaacggaggcactccagtgctgaagtttgttatgctgggtccctttcaccccatcactcacctgttccttcacctggtcactcccccaggggaagtgtgacagaagatacgtggctcaatgcttctgtccatggtgggtcaggccttggccctgcagtttttccatttcagtactgtgtagagactgacatccctctcaaaacaaggaaaacttctgaagatcaagctgccatactaccaggaaaattagagctgtgttcagatgaccaagggagtttatcaccagcccgggagacttcaatagatgatggccttggatctcagtatcctttaaagaaagattcatgtggtgatcagtttctttcagttccttcaccctttacctggagcaaaccaaagcctggccacacccctatatttcgcacatcttcattacctccactagactggcctttaccagctcattttggacaatgtgaactgaaaatagaagtgcaacctaaaactcatcatcgagcccattatgaaactgaaggtagccgaggggcagtaaaagcatctactgggggacatcctgttgtgaagctcctgggctataacgaaaagccaataaatctacaaatgtttattgggacagcagatgatcgatatttacgacctcatgcattttaccaggtgcatcgaatcactgggaagacagtcgctactgcaagccaagagataataattgccagtacaaaagttctggaaattccacttcttcctgaaaataatatgtcagccagtattgattgtgcaggtattttgaaactccgcaattcagatatagaacttcgaaaaggagaaactgatattggcagaaagaatactagagtacgacttgtgtttcgtgtacacatcccacagcccagtggaaaagtcctttctctgcagatagcctctatacccgttgagtgctcccagcggtctgctcaagaacttcctcatattgagaagtacagtatcaacagttgttctgtaaatggaggtcatgaaatggttgtgactggatctaattttcttccagaatccaaaatcatttttcttgaaaaaggacaagatggacgacctcagtgggaggtagaagggaagataatcagggaaaaatgtcaaggggctcacattgtccttgaagttcctccatatcataacccagcagttacagctgcagtgcaggtgcacttttatctttgcaatggcaagaggaaaaaaagccagtctcaacgttttacttatacaccagttttgatgaagcaagaacacagagaagagattgatttgtcttcagttccatctttgcctgtgcctcatcctgctcagacccagaggccttcctctgattcagggtgttcacatgacagtgtactgtcaggacagagaagtttgatttgctccatcccacaaacatatgcatccatggtgacctcatcccatctgccacagttgcagtgtagagatgagagtgttagtaaagaacagcatatgattccttctccaattgtacaccagccttttcaagtcacaccaacacctcctgtggggtcttcctatcagcctatgcaaactaatgttgtgtacaatggaccaacttgtcttcctattaatgctgcctctagtcaagaatttgattcagttttgtttcagcaggatgcaactctttctggtttagtgaatcttggctgtcaaccactgtcatccataccatttcattcttcaaattcaggctcaacaggacatctcttagcccatacacctcattctgtgcataccctgcctcatctgcaatcaatgggatatcattgttcaaatacaggacaaagatctctttcttctccagtggctgaccagattacaggtcagccttcgtctcagttacaacctattacatatggtccttcacattcagggtctgctacaacagcttccccagcagcttctcatcccttggctagttcaccgctttctgggccaccatctcctcagcttcagcctatgccttaccaatctcctagctcaggaactgcctcatcaccgtctccagccaccagaatgcattctggacagcactcaactcaagcacaaagtacgggccaggggggtctttctgcaccttcatccttaatatgtcacagtttgtgtgatccagcgtcatttccacctgatggggcaactgtgagcattaaacctgaaccagaagatcgagagcctaactttgcaaccattggtctgcaggacatcactttagatgatggtaagttcatctctgatatgttcttgaagtagtgaagattcagggactttattctcccaagtgtcatgaaaaagtttctatggattgcttattggcatatggttgggcttttaaataagttgttattagaaatatatgttaatatataactttgccaggtaccacggctcacgcctgtatcccagcactttggaaggctgaggcgggtggatcacaaggtcaggagttcaagaccagcctggccaacatggtgtaacgctgtctctactaaaaatacaaaaaattagccaggcatggtggtgtgtgactataatcccagctactcgggaggctgagacaggagaatcacttgaacccgggaggtggcagttgcagggagctaagatcgcgccattgcactccagcctgggcggcagagcaagactccgtctcgggaaaaaaaaaaaaaaaaaa

SEQ ID NO: 245 - protein, 1045 aa, Homo sapiens
MTTANCGAHDELDFKLVFGEDGAPAPPPPGSRPADLEPDDCASIYIFNVDPPPSTLTTPLCLPHHGLPSHSSVLSPSFQLQSHKNYEGTCEIPESKYSPLGGPKPFECPSIQITSISPNCHQELDAHEDDLQINDPEREFLERPSRDHLYLPLEPSYRESSLSPSPASSISSRSWFSDASSCESLSHIYDDVDSELNEAAARFTLGSPLTSPGGSPGGCPGEETWHQQYGLGHSLSPRQSPCHSPRSSVTDENWLSPRPASGPSSRPTSPCGKRRHSSAEVCYAGSLSPHHSPVPSPGHSPRGSVTEDTWLNASVHGGSGLGPAVFPFQYCVETDIPLKTRKTSEDQAAILPGKLELCSDDQGSLSPARETSIDDGLGSQYPLKKDSCGDQFLSVPSPFTWSKPKPGHTPIFRTSSLPPLDWPLPAHFGQCELKIEVQPKTHHRAHYETEGSRGAVKASTGGHPVVKLLGYNEKPINLQMFIGTADDRYLRPHAFYQVHRITGKTVATASQEIIIASTKVLEIPLLPENNMSASIDCAGILKLRNSDIELRKGETDIGRKNTRVRLVFRVHIPQPSGKVLSLQIASIPVECSQRSAQELPHIEKYSINSCSVNGGHEMVVTGSNFLPESKIIFLEKGQDGRPQWEVEGKIIREKCQGAHIVLEVPPYHNPAVTAAVQVHFYLCNGKRKKSQSQRFTYTPVLMKQEHREEIDLSSVPSLPVPHPAQTQRPSSDSGCSHDSVLSGQRSLICSIPQTYASMVTSSHLPQLQCRDESVSKEQHMIPSPIVHQPFQVTPTPPVGSSYQPMQTNVVYNGPTCLPINAASSQEFDSVLFQQDATLSGLVNLGCQPLSSIPFHSSNSGSTGHLLAHTPHSVHTLPHLQSMGYHCSNTGQRSLSSPVADQITGQPSSQLQPITYGPSHSGSATTASPAASHPLASSPLSGPPSPQLQPMPYQSPSSGTASSPSPATRMHSGQHSTQAQSTGQGGLSAPSSLICHSLCDPASFPPDGATVSIKPEPEDREPNFATIGLQDITLDDGKFISDMFLK

SEQ ID NO: 246 - DNA, 3901 bp, Homo sapiens
cggctgcggttcctggtgctgctcggcgcgcggccagctttcggaacggaacgctcggcgtcgcgggccccgcccggaaagtttgccgtggagtcgcgacctcttggcccgcgcggcccggcatgaagcggcgttgaggagctgctgccgccgcttgccgctgccgccgccgccgcctgaggaggagctgcagcaccctgggccacgccgatgactactgcaaactgtggcgcccacgacgagctcgacttcaaactcgtctttggcgaggacggggcgccggcgccgccgcccccgggctcgcggcctgcagatcttgagccagatgattgtgcatccatttacatctttaatgtagatccacctccatctactttaaccacaccactttgcttaccacatcatggattaccgtctcactcttctgttttgtcaccatcgtttcagctccaaagtcacaaaaactatgaaggaacttgtgagattcctgaatctaaatatagcccattaggtggtcccaaaccctttgagtgcccaagtattcaaattacatctatctctcctaactgtcatcaagaattagatgcacatgaagatgacctacagataaatgacccagaacgggaatttttggaaaggccttctagagatcatctctatcttcctcttgagccatcctaccgggagtcttctcttagtcctagtcctgccagcagcatctcttctaggagttggttctctgatgcatcttcttgtgaatcgctttcacatatttatgatgatgtggactcagagttgaatgaagctgcagcccgatttacccttggatcccctctgacttctcctggtggctctccagggggctgccctggagaagaaacttggcatcaacagtatggacttggacactcattatcacccaggcaatctccttgccactctcctagatccagtgtcactgatgagaattggctgagccccaggccagcctcaggaccctcatcaaggcccacatccccctgtgggaaacggaggcactccagtgctgaagtttgttatgctgggtccctttcaccccatcactcacctgttccttcacctggtcactcccccaggggaagtgtgacagaagatacgtggctcaatgcttctgtccatggtgggtcaggccttggccctgcagtttttccatttcagtactgtgtagagactgacatccctctcaaaacaaggaaaacttctgaagatcaagctgccatactaccaggaaaattagagctgtgttcagatgaccaagggagtttatcaccagcccgggagacttcaatagatgatggccttggatctcagtatcctttaaagaaagattcatgtggtgatcagtttctttcagttccttcaccctttacctggagcaaaccaaagcctggccacacccctatatttcgcacatcttcattacctccactagactggcctttaccagctcattttggacaatgtgaactgaaaatagaagtgcaacctaaaactcatcatcgagcccattatgaaactgaaggtagccgaggggcagtaaaagcatctactgggggacatcctgttgtgaagctcctgggctataacgaaaagccaataaatctacaaatgtttattgggacagcagatgatcgatatttacgacctcatgcattttaccaggtgcatcgaatcactgggaagacagtcgctactgcaagccaagagataataattgccagtacaaaagttctggaaattccacttcttcctgaaaataatatgtcagccagtattgattgtgcaggtattttgaaactccgcaattcagatatagaacttcgaaaaggagaaactgatattggcagaaagaatactagagtacgacttgtgtttcgtgtacacatcccacagcccagtggaaaagtcctttctctgcagatagcctctatacccgttgagtgctcccagcggtctgctcaagaacttcctcatattgagaagtacagtatcaacagttgttctgtaaatggaggtcatgaaatggttgtgactggatctaattttcttccagaatccaaaatcatttttcttgaaaaaggacaagatggacgacctcagtgggaggtagaagggaagataatcagggaaaaatgtcaaggggctcacattgtccttgaagttcctccatatcataacccagcagttacagctgcagtgcaggtgcacttttatctttgcaatggcaagaggaaaaaaagccagtctcaacgttttacttatacaccagttttgatgaagcaagaacacagagaagagattgatttgtcttcagttccatctttgcctgtgcctcatcctgctcagacccagaggccttcctctgattcagggtgttcacatgacagtgtactgtcaggacagagaagtttgatttgctccatcccacaaacatatgcatccatggtgacctcatcccatctgccacagttgcagtgtagagatgagagtgttagtaaagaacagcatatgattccttctccaattgtacaccagccttttcaagtcacaccaacacctcctgtggggtcttcctatcagcctatgcaaactaatgttgtgtacaatggaccaacttgtcttcctattaatgctgcctctagtcaagaatttgattcagttttgtttcagcaggatgcaactctttctggtttagtgaatcttggctgtcaaccactgtcatccataccatttcattcttcaaattcaggctcaacaggacatctcttagcccatacacctcattctgtgcataccctgcctcatctgcaatcaatgggatatcattgttcaaatacaggacaaagatctctttcttctccagtggctgaccagattacaggtcagccttcgtctcagttacaacctattacatatggtccttcacattcagggtctgctacaacagcttccccagcagcttctcatcccttggctagttcaccgctttctgggccaccatctcctcagcttcagcctatgccttaccaatctcctagctcaggaactgcctcatcaccgtctccagccaccagaatgcattctggacagcactcaactcaagcacaaagtacgggccaggggggtctttctgcaccttcatccttaatatgtcacagtttgtgtgatccagcgtcatttccacctgatggggcaactgtgagcattaaacctgaaccagaagatcgagagcctaactttgcaaccattggtctgcaggacatcactttagatgatgtgaacgagataattgggagagacatgtcccagatttctgtttcccaaggagcaggggtgagcaggcaggctcccctcccgagtcctgagtccctggatttaggaagatctgatgggctctaacagtgcttactgcagccttgtgtccaccaccaacttctcagcatgtttctctccttggaccttgggtttccaactctgcagccttcaggtctggggccaggagtgggacccaccatttgtggggaaagtagcattcctccacctcaggccttgggtagatttggcaaaagaacaggagcagcataggctgtttgagctttggggaaatgaactttgctttttatatttaactaggatacttttatatgatgggtgctttgagtgtgaatgcagcaggctctcttgtttccgaggtgctgcttttgcaggtgacctggttacttagctaggattggtgatttgtactgctttatggtcatttgaagggccctttagtttttatgataatttttaaaataggaacttttgataagaccttctagaagcaaaaaaaaaaaaaaaaaaaaaaaaaagaaaaaaaaag

SEQ ID NO: 247 - protein, 1075 aa, Homo sapiens
MTTANCGAHDELDFKLVFGEDGAPAPPPPGSRPADLEPDDCASIYIFNVDPPPSTLTTPLCLPHHGLPSHSSVLSPSFQLQSHKNYEGTCEIPESKYSPLGGPKPFECPSIQITSISPNCHQELDAHEDDLQINDPEREFLERPSRDHLYLPLEPSYRESSLSPSPASSISSRSWFSDASSCESLSHIYDDVDSELNEAAARFTLGSPLTSPGGSPGGCPGEETWHQQYGLGHSLSPRQSPCHSPRSSVTDENWLSPRPASGPSSRPTSPCGKRRHSSAEVCYAGSLSPHHSPVPSPGHSPRGSVTEDTWLNASVHGGSGLGPAVFPFQYCVETDIPLKTRKTSEDQAAILPGKLELCSDDQGSLSPARETSIDDGLGSQYPLKKDSCGDQFLSVPSPFTWSKPKPGHTPIFRTSSLPPLDWPLPAHFGQCELKIEVQPKTHHRAHYETEGSRGAVKASTGGHPVVKLLGYNEKPINLQMFIGTADDRYLRPHAFYQVHRITGKTVATASQEIIIASTKVLEIPLLPENNMSASIDCAGILKLRNSDIELRKGETDIGRKNTRVRLVFRVHIPQPSGKVLSLQIASIPVECSQRSAQELPHIEKYSINSCSVNGGHEMVVTGSNFLPESKIIFLEKGQDGRPQWEVEGKIIREKCQGAHIVLEVPPYHNPAVTAAVQVHFYLCNGKRKKSQSQRFTYTPVLMKQEHREEIDLSSVPSLPVPHPAQTQRPSSDSGCSHDSVLSGQRSLICSIPQTYASMVTSSHLPQLQCRDESVSKEQHMIPSPIVHQPFQVTPTPPVGSSYQPMQTNVVYNGPTCLPINAASSQEFDSVLFQQDATLSGLVNLGCQPLSSIPFHSSNSGSTGHLLAHTPHSVHTLPHLQSMGYHCSNTGQRSLSSPVADQITGQPSSQLQPITYGPSHSGSATTASPAASHPLASSPLSGPPSPQLQPMPYQSPSSGTASSPSPATRMHSGQHSTQAQSTGQGGLSAPSSLICHSLCDPASFPPDGATVSIKPEPEDREPNFATIGLQDITLDDVNEIIGRDMSQISVSQGAGVSRQAPLPSPESLDLGRSDGL

SEQ ID NO: 248 - DNA, 1039 bp, Homo sapiens
tgcctgtcttttccgtgctacctgcagaggggtccatacggcgttgttctggattcccgtcgtaacttaaagggaaactttcacaatgtccggagcccttgatgtcctgcaaatgaaggaggaggatgtccttaagttccttgcagcaggaacccacttaggtggcaccaatcttgacttccagatggaacagtacatctataaaaggaaaagtgatggcatctatatcataaatctcaagaggacctgggagaagcttctgctggcagctcgtgcaattgttgccattgaaaaccctgctgatgtcagtgttatatcctccaggaatactggccagagggctgtgctgaagtttgctgctgccactggagccactccaattgctggccgcttcactcctggaaccttcactaaccagatccaggcagccttccgggagccacggcttcttgtggttactgaccccagggctgaccaccagcctctcacggaggcatcttatgttaacctacctaccattgcgctgtgtaacacagattctcctctgcgctatgtggacattgccatcccatgcaacaacaagggagctcactcagtgggtttaatgtggtggatgctggctcgggaagttctgcgcatgcgtggcaccatttcccgtgaacacccatgggaggtcatgcctgatctgtacttctacagagatcctgaagagattgaaaaagaagagcaggctgctgctgagaaggcagtgaccaaggaggaatttcagggtgaatggactgctcccgctcctgagttcactgctactcagcctgaggttgcagactggtctgaaggtgtacaggtgccctctgtgcctattcagcaattccctactgaagactggagcgctcagcctgccacggaagactggtctgcagctcccactgctcaggccactgaatgggtaggagcaaccactgactggtcttaagctgttcttgcataggctcttaagcagcatggaaaaatggttgatggaaaataaacatcagtttct

SEQ ID NO: 249 - protein, 295 aa, Homo sapiens [sequence omitted]

SEQ ID NO: 250 - DNA, 3414 bp, Homo sapiens
gcttacacagtatggccggcgacattagctagcgctcgctctactctctctaacgggaaagcagcggaatacaagagactgaactgtatctgcctctatttccaaaagactcacgttcaactttcgctcacacaaagccgggaaaattttattagtcctttttttaaaaaaagttaatataaaattatagcaaaaaaaaaaaggaacctgaactttagtaacacagctggaacaatcgcagcggcggcggcagcggcgggagaagaggtttaatttagttgattttctgtggttgttggttgttcgctagtctcacggtgatggaagctgcacattttttcgaagggaccgagaagctgctggaggtttggttctcccggcagcagcccgacgcaaaccaaggatctggggatcttcgcactatcccaagatctgagtgggacatacttttgaaggatgtgcaatgttcaatcataagtgtgacaaaaactgacaagcaggaagcttatgtactcagtgagagtagcatgtttgtctccaagagacgtttcattttgaagacatgtggtaccaccctcttgctgaaagcactggttcccctgttgaagcttgctagggattacagtgggtttgactcaattcaaagcttcttttattctcgtaagaatttcatgaagccttctcaccaagggtacccacaccggaatttccaggaagaaatagagtttcttaatgcaattttcccaaatggagcaggatattgtatgggacgtatgaattctgactgttggtacttatatactctggatttcccagagagtcgggtaatcagtcagccagatcaaaccttggaaattctgatgagtgagcttgacccagcagttatggaccagttctacatgaaagatggtgttactgcaaaggatgtcactcgtgagagtggaattcgtgacctgataccaggttctgtcattgatgccacaatgttcaatccttgtgggtattcgatgaatggaatgaaatcggatggaacttattggactattcacatcactccagaaccagaattttcttatgttagctttgaaacaaacttaagtcagacctcctatgatgacctgatcaggaaagttgtagaagtcttcaagccaggaaaatttgtgaccaccttgtttgttaatcagagttctaaatgtcgcacagtgcttgcttcgccccagaagattgaaggttttaagcgtcttgattgccagagtgctatgttcaatgattacaattttgtttttaccagttttgctaagaagcagcaacaacagcagagttgattaagaaaaatgaagaaaaaacgcaaaaagagaacacatgtagaaggtggtggatgctttctagatgtcgatgctgggggcagtgctttccataaccaccactgtgtagttgcagaaagccctagatgtaatgatagtgtaatcattttgaattgtatgcattattatatcaaggagttagatatcttgcatgaatgctctcttctgtgtttaggtattctctgccactcttgctgtgaaattgaagtggatgtagaaaaaaccttttactatatgaaactttacaacacttgtgaaagcaactcaatttggtttatgcacagtgtaatatttctccaagtatcatccaaaattccccacagacaaggctttcgtcctcattaggtgttggcctcagcctaaccctctaggactgttctattaaattgctgccagaattttacatccagttacctccactttctagaacatattctttactaatgttattgaaaccaatttctacttcatactgatgtttttggaaacagcaattaaagtttttcttccatagttgagtccttagaaaatgattccagttactcattttgcatattgctatttaacattattggaccctgcatttatagtcctttgatttcttccctctccctggtgtctcccccaagaccccaaataaagcaataccctgttaacactgtgggtttatatactaattctataccccagatggggaattaggggggagatggtccctgggcttaatattctttaaagggcatgggaatttagcctctcttttattgtaatgtgctcttttggaaaatagttggttagcagggagaccagagttgtagattgagattgggtgtactggctgttctgtggaaaacatacattctgtgttcctcgaataagtgaaattgagcttctaatgagatgcacccctttactaacttgatgatgatataaaattcatttttatttagttaattaccagagagatttagcataattttgcttctggattcagtaaatcaagtcagcttggatcattcaccttaacttttcctttagcagccctttccactagtttcccattaagtagtgttctataaactttgatccaaagcagaatcaatgtcttttccatctcgtgacttaaagttctgtgactgtgatgcatgtgagtgttccgacttcatctgttcctcttaactacggtgtttcccttaccgatcggcattcataggatgaaatgaatgactgtcccagaatgagaatttgtccagattattcagataaacatcataaagagaataacattataaataagtagaatatgaataaatagaataataaaattccaaaatactcaatgggaaatgactagtaatataggctttcaagagttggtacctttacgtatatttgcagattctctgggattttaaggaactgagaaaacagaaaagttgactaaattttatatttcttgtcctctaaatattttgataatttctggattgatgcagtgatgtttttcgttccttgtatttataaatgaaaacctttttttggtgtttctaaacctaaaatctacttggtttgaaatcaagtggttggaacactgtttgacttttatttgaagcatgttgttgattgaaaatttcattgaggaagttttcaatcagtgtgatcagtttgattctgtaatgagcacagcacctaatattttgaggagctctgttttgaggaccaatgcttaaggtggaccttgttgctaaacaatatcccaatagatttgttgacttgaggtctggtttggttttgtttttgttttgttttggttttgttttgtttcccaatagaattaagaattctaatgttgaaaaactgtataaatttttatgggacaaagcctagaaaagagaaatgtagtttgaatcataatctaaatcatcgtatgataggaaggaaaagttttggtgccataatttctcctttcactggtgttggacttaaatcagttgaaatgtatttctgtaccacaatttacgcttcaataaaagtttaattgtctagtgag

SEQ ID NO: 251 - protein, 334 aa, Homo sapiens
MEAAHFFEGTEKLLEVWFSRQQPDANQGSGDLRTIPRSEWDILLKDVQCSIISVTKTDKQEAYVLSESSMFVSKRRFILKTCGTTLLLKALVPLLKLARDYSGFDSIQSFFYSRKNFMKPSHQGYPHRNFQEEIEFLNAIFPNGAGYCMGRMNSDCWYLYTLDFPESRVISQPDQTLEILMSELDPAVMDQFYMKDGVTAKDVTRESGIRDLIPGSVIDATMFNPCGYSMNGMKSDGTYWTIHITPEPEFSYVSFETNLSQTSYDDLIRKVVEVFKPGKFVTTLFVNQSSKCRTVLASPQKIEGFKRLDCQSAMFNDYNFVFTSFAKKQQQQQS

SEQ ID NO: 252 - DNA, 3953 bp, Homo sapiens
ggcacgaggaaggagtcggggtcttccccagttttctcagccaggcggcggcggcgactggcaatgtttggcctcaaaagaaacgcggtaatcggactcaacctctactgtgggggggccggcttgggggccggcagcggcggcgccacccgcccgggagggcgacttttggctacggagaaggaggcctcggcccggcgagagatagggggaggggaggccggcgcggtgattggcggaagcgccggcgcaagccccccgtccaccctcacgccagactcccggagggtcgcgcggccgccgcccattggcgccgaggtccccgacgtcaccgcgacccccgcgaggctgcttttcttcgcgcccacccgccgcgcggcgccgcttgaggagatggaagccccggccgctgacgccatcatgtcgcccgaagaggagctggacgggtacgagccggagcctctcgggaagcggccggctgtcctgccgctgctggagttggtcggggaatctggtaataacaccagtacggacgggtcactaccctcgacgccgccgccagcagaggaggaggaggacgagttgtaccggcagtcgctggagattatctctcggtaccttcgggagcaggccaccggcgccaaggacacaaagccaatgggcaggtctggggccaccagcaggaaggcgctggagaccttacgacgggttggggatggcgtgcagcgcaaccacgagacggccttccaaggcatgcttcggaaactggacatcaaaaacgaagacgatgtgaaatcgttgtctcgagtgatgatccatgttttcagcgacggcgtaacaaactggggcaggattgtgactctcatttcttttggtgcctttgtggctaaacacttgaagaccataaaccaagaaagctgcatcgaaccattagcagaaagtatcacagacgttctcgtaaggacaaaacgggactggctagttaaacaaagaggctgggatgggtttgtggagttcttccatgtagaggacctagaaggtggcatcaggaatgtgctgctggcttttgcaggtgttgctggagtaggagctggtttggcatatctaataagatagccttactgtaagtgcaatagttgacttttaaccaaccaccaccaccaccaaaaccagtttatgcagttggactccaagctgtaacttcctagagttgcaccctagcaacctagccagaaaagcaagtggcaagaggattatggctaacaagaataaatacatgggaagagtgctccccattgattgaagagtcactgtctgaaagaagcaaagttcagtttcagcaacaaacaaactttgtttgggaagctatggaggaggacttttagatttagtgaagatggtagggtggaaagacttaatttccttgttgagaacaggaaagtggccagtagccaggcaagtcatagaattgattacccgccgaattcattaatttactgtagtgttaagagaagcactaagaatgccagtgacctgtgtaaaagttacaagtaatagaactatgactgtaagcctcagtactgtacaagggaagcttttcctctctctaattagctttcccagtatacttcttagaaagtccaagtgttcaggacttttatacctgttatactttggcttggtttccatgattcttactttattagcctagtttatcaccaataatacttgacggaaggctcagtaattagttatgaatatggatatcctcaattcttaagacagcttgtaaatgtatttgtaaaaattgtatatatttttacagaaagtctatttctttgaaacgaaggaagtatcgaatttacattagtttttttcatacccttttgaactttgcaacttccgtaattaggaacctgtttcttacagcttttctatgctaaactttgttctgttcagttctagagtgtatacagaacgaattgatgtgtaactgtatgcagactggttgtagtggaacaaatctgataactatgcaggtttaaattttcttatctgattttggtaagtattccttagataggtttttctttgaaaacctgggattgagaggttgatgaatggaaattctttcacttcattatatgcaagttttcaataattaggtctaagtggagttttaaggttactgatgacttacaaataatgggctctgattgggcaatactcatttgagttccttccatttgacctaatttaactggtgaaatttaaagtgaattcatgggctcatctttaaagcttttactaaaagattttcagctgaatggaactcattagctgtgtgcatataaaaagatcacatcaggtggatggagagacatttgatcccttgtttgcttaataaattataaaatgatggcttggaaaagcaggctagtctaaccatggtgctattattaggcttgcttgttacacacacaggtctaagcctagtatgtcaataaagcaaatacttactgttttgtttctattaatgattcccaaaccttgttgcaagtttttgcattggcatctttggatttcagtcttgatgtttgttctatcagacttaaccttttatttcctgtccttccttgaaattgctgattgttctgctccctctacagatatttatatcaattcctacagctttcccctgccatccctgaactctttctagcccttttagattttggcactgtgaaacccctgctggaaacctgagtgaccctccctccccaccaagagtccacagacctttcatctttcacgaacttgatcctgttagcaggtggtaataccatgggtgctgtgacactaacagtcattgagaggtgggaggaagtcccttttccttggactggtatcttttcaactattgttttatcctgtctttgggggcaatgtgtcaaaagtcccctcaggaattttcagaggaaagaacattttatgaggctttctctaaagtttcctttgtataggagtatgctcacttaaatttacagaaagaggtgagctgtgttaaacctcagagtttaaaagctactgataaactgaagaaagtgtctatattggaactagggtcatttgaaagcttcagtctcggaacatgacctttagtctgtggactccatttaaaaataggtatgaataagatgactaagaatgtaatggggaagaactgccctgcctgcccatctcagagccataaggtcatctttgctagagctatttttacctatgtatttatcgttcttgatcataagccgcttatttatatcatgtatctctaaggacctaaaagcactttatgtagtttttaattaatcttaagatctggttacggtaactaaaaaagcctgtctgccaaatccagtggaaacaagtgcatagatgtgaattggtttttaggggccccacttcccaattcattaggtatgactgtggaaatacagacaaggatcttagttgatattttgggcttggggcagtgagggcttaggacaccccaagtggtttgggaaaggaggaggggagtggtgggtttatagggggaggaggaggcaggtggtctaagtgctgactggctacgtagtttgggcaaatcctccaaaagggaaagggaggatttgcttagaaggatggcgctcccagtgactactttttgacttctgtttgtcttacgcttctctcagggaaaaacatgcagtcctctagtgtttcatgtacattctgtggggggtgaacaccttggttctggttaaacagctgtacttttgatagctgtgccaggaagggttaggaccaactacaaattaatgttggttgtcaaatgtagtgtgtttccctaactttctgtttttcctgagaaaaaaaaataaatcttttattcaaaaaaaaaaaaaaaaaaa

SEQ ID NO: 253 - protein, 350 aa, Homo sapiens
MFGLKRNAVIGLNLYCGGAGLGAGSGGATRPGGRLLATEKEASARREIGGGEAGAVIGGSAGASPPSTLTPDSRRVARPPPIGAEVPDVTATPARLLFFAPTRRAAPLEEMEAPAADAIMSPEEELDGYEPEPLGKRPAVLPLLELVGESGNNTSTDGSLPSTPPPAEEEEDELYRQSLEIISRYLREQATGAKDTKPMGRSGATSRKALETLRRVGDGVQRNHETAFQGMLRKLDIKNEDDVKSLSRVMIHVFSDGVTNWGRIVTLISFGAFVAKHLKTINQESCIEPLAESITDVLVRTKRDWLVKQRGWDGFVEFFHVEDLEGGIRNVLLAFAGVAGVGAGLAYLIR

SEQ ID NO: 254 - DNA, 1594 bp, Homo sapiens
gcccgccggtccacgccgcgcaccgctccgagggccagcgccacccgctccgcagccggcaccatgcgcgagatcgtgcacatccaggcgggccagtgcggcaaccagatcggcgccaagttttgggaggtcatcagcgatgagcatgggatcgaccccacaggcagttaccatggagacagtgacttgcagctggagagaatcaacgtgtactacaatgaggctgctggtaacaaatatgtacctcgggccatcctggtggatctggagcctggcaccatggactctgtcaggtctggacccttcggccagatcttcagaccagacaacttcgtgttcggccagagtggagccgggaataactgggccaagggccactacacagagggagccgagctggtcgactcggtcctggatgtggtgaggaaggagtcagagagctgtgactgtctccagggcttccagctgacccactctctggggggcggcacggggtccgggatgggcaccctgctcatcagcaagatccgggaagagtacccagaccgcatcatgaacaccttcagcgtcatgccctcacccaaggtgtcagacacggtggtggagccctacaacgccaccctctcggtccaccagctggtggaaaacacagatgaaacctactccattgataacgaggccctgtatgacatctgcttccgcaccctgaagctgaccacccccacctacggggacctcaaccacctggtgtcggccaccatgagcggggtcaccacctgcctgcgcttcccgggccagctgaacgcagacctgcgcaagctggcggtgaacatggtgcccttccctcgcctgcacttcttcatgcccggcttcgcgcccctgaccagccggggcagccagcagtaccgggcgctcacggtgcccgagctcacccagcagatgttcgactccaagaacatgatggccgcctgcgacccgcgccacggccgctacctgacggtggctgccatcttccggggccgcatgtccatgaaggaggtggacgagcagatgctcaacgtgcagaacaagaacagcagctacttcgtggagtggatccccaacaacgtgaagacggccgtgtgcgacatcccgccccgcggcctgaagatgtcggccaccttcatcggcaacagcacggccatccaggagctgttcaagcgcatctccgagcagttcacggccatgttccggcgcaaggccttcctgcactggtacacgggcgagggcatggacgagatggagttcaccgaggccgagagcaacatgaacgacctggtgtccgagtaccagcagtaccaggacgccacggccgacgaacaaggggagttcgaggaggaggagggcgaggacgaggcttaaaaacttctcagatcaatcgtgcatccttagtgaacttctgttgtcctcaagcatggtctttctacttgtaaactatggtgctcagttttgcctctgttagaaattcacactgttgatgtaatgatgtggaactcctctaaaaattacagtattgtctgtgaaggtatctatactaataaaaaagcatgtgtag

SEQ ID NO: 255 - DNA, 569 bp, Homo sapiens
cgcccgacttgtgcgcccgggaaaccccgtcgttccctttcccctggctggcagcgcggaggccgcacgatgcctggagttactgtaaaagacgtgaaccagcaggagttcgtcagagctctggcagccttcctcaaaaagtccgggaagctgaaagtccccgaatgggtggataccgtcaagctggccaagcacaaagagcttgctccctacgatgagaactggttctacacgcgagctgcttccacagcgcggcacctgtacctccggggtggcgctggggttggctccatgaccaagatctatgggggacgtcagagaaacggcgtcatgcccagccacttcagccgaggctccaagagtgtggcccgccgggtcctccaagccctggaggggctgaaaatggtggaaaaggaccaagatggcggccgcaaactgacacctcagggacaaagagatctggacagaatcgccggacaggtggcagctgccaacaagaagcattagaacaaaccatgctgggttaataaattgcctcattcgtaaaaaaaaaaaaaaaaaaaaaaaaa

SEQ ID NO: 256 - protein, 145 aa, Homo sapiens [sequence omitted]

SEQ ID NO: 257 - DNA, 3575 bp, Homo sapiens
gaattcctagactcccgagtcttggaatcttagaattacagggtcgcaggatcgcaggatcgcattctttagatttatggaatcacgttagccccgtcgtccagaatttaaaatctagatatctgaatctcagaatcttgaaagttactgagagccacgaaatcccgtattaaaaggtgcctataatataatccagttaaaaattttaaaatttgaagtttttcctcctttgtaaaaacgaaacagacgaaatctgggcgttttgcttctccattacttgggaagaaggaaaccaggagttttgtttagcgagtgtaaagcccctctcccttcgttcgaccaaccctctaccgcagaaggttgtcaagcaaagcctttgagcgtttccacacaccgggtcgacggagcaaggatctgggctttgctcgctcttccgaagcagctgccaacgcttggccgggcttagctgccctcagctcaccgccacgaagaacgcgactaaaaccctccaagcatgccacccgttaccggccagaacctctcgtcttgggatctcccacactcacctggcaccaccctcccgctctcacccacagccccgcccgcccccccccccccacaccggaaagctgcgtccgggctggagcactggaacccgcgcccaaggggggaatcctatgcgtcaggggcctcggagatcagcacacgcccaccagctatttaacagagtagaaccctgaggccctgcgaggggacaaggacaggccctggatctcccagtgaatggccagggaacgaacccggcgagaggggcgcgcgcaggatctcaggttaaggaccaagttccggctcagggacagcaggaaaggaactcagaaattggacaccatgaagcaaacgtgtgtcccgactgcccgccccttcccccggagacgcccacccggccaccgttctcttcccactcccccattacccacagccctcactcccctgcggaaggggtgcttggctgcctctgggggcttcagagctaccctggtcccgggggattggaggaggaggttacctctcctgcgtcgttctttcaatccgtgcaccactatccatcaaatagagacagatcctgggcctctcaaagacggatgattgggggtggtgattggcctatccctaaatatctaccacgcaaggactcttgagagatccagaccccggtacagtcgagggacctggggcccaaaaagsggaaagcggctacctcttaccacacagttgggaagcgcagtcctaaaggagacgcaggttggagactccgctaagcggagaagccgcagtggggccatggaaagtcaccttccctttcggttctaggaattactcattcgaaagatggggggactggagtgccgagtggctgtggcagccacgattggggtttggaaaccatcctgaaaggcccggggagccagtctcctggaacttctccctccctattcccacaaaaaccaagcgccctctcggccaattctcaccctctcaggacaaaaaagtgagatgagcccgtcctttcacctgcgatccaagcccttggcagaggcctgaaaagtccgaaaactccgagttcgggcggtgaggtctcccgagccggttcctgaactctccgggcctcagtcgatcggggtgggacccccccccccccgcccatctccaagcgccctccccaccctgacgttgtggggctcctaccgggcgccacagctgctcctacctggggaggtgcgccgggccccaggggggcggacaagtcggggggcgggcagggaaccggttccgccccacgcttcgtgtgcccctttaaggaggggaagccggccgagggaggagccggtccagtgtgtgcaggggagcgcctcgccagcggtccgcggggctggagaccacgccgtggagaggaccagcctcaggtcgccccgcctggggccgggtcccacctcactgccccgcctcgcctctctgcccgtggcgttaccgccaccttgcctcgggggcagggcatgggcggccccgccagatcgcccagcgccagtactaactgcctgctctgccttcgagccccgaagcctcttctgcgcgcgcacaacctaggcagtaatcctaaactagcgggcaccacagaccagctgcagccaccccaacccagggatcacttccggacccctcgaccgcccggcaccagcgcgcaagggacccttcagccggagaccagagtccagtccggtcgcgaggccaccgcgctgcccgcctcgagaagcacaacgcgggctgagccgtcggctagcgggtcactcccgagcctctgtctgcaccgcgccagccccagaccacggacgctgagcctccagcgcgcgccagcctgggccgctgggctctccgggacagcccgtgacgatcccctgagctctccgcagaagggccgagcgtccgttccggggacgccaggcccgcccccgccccccgacagcgtggggatccagagcccgggggtgtgggacgcccgcgccatgactgtcgagagggccgtcgtcgcgaagccggaggtgtggtaccgtgaaggaagagcgggcgcgccagcgccccctgcagcgcggaagccgccctacagctacattcggcgtcatgccatggccatcggcagcccgaggctcacgctgggcggcatctacaagttcatcaccgagggcttccccttctacccggacaaccccaaaaagtggcagaacagcatccgccacaacctcacaatcaacgactgcttcctcaagatcccgcgcgaggccggccgccgccgtaagggcaactactgggcgctcgaccccaacgcggaggacatgttcgagagcggcagcttcctgcgccgccgcaaggcttcaagcgtcggactctccacctacccggcttacatgcaggacgcggcggctgccgccgccgccgccgccgccgccgccatcttcccaggggcggtcccgccgcgcgccccccctaacagggctccgtctattcaggctaagcgcgccgccgtcgctggccgcccgcctcatctactacccgcggagtcgcccggccatttccgcgtcttcggcctggttcctgagcggccgctcaagcaagaattggggcccgcaccgtgggggcccggcggctctttcgccttttcctccgatggcgcccccgctaccaccaacggctaccaaccacgacaggcttcaccgggacccgtccggccaaccccctcctatgcggctgcctacgcgggccccgacggaagtacccccagggagaaggcagtgcgatactttgccgatgctgggcgggtcgggggcaccccttgcccccagcgggcggcagcagtggcgggtggagaccacggtggacttctacggcgcacgtcgcccggccagttcggagcgctggagcctgctacaactggcgggcagctcggagggccagtgcaggcgcctaccatgctcgccatgctgccgcttatcccggtgggatagatcggttcgagggaattc

SEQ ID NO: 258 - protein, 500 aa, Homo sapiens
MGGPARSPSASTNCLLCLRAPKPLLRAHNLGSNPKLAGTTDQLQPPQPRDHFRTPRPPGTSAQGTLQPETRVQSGREATALPASRSTTRAEPSASGSLPSLCLHRASPRPRTLSLQRAPAWAAGLSGTARDDPLSSPQKGRASVPGTPGPPPPPDSVGIQSPGVWDARAMTVERAVVAKPEVWYREGRAGAPAPPAARKPPYSYIRRHAMAIGSPRLTLGGIYKFITEGFPFYPDNPKKWQNSIRHNLTINDCFLKIPREAGRRRKGNYWALDPNAEDMFESGSFLRRRKASSVGLSTYPAYMQDAAAAAAAAAAAAIFPGAVPPRAPPNRAPSIQAKRAAVAGRPPHLLPAESPGHFRVFGLVPERPLKQELGPAPWGPGGSFAFSSDGAPATTNGYQPRQASPGPVRPTPSYAAAYAGPDGSTPREKAVRYFADAGRVGGTPCPQRAAAVAGGDHGGLLRRTSPGQFGALEPATTGGQLGGPVQAPTMLAMLPLIPVG

SEQ ID NO: 259 - DNA, 770 bp, Homo sapiens
gctcagcctgccccatcccctgctgatttgcctgttcctagagcacagccccctgccctgaagactttttataggctggtcacacccggagcaggagtcagccccagtcaggacacagcacagacatgagggcccccactcagctcctggggctcctggtgctctggctgccaggtaaggaaggagaacactaggattatactcggtcagtgtgctcagtactgtctggaacttcagggaagtcctctgataacatgattaattgcgacaatatttgtttttatgtttccaacttcaggtgccagatgtgacatccagatgacccagtctccatcctccctgtctgcatctgtaggagacagagtcaccatcacttgccgggcgagtcagggcattagcaataatttaaattggtatcagcagaaaccagggaaaactcctaagctcctgatctatgctgcacccagtctgcaaagtgggattccctctcggttcagtgacagtggatctggggcagattacactctcaccatccgcagcctgcagcctgaagattttgcaacttattagtgtcaacagagtgacagtacccctcccacagcgttacaagtcataacataatccccaaggaagcagatgtgtgaggctgggctgccccaatgctccttctggtgcctctatctgctgagggaagttctcaaactcagtcaggtttggaaagtcattgggagattttcctagaggaggccagggaggttcctctgaaccct

SEQ ID NO: 260 - protein, 106 aa, Homo sapiens [sequence omitted]

SEQ ID NO: 261 - DNA, 556 bp, Homo sapiens
ggggtgggcgggctgtcccagggctcaccgccattcatgaaggggtggagcctgcctgcctgcgggcctttataagagccactggctggctttccgggcaggcctcctggcagcacctgctgcagtgaacaggccggctgaggtgcacgggagcccgccggcctctctctgcccgtgtccgtccgtgaaattccagacagggctgcccgcgatggccctcccgaaaccttcagacggcaccctccccgcggaagtccagggacggggacagcgaaggagactcgtttggaccccgagccaaagcaaggccctacaagcctgctttgagcggaacccgtacccgggcatcaccaccagagaacggctggcccaggccatcggcattccggagcccagggtccagattctgtttcagaatgagaggtcatgccagctgaggcagcactggcattaatctcagtcctggcctgggagatgcggcccacaagaaggcaggtgaaagcggaccaccgtcaccggatcccagaccgccctgcccctccgagcctttgagtag

SEQ ID NO: 262 - protein, 80 aa, Homo sapiens
MALPKPSDGTLPAEVQGRGQRRRLVWTPSQSKALQACFERNPYPGITTRERLAQAIGIPEPRVQILFQNERSCQLRQHWH

SEQ ID NO: 263 - DNA, 954 bp, Homo sapiens
atgggaacagataaccagacttgggtgagtgaatttattctcctcggcctgtccagtgactgggacactcgggtctccctgtttgtcctgttcttggtcatgtatgtggtgaccgtgctggggaactgtctcattgtccttctgatcagactggacagccgactccacactcccatgtatttctttctcaccaacctctcccttgtcgatgtctcctatgccacaagtgtagtccctcagctgctggcacattttcttgcagaacataaagccatcccattccagagctgtgcagcccagttatttttctccctggccttgggtgggattgagtttgttctcctsgcggtgatggcctatgaccgctatgtggctgtgtgtgatgccctscgatactcggccatcatgcatggagggctgtgtgctaggttggccatcacatcctgggtcagtggcttcatcagctctcctgtgcagactgctatcacctttcagctgcccatgtgcagaaacaagtttattgatcacatatcctgtgaactcctagctgtggtcaggctggcttgtgtggacacctcctccaatgaggtcaccatcatggtgtctagcattgttcttctgatgacacccctctgcctggttcttttgtcctacatccagatcatctccaccatcctaaagatccagtccagagaaggaagaaagaaagctttccacacgtgtgcctctcacctcacagtggttgccctgtgctatggtgtggccattttcacttacatccagccccactccagtccctctgtccttcaggagaagttgttctctgtcttttatgccattttaacaccaatgctgaaccccatgatttacagcctaaggaataaagaggtgaagggggcctggcagaaactattatggaaattctctgggttaacatcaaagctggcaacttga

SEQ ID NO: 264 - protein, 317 aa, Homo sapiens
MGTDNQTWVSEFILLGLSSDWDTRVSLFVLFLVMYVVTVLGNCLIVLLIRLDSRLHTPMYFFLTNLSLVDVSYATSVVPQLLAHFLAEHKAIPFQSCAAQLFFSLALGGIEFVLLAVMAYDRYVAVCDALRYSAIMHGGLCARLAITSWVSGFISSPVQTAITFQLPMCRNKFIDHISCELLAVVRLACVDTSSNEVTIMVSSIVLLMTPLCLVLLSYIQIISTILKIQSREGRKKAFHTCASHLTVVALCYGVAIFTYIQPHSSPSVLQEKLFSVFYAILTPMLNPMIYSLRNKEVKGAWQKLLWKFSGLTSKLAT

SEQ ID NO: 265 - DNA, 818 bp, Homo sapiens
  misc_feature (58)..(58): n is a, c, g, or t
  misc_feature (103)..(103): n is a, c, g, or t
  misc_feature (105)..(105): n is a, c, g, or t
  misc_feature (113)..(113): n is a, c, g, or t
  misc_feature (123)..(123): n is a, c, g, or t
  misc_feature (125)..(125): n is a, c, g, or t
  misc_feature (129)..(130): n is a, c, g, or t
  misc_feature (135)..(135): n is a, c, g, or t
  misc_feature (137)..(137): n is a, c, g, or t
  misc_feature (170)..(170): n is a, c, g, or t
  misc_feature (176)..(176): n is a, c, g, or t
  misc_feature (184)..(184): n is a, c, g, or t
  misc_feature (220)..(220): n is a, c, g, or t
  misc_feature (246)..(246): n is a, c, g, or t
  misc_feature (248)..(248): n is a, c, g, or t
  misc_feature (268)..(268): n is a, c, g, or t
  misc_feature (273)..(274): n is a, c, g, or t
  misc_feature (324)..(324): n is a, c, g, or t
  misc_feature (342)..(342): n is a, c, g, or t
  misc_feature (349)..(349): n is a, c, g, or t
  misc_feature (356)..(356): n is a, c, g, or t
  misc_feature (389)..(390): n is a, c, g, or t
  misc_feature (399)..(399): n is a, c, g, or t
  misc_feature (407)..(407): n is a, c, g, or t
  misc_feature (421)..(421): n is a, c, g, or t
  misc_feature (452)..(452): n is a, c, g, or t
  misc_feature (456)..(456): n is a, c, g, or t
  misc_feature (464)..(465): n is a, c, g, or t
  misc_feature (471)..(474): n is a, c, g, or t
  misc_feature (490)..(494): n is a, c, g, or t
  misc_feature (502)..(503): n is a, c, g, or t
  misc_feature (519)..(519): n is a, c, g, or t
  misc_feature (522)..(522): n is a, c, g, or t
  misc_feature (525)..(581): n is a, c, g, or t
  misc_feature (586)..(818): n is a, c, g, or t
ggtagccctcatcaaactggacgtccaccacttctaaatgccctggaagtacaagganagggtagaccagactggtttggggaggtggcccagcatttgggtnanagaacagnagggactatngntttnnttggncnagagggctgggttagaggccagaaagtactggntcctgngaacccantcaaattccctgttggtcctgaaacttggggaagantcatgattgtcattggggaccctatngntgaaagaggtcccatcaaanccaannatttggctcccattcatgctgaggctccagagttcatggaaatgagtgtngagcaggaaattctggtnactggtntcaggtnggtcgatcttctagctccctatgacaagggtgnnaaattgggntttggggnggggctggagttgnaaatctttccttgatcatggagttaatcaanaatntccccaannccatgnnnntactctttttggggtnnnnnggcaatanntcccttggtttccctnggncannnnnnnnnnnnnnnnnnnnnnnnnnnnnnnnnnnnnnnnnnnnnnnnnnnnnnnnnttttnnnnnnnnnnnnnnnnnnnnnnnnnnnnnnnnnnnnnnnnnnnnnnnnnnnnnnnnnnnnnnnnnnnnnnnnnnnnnnnnnnnnnnnnnnnnnnnnnnnnnnnnnnnnnnnnnnnnnnnnnnnnnnnnnnnnnnnnnnnnnnnnnnnnnnnnnnnnnnnnnnnnnnnnnnnnnnnnnnnnnnnnnnnnnnnnnnnnnnnnnnnnnnnnnnnnnnnnnnnnnnnnnnnnnnnnn

SEQ ID NO: 266 - DNA, 4354 bp, Homo sapiens
gaattcggggggcgagtaagccagcggcaggaccagcgggcgggggccacaacaaaagctggcaggctgacagaggcggcctcaggacggaccttctggctactgaccgttttgctgtggttttcccggattgtgtgtaggtgtgagatcaaccatgagttccgttgcagttttgacccaagagagttttgctgaacaccgaagtgggctggttccgcaacaaatcaaagttgccactctaaattcagaagaggagagcgaccctccaacctacaaggatgccttccctccacttcctgagaaagctgcttgcctggaaagtgcccaggaacccgctggagcctgggggaacaagatccgacccatcaaggcttctgtcatcactcaggtgttccatgtacccctggaggagagaaaatacaaggatatgaaccagtttggagaaggtgaacaagcaaaaatctgccttgagatcatgcagagaactggtgctcacttggagctgtctttggccaaagaccaaggcctctccatcatggtgtcaggaaagctggatgctgtcatgaaagctcggaaggacattgttgctagactgcagactcaggcctcagcaactgttgccattcccaaagaacaccatcgctttgttattggcaaaaatggagagaaactgcaagacttggagctaaaaactgcaaccaaaatccagatcccacgcccagatgaccccagcaatcagatcaagatcactggcaccaaagagggcatcgagaaagctcgccatgaagtcttactcatctctgccgagcaggacaaacgtgctgtggagaggctagaagtagaaaaggcattccaccccttcatcgctgggccgtataatagactggttggcgagatcatgcaggagacaggcacgcgcatcaacatccccccacccagcgtgaaccggacagagattgtcttcactggagagaaggaacagttggctcaggctgtggctcgcatcaagaagatttatgaggagaagaaaaagaagactacaaccattgcagtggaagtgaagaaatcccaacacaagtatgtcattgggcccaagggcaattcattgcaggagatccttgagagaactggagtttccgttgagatcccaccctcagacagcatctctgagactgtaatacttcgaggcgaacctgaaaagttaggtcaggcgttgactgaagtctatgccaaggccaatagcttcaccgtctcctctgtcgccgccccttcctggcttcaccgtttcatcattggcaagaaagggcagaacctggccaaaatcactcagcagatgccaaaggttcacatcgagttcacagagggcgaagacaagatcaccctggagggccctacagaggatgtcaatgtggcccaggaacagatagaaggcatggtcaaagatttgattaaccggatggactatgtggagatcaacatcgaccacaagttccacaggcacctcattgggaagagcggtgccaacataaacagaatcaaagaccagtacaaggtgtccgtgcgcatccctcctgacagtgagaagagcaatttgatccgcatcgagggggacccacagggcgtgcagcaggccaagcgagagctgctggagcttgcatctcgcatggaaaatgagcgtaccaaggatctaatcattgagcaaagatttcatcgcacaatcattgggcagaagggtgaacggatccgtgaaattcgtgacaaattcccagaggtcatcattaactttccagacccagcacaaaaaagtgacattgtccagctcagaggacctaagaatgaggtggaaaaatgcacaaaatacatgcagaagatggtggcagatctggtggaaaatagctattcaatttctgttccgatcttcaaacagtttcacaagaatatcattgggaaaggaggcgcaaacattaaaaagattcgtgaagaaagcaacaccaaaatcgaccttccagcagagaatagcaattcagagaccattatcatcacaggcaagcgagccaactgcgaagctgcccggagcaggattctgtctattcagaaagacctggccaacatagccgaggtagaggtctccatccctgccaagctgcacaactccctcattggcaccaagggccgtctgatccgctccatcatggaggagtgcggcggggtccacattcactttcccgtggaaggttcaggaagcgacaccgttgttatcaggggcccttcctcggatgtggagaaggccaagaagcagctcctgcatctggcggaggagaagcaaaccaagagtttcactgttgacatccgcgccaagccagaataccacaaattcctcatcggcaaggggggcggcaaaattcgcaaggtgcgcgacagcactggagcacgtgtcatcttccctgcggctgaggacaaggaccaggacctgatcaccatcattggaaaggaggacgccgtccgagaggcacagaaggagctggaggccttgatccaaaacctggataatgtggtggaagactccatgctggtggaccccaagcaccaccgccacttcgtcatccgcagaggccaggtcttgcgggagattgctgaagagtatggcggggtgatggtcagcttcccacgctctggcacacagagcgacaaagtcaccctcaagggcgccaaggactgtgtggaggcagccaagaaacgcattcaggagatcattgaggacctggaagctcaggtgacattagaatgtgctataccccagaaattccatcgatctgtcatgggccccaaaggttccagaatccagcagattactcgggatttcagtgttcaaattaaattcccagacagagaggagaacgcagttcacagtacagagccagttgtccaggagaatggggacgaagctggggaggggagagaggctaaagattgtgaccccggctctccaaggaggtgtgacatcatcatcatctctggccggaaagaaaagtgtgaggctgccaaggaagctctggaggcattggttcctgtcaccattgaagtagaggtgccctttgaccttcaccgttacgttattgggcagaaaggaagtgggatccgcaagatgatggatgagtttgaggtgaacatacatgtcccggcacctgagctgcagtctgacatcatcgccatcacgggcctcgctgcaaatttggaccgggccaaggctggactgctggagcgtgtgaaggagctacaggccgagcaggaggaccgggctttaaggagttttaagctgagtgtcactgtagaccccaaataccatcccaagattatcgggagaaagggggcagtaattacccaaatccggttggagcatgacgtgaacatccagtttcctgataaggacgatgggaaccagccccaggaccaaattaccatcacagggtacgaaaagaacacagaagctgccagggatgctatactgagaattgtgggtgaacttgagcagatggtttctgaggacgtcccgctggaccaccgcgttcacgcccgcatcattggtgcccgcggcaaagccattcgcaaaatcatggacgaattcaaggtggacattcgcttcccacagagcggagccccagaccccaactgcgtcactgtgacggggctcccagagaatgtggaggaagccatcgaccacatcctcaatctggaggaggaatacctagctgacgtggtggacagtgaggcgctgcaggtatacatgaaacccccagcacacgaagaggccaaggcaccttccagaggctttgtggtgcgggacgcaccctggaccgccagcagcagtgagaaggctcctgacatgagcagctctgaggaatttcccagctttggggctcaggtggctcccaagaccctcccttggggccccaaacgataatgatcaaaaagaacagaaccctctccagcctgctgacccgaacccaaccacacaatggtttgtctcaatctgacccagcggctggaccctccgtaaattgttgagcgctcttccccttcccgaggtccgcagggagcctagcgcctggctgtgtgtgcggccgctcctccaggcctggccgtgcccgctcaggacctgctccactgtttaacaataaaccaaggtcatgagcattcgagctaagataacagactccagctcctggtccacccggcatgtcagtcagcactctggccttcatcacgagagctccgcagccgtggctaggattccacttcctgtgtcatgacctcaggaaataaacgtccttgactttataaaagccccgaattc

SEQ ID NO: 267 - protein, 1268 aa, Homo sapiens
MSSVAVLTQESFAEHRSGLVPQQIKVATLNSEEESDPPTYKDAFPPLPEKAACLESAQEPAGAWGNKIRPIKASVITQVFHVPLEERKYKDMNQFGEGEQAKICLEIMQRTGAHLELSLAKDQGLSIMVSGKLDAVMKARKDIVARLQTQASATVAIPKEHHRFVIGKNGEKLQDLELKTATKIQIPRPDDPSNQIKITGTKEGIEKARHEVLLISAEQDKRAVERLEVEKAFHPFIAGPYNRLVGEIMQETGTRINIPPPSVNRTEIVFTGEKEQLAQAVARIKKIYEEKKKKTTTIAVEVKKSQHKYVIGPKGNSLQEILERTGVSVEIPPSDSISETVILRGEPEKLGQALTEVYAKANSFTVSSVAAPSWLHRFIIGKKGQNLAKITQQMPKVHIEFTEGEDKITLEGPTEDVNVAQEQIEGMVKDLINRMDYVEINIDHKFHRHLIGKSGANINRIKDQYKVSVRIPPDSEKSNLIRIEGDPQGVQQAKRELLELASRMENERTKDLIIEQRFHRTIIGQKGERIREIRDKFPEVIINFPDPAQKSDIVQLRGPKNEVEKCTKYMQKMVADLVENSYSISVPIFKQFHKNIIGKGGANIKKIREESNTKIDLPAENSNSETIIITGKRANCEAARSRILSIQKDLANIAEVEVSIPAKLHNSLIGTKGRLIRSIMEECGGVHIHFPVEGSGSDTVVIRGPSSDVEKAKKQLLHLAEEKQTKSFTVDIRAKPEYHKFLIGKGGGKIRKVRDSTGARVIFPAAEDKDQDLITIIGKEDAVREAQKELEALIQNLDNVVEDSMLVDPKHHRHFVIRRGQVLREIAEEYGGVMVSFPRSGTQSDKVTLKGAKDCVEAAKKRIQEIIEDLEAQVTLECAIPQKFHRSVMGPKGSRIQQITRDFSVQIKFPDREENAVHSTEPVVQENGDEAGEGREAKDCDPGSPRRCDIIIISGRKEKCEAAKEALEALVPVTIEVEVPFDLHRYVIGQKGSGIRKMMDEFEVNIHVPAPELQSDIIAITGLAANLDRAKAGLLERVKELQAEQEDRALRSFKLSVTVDPKYHPKIIGRKGAVITQIRLEHDVNIQFPDKDDGNQPQDQITITGYEKNTEAARDAILRIVGELEQMVSEDVPLDHRVHARIIGARGKAIRKIMDEFKVDIRFPQSGAPDPNCVTVTGLPENVEEAIDHILNLEEEYLADVVDSEALQVYMKPPAHEEAKAPSRGFVVRDAPWTASSSEKAPDMSSSEEFPSFGAQVAPKTLPWGPKR

SEQ ID NO: 268 - DNA, 894 bp, Homo sapiens
ggccgcgctggtgaacaggacccgtcgccatgggccgtgtgatccgtggacagaggaagggcgccgggtctgtgttccgcgcgcacgtgaagcaccgtaaaggcgctgcgcgcctgcgcgccgtggatttcgctgagcggcacggctacatcaagggcatcgtcaaggacatcatccacgacccgggccgcggcgcgcccctcgccaaggtggtcttccgggatccgtatcggtttaagaagcggacggagctgttcattgccgccgagggcattcacacgggccagtttgtgtattgcggcaagaaggcccagctcaacattggcaatgtgctccctgtgggcaccatgcctgagggtacaatcgtgtgctgcctggaggagaagcctggagaccgtggcaagctggcccgggcatcagggaactatgccaccgttatctcccacaaccctgagaccaagaagacccgtgtgaagctgccctccggctccaagaaggttatctcctcagccaacagagctgtggttggtgtggtggctggaggtggccgaattgacaaacccatcttgaaggctggccgggcgtaccacaaatataaggcaaagaggaactgctggccacgagtacggggtgtggccatgaatcctgtggagcatccttttggaggtggcaaccaccagcacatcggcaagccctccaccatccgcagagatgcccctgctggccgcaaagtgggtctcattgctgcccgccggactggacgtctccggggaaccaagactgtgcaggagaaagagaactagtgctgagggcctcaataaagtttgtgtttatgccaaaaaaaaaaaaaaaaaaaaaaaaaaaaaaaaaaaaaaaaaaaaaaaaaaaaaaaaa

SEQ ID NO: 269 - protein, 257 aa, Homo sapiens [sequence omitted]

SEQ ID NO: 270 - DNA, 967 bp, Homo sapiens
gcggcatgggcagtatccgccgccatcctcttccgtgaggcgcgctgagacccggaccggccctcctgagaggatgccggtgcgggcgcccgcggagagggacccgtcgccatgggccgtgtgatccgtggacagaggaagggcgccgggtctgtgttccgcgcgcacgtgaagcaccgtaaaggcgctgcgcgcctgcgcgccgtggatttcgctgagcggcacggctacatcaagggcatcgtcaaggacatcatccacgacccgggccgcggcgcgcccctcgccaaggtggtcttccgggatccgtatcggtttaagaagcggacggagctgttcattgccgccgagggcattcacacgggccagtttgtgtattgcggcaagaaggcccagctcaacattggcaatgtgctccctgtgggcaccatgcctgagggtacaatcgtgtgctgcctggaggagaagcctggagaccgtggcaagctggcccgggcatcagggaactatgccaccgttatctcccacaaccctgagaccaagaagacccgtgtgaagctgccctccggctccaagaaggttatctcctcagccaacagagctgtggttggtgtggtggctggaggtggccgaattgacaaacccatcttgaaggctggccgggcgtaccacaaatataaggcaaagaggaactgctggccacgagtacggggtgtggccatgaatcctgtggagcatccttttggaggtggcaaccaccagcacatcggcaagccctccaccatccgcagagatgcccctgctggccgcaaagtgggtctcattgctgcccgccggactggacgtctccggggaaccaagactgtgcaggagaaagagaactagtgctgagggcctcaataaagtttgtgtttatgccaaaaaaaaaaaaaaaaaaaaaaaaaaaaaaaaaaaaaaaaaaaaaaaa

SEQ ID NO: 271 - DNA, 691 bp, Homo sapiens
cccgcgcaggcgcagacggggaagcggagccaacatgccagtggcccggagctgggtttgtcgcaaaacttatgtgaccccgcggagacccttcgagaaatctcgtctcgaccaagagctgaagctgatcggcgagtatgggctccggaacaaacgtgaggtctggagggtcaaatttaccctggccaagatccgcaaggccgcccgggaactgctgacgcttgatgagaaggacccacggcgtctgttcgaaggcaacgccctgctgcggcggctggtccgcattggggtgctggatgagggcaagatgaagctggattacatcctgggcctgaagatagaggatttcttagagagacgcctgcagacccaggtcttcaagctgggcttggccaagtccatccaccacgctcgcgtgctgatccgccagcgccatatcagggtccgcaagcaggtggtgaacatcccgtccttcattgtccgcctggattcccagaagcacatcgacttctctctgcgctctccctacgggggtggccgcccgggccgcgtgaagaggaagaatgccaagaagggccagggtggggctggggctggagacgacgaggaggaggattaagtccacctgtccctcctgggctgctggattgtctcgttttcctgccaaataaacaggatcagcgctttaaaa

SEQ ID NO: 272 - protein, 194 aa, Homo sapiens [sequence omitted]

SEQ ID NO: 273 - DNA, 1350 bp, Homo sapiens
agaaaattaagggaaaatcgattcctcttatctagttacttagatattggccttggctttatctcaatattatatggatcatagctggcaactaattcagtccagtaaatatcctcaatagggaataatatatgcttcccattccatcgggaaaaagttttgttcaacacaccaagctcaatcaactcactaatgtatgggaattgttttgatgtaaccacatacttcctgccttcattaagggctgcgcacaaaaccatagattgctcttctgtaaggttttgaattactgatcgcactttatcgttttgcatcttaatgcgttttcttagcttaaatcgcttatatctggcgctggcaatagctgataatcgatgcacattaattgctagcgaaaatgcaagagcaaagacgaaaacatgccacacatgaggaataccgattctctcattaacatattcaggccagttatctgggcttaaaagcagaagtccaacccagataacgatcatatacatggttctctccagaggttcattactgaacactcgtccgagaataacgagtggatctgggtcgaccggtcgacccagatctgggtcgacctgcaggtcaacggatcatgaaccaggaaaactcgccaaactgcaggcacaagtgcgcattggtgggaaaggaactgctcacagaaagaagaaggtcttccatagaacagccacagccgatgataaaaagcttcaattctccttaaagaagttacaggtaaacaatatctctggtattgaaaaggtgaatatgtttacaaaccaaggaacagtgatccactttaacaaccctaaatttcaggcatcgctggcagtgaacactttcaccataacaggtcatgctgaggcaaagcaggtgacagaaatgctacccagtgtcttaagccagcttggtgcagacagtctgactagtttaaggagactggctgaagttctgcccaaacaacctgtggatggaaaagcaccacttgctactggaggggatgatgatgatggagttccagaattgtggagaattttgatgaggcttccaggaatgaggcaagctgaattgagtcgacttctgaagaagataaaacttgaagaagttactgggagctgctattttctattatgactgctttttaagaaattttttgttcatggatctgataaaatctagatctctatacttctaagcccaagccccttggacactgtagcactttttagttttcgcttatacataatcattctttttagctaattaagctgcagaacgtgggaaataaagttcgaaacaaaggttaataaagttctttgcctt

SEQ ID NO: 274 - protein, 214 aa, Homo sapiens [sequence omitted]

SEQ ID NO: 275 - DNA, 978 bp, Homo sapiens
caaaacaccaaatggcggatgacgccggtgcagcgggggggcccgggggccctggtggccctgggatggggaaccgcggtggcttccgcggaggtttcggcagtggcatccggggccggggtcgcggccgtggacggggccggggccgaggccgcggagctcgcggaggcaaggccgaggataaggagtggatgcccgtcaccaagttgggccgcttggtcaaggacatgaagatcaagtccctggaggagatctatctcttctccctgcccattaaggaatcagagatcattgatttcttcctgggggcctctctcaaggatgaggttttgaagattatgccagtgcagaagcagacccgtgccggccagcgcaccaggttcaaggcatttgttgctatcggggactacaatggccacgtcggtctgggtgttaagtgctccaaggaggtggccaccgccatccgtggggccatcatcctggccaagctctccatcgtccccgtgcgcagaggctactgggggaacaagatcggcaagccccacactgtcccttgcaaggtgacaggccgctgcggctctgtgctggtacgcctcatccctgcacccaggggcactggcatcgtctccgcacctgtgcctaagaagctgctcatgatggctggtatcgatgactgctacacctcagcccggggctgcactgccaccctgggcaacttcgccaaggccacctttgatgccatttctaagacctacagctacctgacccccgacctctggaaggagactgtattcaccaagtctccctatcaggagttcactgaccacctcgtcaagacccacaccagagtctccgtgcagcggactcaggctccagctgtggctacaacatagggtttttatacaagaaaaataaagtgaattaagcgtgaaaaaaaaaaaaaaaaaaaaaaaaaaaaaaaaaaaaaaaaaaaaaaaa

SEQ ID NO: 276 - protein, 293 aa, Homo sapiens [sequence omitted]

SEQ ID NO: 277 - DNA, 1116 bp, Homo sapiens
ccttctctcgccaggcgtcctcgtggaagtgacatcgtctttaaaccctgcgtggcaatccctgacgcaccgccgtgatgcccagggaagacagggcgacctggaagtccaactacttccttaagatcatccaactattggatgattatccgaaatgtttcattgtgggagcagacaatgtgggctccaagcagatgcagcagatccgcatgtcccttcgcgggaaggctgtggtgctgatgggcaagaacaccatgatgcgcaaggccatccgagggcacctggaaaacaacccagctctggagaaactgctgcctcatatccgggggaatgtgggctttgtgttcaccaaggaggacctcactgagatcagggacatgttgctggccaataaggtgccagctgctgcccgtgctggtgccattgccccatgtgaagtcactgtgccagcccagaacactggtctcgggcccgagaagacctcctttttccaggctttaggtatcaccactaaaatctccaggggcaccattgaaatcctgagtgatgtgcagctgatcaagactggagacaaagtgggagccagcgaagccacgctgctgaacatgctcaacatctcccccttctcctttgggctggtcatccagcaggtgttcgacaatggcagcatctacaaccctgaagtgcttgatatcacagaggaaactctgcattctcgcttcctggagggtgtccgcaatgttgccagtgtctgtctgcagattggctacccaactgttgcatcagtaccccattctatcatcaacgggtacaaacgagtcctggccttgtctgtggagacggattacaccttcccacttgctgaaaaggtcaaggccttcttggctgatccatctgcctttgtggctgctgcccctgtggctgctgccaccacagctgctcctgctgctgctgcagccccagctaaggttgaagccaaggaagagtcggaggagtcggacgaggatatgggatttggtctctttgactaatcaccaaaaagcaaccaacttagccagttttatttgcaaaacaaggaaataaaggcttacttctttaaaaaaaaaaaaaaaaaaa

SEQ ID NO: 278 - protein, 317 aa, Homo sapiens
MPREDRATWKSNYFLKIIQLLDDYPKCFIVGADNVGSKQMQQIRMSLRGKAVVLMGKNTMMRKAIRGHLENNPALEKLLPHIRGNVGFVFTKEDLTEIRDMLLANKVPAAARAGAIAPCEVTVPAQNTGLGPEKTSFFQALGITTKISRGTIEILSDVQLIKTGDKVGASEATLLNMLNISPFSFGLVIQQVFDNGSIYNPEVLDITEETLHSRFLEGVRNVASVCLQIGYPTVASVPHSIINGYKRVLALSVETDYTFPLAEKVKAFLADPSAFVAAAPVAAATTAAPAAAAAPAKVEAKEESEESDEDMGFGLFD

SEQ ID NO: 279 - DNA, 1148 bp, Homo sapiens
aggcccgggaccgcgggatgggtgtcggcgtgaccaggcctgagctccctgtctctcctcagtgacatcgtctttaaaccctgcgtggcaatccctgacgcaccgccgtgatgcccagggaagacagggcgacctggaagtccaactacttccttaagatcatccaactattggatgattatccgaaatgtttcattgtgggagcagacaatgtgggctccaagcagatgcagcagatccgcatgtcccttcgcgggaaggctgtggtgctgatgggcaagaacaccatgatgcgcaaggccatccgagggcacctggaaaacaacccagctctggagaaactgctgcctcatatccgggggaatgtgggctttgtgttcaccaaggaggacctcactgagatcagggacatgttgctggccaataaggtgccagctgctgcccgtgctggtgccattgccccatgtgaagtcactgtgccagcccagaacactggtctcgggcccgagaagacctcctttttccaggctttaggtatcaccactaaaatctccaggggcaccattgaaatcctgagtgatgtgcagctgatcaagactggagacaaagtgggagccagcgaagccacgctgctgaacatgctcaacatctcccccttctcctttgggctggtcatccagcaggtgttcgacaatggcagcatctacaaccctgaagtgcttgatatcacagaggaaactctgcattctcgcttcctggagggtgtccgcaatgttgccagtgtctgtctgcagattggctacccaactgttgcatcagtaccccattctatcatcaacgggtacaaacgagtcctggccttgtctgtggagacggattacaccttcccacttgctgaaaaggtcaaggccttcttggctgatccatctgcctttgtggctgctgcccctgtggctgctgccaccacagctgctcctgctgctgctgcagccccagctaaggttgaagccaaggaagagtcggaggagtcggacgaggatatgggatttggtctctttgactaatcaccaaaaagcaaccaacttagccagttttatttgcaaaacaaggaaataaaggcttacttctttaaaaaaaaaaaaaaaaaa

SEQ ID NO: 280 - DNA, 549 bp, Homo sapiens
ctctcttccacaggaggcctacacgccgccgcttgtgctgcagccatgtctctagtgatccctgaaaagttccagcatattttgcgagtactcaacaccaacatcgatgggcggcggaaaatagcctttgccatcactgccattaagggtgtgggccgaagatatgctcatgtggtgttgaggaaagcagacattgacctcaccaagagggcgggagaactcactgaggatgaggtggaacgtgtgatcaccattatgcagaatccacgccagtacaagatcccagactggttcttgaacagacagaaggatgtaaaggatggaaaatacagccaggtcctagccaatggtctggacaacaagctccgtgaagacctggagcgactgaagaagattcgggcccatagagggctgcgtcacttctggggccttcgtgtccgaggccagcacaccaagaccactggccgccgtggccgcaccgtgggtgtgtccaagaagaaataagtctgtaggccttgtctgttaataaatagtttatatacaaaaaaa

SEQ ID NO: 281 - protein, 152 aa, Homo sapiens [sequence omitted]

SEQ ID NO: 282 - DNA, 556 bp, Homo sapiens
acaactcggtggtggccactgcgcagaccagacttcgctcgtactcgtgcgcctcgcttcgcttttcctccgcaaccatgtctgacaaacccgatatggctgagatcgagaaattcgataagtcgaaactgaagaagacagagacgcaagagaaaaatccactgccttccaaagaaacgattgaacaggagaagcaagcaggcgaatcgtaatgaggcgtgcgccgccaatatgcactgtacattccacaagcattgccttcttattttacttcttttagctgtttaactttgtaagatgcaaagaggttggatcaagtttaaatgactgtgctgcccctttcacatcaaagaactactgacaacgaaggccgcgctgcctttcccatctgtctatctatctggctggcagggaaggaaagaacttgcatgttggtgaaggaagaagtggggtggaagaagtggggtgggacgacagtgaaatctagagtaaaaccaagctggcccaagtgtcctgcaggctgtaatgcagtttaatcagagtgccattttttttt

SEQ ID NO: 283 - protein, 44 aa, Homo sapiens
MSDKPDMAEIEKFDKSKLKKTETQEKNPLPSKETIEQEKQAGES

SEQ ID NO: 284 - DNA, 598 bp, Homo sapiens
ctccttcttttccagccccggtaccggaccctgcagccgcagagatgttgatgcctaagaagaaccggattgccatttatgaactcctttttaaggagggagtcatggtggccaagaaggatgtccacatgcctaagcacccggagctggcagacaagaatgtgcccaaccttcatgtcatgaaggccatgcagtctctcaagtcccgaggctacgtgaaggaacagtttgcctggagacatttctactggtaccttaccaatgagggtatccagtatctccgtgattaccttcatctgcccccggagattgtgcctgccaccctacgccgtagccgtccagagactggcaggcctcggcctaaaggtctggagggtgagcgacctgcgagactcacaagaggggaagctgacagagatacctacagacggagtgctgtgccacctggtgccgacaagaaagccgaggctggggctgggtcagcaaccgaattccagtttagaggcggatttggtcgtggacgtggtcagccacctcagtaaaattggagaggattcttttgcattgaataaacttacagccaaaaaaccttaaaaaa

SEQ ID NO: 285 - protein, 165 aa, Homo sapiens
MLMPKKNRIAIYELLFKEGVMVAKKDVHMPKHPELADKNVPNLHVMKAMQSLKSRGYVKEQFAWRHFYWYLTNEGIQYLRDYLHLPPEIVPATLRRSRPETGRPRPKGLEGERPARLTRGEADRDTYRRSAVPPGADKKAEAGAGSATEFQFRGGFGRGRGQPPQ

SEQ ID NO: 286 - DNA, 895 bp, Homo sapiens
gcggagcgaggctggaggcgcgggagggcagcgagaggttcgcgggtgcagcgcacaggagaccatgtccgggggcagcagctgcagccagaccccaagccgggccatccccgccactcgccgggtggtgctcggcgacggcgtgcagctcccgcccggggactacagcacgacccccggcggcacgctcttcagcaccaccccgggaggtaccaggatcatctatgaccggaaattcctgatggagtgtcggaactcacctgtgaccaaaacacccccaagggatctgcccaccattccgggggtcaccagcccttccagtgatgagccccccatggaagccagccagagccacctgcgcaatagcccagaagataagcgggcgggcggtgaagagtcacagtttgagatggacatttaaagcaccagccatcgtgtggagcactaccaaggggcccctcagggccttcctgggaggagtcccaccagccaggccttatgaaagtgatcatactgggcaggcgttggcgtggggtcggacaccccagccctttctccctcactcagggcacctgccccctcctcttcgtgaacaccagcagatacctccttgtgcctccactgatgcaggagctgccaccccaaggggagtgacccctgccagcacaccctgcagccaagggccaggaagtggacaagaacgaacccttccttccgaatgatcagcagttccagcccctcgctgctgggggcgcaaccaccccttccttaggttgatgtgcttgggaaagctccctccccctccttccccaagagaggaaataaaagccaccttcgccctaggaaaaaaaaaaaaaaaaaaaaaaaaaaaaaaaaaaaaaaaaaaaaaaaaaaa

SEQ ID NO: 287 - protein, 118 aa, Homo sapiens
MSGGSSCSQTPSRAIPATRRVVLGDGVQLPPGDYSTTPGGTLFSTTPGGTRIIYDRKFLMECRNSPVTKTPPRDLPTIPGVTSPSSDEPPMEASQSHLRNSPEDKRAGGEESQFEMDI

SEQ ID NO: 288 - DNA, 7958 bp, Homo sapiens
gtaaaagtgacattctaaatgttcctcactctgcgaggcttattttttagggactttgctataattctgaaagacttagttttacagtacatctgaaagtaggagttttcagaagtatggctcttgggataaatttagattcttaattgtgaagctctgttaccacttgttagaaggcaggtcagctcacctgcttggggaggtaaatatatgaatgcactctcgagtaatttaatggagccctacctcaatgtacagaatgacagtatcacagatcaagaatggagtacgagtgattttcggctatggtgggggtaggtaggtcacttgtcccctgttgtctcttactatttgtaaagtgaagactatgattagtctttttgatcgggatggtttgagatgaataaagaataggcaggcaatttggatactttaggcttttcaagaacattagtaacattttttcttagatatttctcctaatacaatgagtgttgtgaaataacatggcagttattgttgagagaaaagccttcccagttatgtattgagtccttaggcgttttgaccttccctccactcttacagaacttggtggaaggggccactatgttttctacctccttccgtgcctttcacaaagccacatcctgcaccgtctacccttctctgtggatatttttccgcttggcaatttcctttcctgaggcacccacttgggacatctgaatctccatctccatgttgatggcccgtttgtgcttggacgtgttcttccacttgagactgagggttcatgtaatcaaagaagtttctttgttgtgtgtatctttacagaacacaacaggaattgaaaatgaatcagaacactactgagcctgtggcggccaccgagaccctggctgaggtacccgaacatgtgctgcgaggacttccggaggaagtgaggcttttcccttctgctgttgacaagacccggattggtgtctgggccactaaaccaattttaaaaggcaaaaaatttgggccatttgttggtgataagaaaaaaagatctcaggttaagaataatgtatacatgtgggaggtgtattacccaaatttgggatggatgtgcattgatgccactgatccagagaagggaaactggctgcgatatgtgaattgggcttgctcaggagaagagcaaaatttattcccactggaaatcaacagagccatttactataaaactttaaagccaatcgcgccgggcgaggagctcctggtctggtacaatggggaagacaaccctgagatagcagctgcgattgaggaagagcgagccagcgcccggagcaagcggagctcccccaagagccggaaagggaagaaaaaatcccaggaaaataaaaacaaaggaaacaaaatccaagacatacaactgaagacaagtgagccagatttcacctctgcaaatatgagagattctgcagaaggtcctaaagaagacgaagagaagccttcagcctcagcacttgagcagccggccaccctccaggaggtggccagtcaggaggtgcctccagaactagcaacccctgcccctgcctgggagccacagccagaaccagacgagcgattagaagcggcagcttgtgaggtgaatgatttgggggaagaggaggaggaggaagaggaggaggatgaagaagaagaagaagatgatgatgatgatgagttggaagacgagggggaagaagaagccagcatgccaaatgaaaattctgtgaaagagccagaaatacggtgtgatgagaagccagaagatttattagaggaaccaaaaacaacttcagaagaaactcttgaagactgctcagaggtaacacctgccatgcaaatccccagaactaaagaagaggccaatggtgatgtatttgaaacgtttatgtttccgtgtcaacattgtgaaaggaagtttacaaccaaacaggggcttgagcgtcacatgcatatccatatatccaccgtcaatcatgctttcaaatgcaagtactgtgggaaagcctttggcacacagattaaccggcggcgacatgagcggcgccatgaagcagggttaaagcggaaacccagccaaacactacagccgtcagaggatctggctgatggcaaagcatctggagaaaacgttgcttcaaaagatgattcgagtcctcccagtcttgggccagactgtctgatcatgaattcagagaaggcttcccaagacacaataaattcttctgtcgtagaagagaatggggaagttaaagaacttcatccgtgcaaatattgtaaaaaggtttttggaactcatactaatatgagacggcatcagcgtagagttcacgaacgtcatctgattcccaaaggtgtacggcgaaaaggaggccttgaagagccccagcctccagcagaacaggcccaggccacccagaacgtgtatgtaccaagcacagagccggaggaggaaggggaagcagatgatgtgtacatcatggacatttctagcaatatctctgaaaacttaaattactatattgatggtaaaattcaaactaataacaacactagtaactgtgatgtgattgagatggagtctgcttcggcagatttgtatggtataaattgtctgctcactccagttacagtggaaattactcaaaatataaagaccacacaggtccctgtaacagaagatcttcctaaagagcctttgggcagcacaaatagtgaggccaagaagcggagaactgcgagcccacctgcactgcccaaaattaaggccgaaacagactctgaccccatggtcccctcttgctctttaagtcttcctcttagcatatcaacaacagaggcagtgtctttccacaaagagaaaagtgtttatttgtcatcaaagctcaaacaacttcttcaaacccaagataaactaactcctgcagggatttcagcaactgaaatagctaaattaggtcctgtttgtgtgtctgctcctgcatcaatgttgcctgtgacctcaagtaggtttaagaggcggaccagctctcctcccagttctccacagcacagtcctgcccttcgagactttggaaagccaagtgatgggaaagcagcatggaccgatgccgggctgacttccaaaaaatccaaattagaaagtcacagcgactcaccagcatggagtttgtctgggagagatgagagagaaactgtgagccctccatgctttgatgaatataaaatgtctaaagagtggacagctagttctgcttttagcagtgtgtgcaaccagcagccactggatttatccagcggtgtcaaacagaaggctgagggtacaggcaagactccagtccagtgggaatctgtcttagatctcagtgtgcataaaaagcattgtagtgactctgaaggcaaggaattcaaagaaagtcattcagtgcagcctacgtgtagtgctgtaaagaaaaggaaaccaaccacctgcatgctgcagaaggttcttctcaatgaatataatggcatcgatttacctgtagaaaaccctgcagatgggaccaggagcccaagtccttgtaaatccctagaagctcagccagatcctgacctcggtccgggctctggtttccctgcccctactgttgagtccacacctgatgtttgtccttcatcacctgccctgcagacaccctccctttcatccggtcagctgcctcctctcttgatccccacagatccctcttcccctccaccctgtcccccggtattaactgttgccactccgccccctcccctccttcctaccgtacctcttccagccccctcttccagtgcatctccacacccatgcccctctccactctcaaatgccaccgcacagtccccacttccaattctgtccccaacagtgtccccctctccctctcccattcctcccgtggagcccctgatgtctgccgcctcacccgggcctccaacactttcttcttcctcctcttcatcttcctcctcctcttcgttttcttcttcatcttcctcctcttctccttctccacctcctctctccgcaatatcatctgttgtttcctctggtgataatctggaggcttctctccccatgatatctttcaaacaggaggaattagagaatgaaggtctgaaacccagggaagagccccagtctgctgctgaacaggatgttgttgttcaggaaacattcaacaaaaactttgtttgcaacgtctgtgaatcaccttttctttccattaaagatctaaccaaacatttatctattcatgctgaagaatggcccttcaaatgtgaattttgtgtgcagctttttaaggataaaacggacttgtcagaacatcgctttttgcttcatggagttgggaatatctttgtgtgttctgtttgtaaaaaagaatttgcttttttgtgcaatttgcagcagcaccagcgagatctccacccagataaggtgtgcacacatcacgagtttgaaagcgggactctgaggccccagaactttacagatcccagcaaggcccatgtagagcatatgcagagcttgccagaagatcctttagaaacttctaaagaagaagaggagttaaatgattcctctgaagagctttacacgactataaaaataatggcttctggaataaagacaaaagatccagatgttcgattgggcctcaatcagcattacccaagctttaaaccacctccatttcagtaccatcaccgtaaccccatggggattggtgtgacagccacaaatttcactacacacaatattccacagactttcactaccgccattcgctgcacaaagtgtggaaaaggtgtcgacaatatgccggagttgcacaaacatatcctggcttgtgcttctgcaagtgacaagaagaggtacacgcctaagaaaaacccagtaccattaaaacaaactgtgcaacccaaaaatggcgtggtggttttagataactctgggaaaaatgccttccgacgaatgggacagcccaaaaggcttaactttagtgttgagctcagcaaaatgtcgtcgaataagctcaaattaaatgcattgaagaaaaaaaatcagctagtacagaaagcaattcttcagaaaaacaaatctgcaaagcagaaggccgacttgaaaaatgcttgtgagtcatcctctcacatctgcccttactgtaatcgagagttcacttacattggaagcctgaataaacacgccgccttcagctgtcccaaaaaacccctttctcctcccaaaaaaaaagtttctcattcatctaagaaaggtggacactcatcacctgcaagtagtgacaaaaacagtaacagcaaccaccgcagacggacagcggatgcggagattaaaatgcaaagcatgcagactccgttgggcaagaccagagcccgcagctcaggccccacccaagtcccacttccctcctcatccttcaggtccaagcagaacgtcaagtttgcagcttcggtgaaatccaaaaaaccaagctcctcctctttaaggaactccagcccgataagaatggccaaaataactcatgttgaggggaaaaaacctaaagctgtggccaagaatcattctgctcagctttccagcaaaacatcacggagcctgcacgtgagggtacagaaaagcaaagctgttttacaaagcaaatccaccttggcgagtaagaaaagaacagaccggttcaatataaaatctagagagcggagtggggggccagtcacccggagccttcagctggcagctgctgctgacttgagtgagaacaagagagaggacggcagcgccaagcaggagctgaaggacttcagctacagcctccgcttggcgtcccgatgctctccaccagcggccccgtacatcaccaggcagtataggaaggtcaaagctccggctgcagcccagttccagggaccattcttcaaagagtagacactctggctgctccctgacagcacctgaagtgacctggaatcagtgaagccaaagggactggcagtctgccctgcagggagtaccgacctatcccagttgtgtgaggctgcgagagaaagggagtgcatgtgcgcgcgtgcatgtgtgcgtgcgtgtgtgttcacgtgttctcgtgcgggcgcgtgagtggtcttcaaacgagggtcccgaaccccggggcggcaggaagggggccgactccacgctgtcctttgggatgatacttggatgcagctcttgggaccgtgttctgcagcccagccttcctgttggggtggggcctctcctactatgcaatttttcaagagctccttgaccctgctttttgcttcttgagttgtcttttgccattatggggactttggtttgacccaggggtcagccttaggaaggccttcaggaggaggccgagttccccttcagtaccacccctctctccccaccttccctctcccggcaacatctctgggaatcaacagcatattgacacgttggagccgagcctgaacatgcccctcggccccagcacatggaaaacccccttccttgcctaaggtgtctgagtttctggctcttgaggcatttccagacttgaaattctcatcagtccattgctcttgagtctttgcagagaacctcagatcaggtgcacctgggagaaagactttgtccccacttacagatctatctcctcccttgggaagggcagggaatggggacggtgtatggaggggagggatctcctgcgcccttcattgccacacttggtgggaccatgaacatctttagtgtctgagcttctcaaattagctgcaataggaaaaaaacaaattgggaaatgaaaaaaaaatgggaagattaaaaagcacagggggaagaagaagagatttcggaggccatcctgccagggggggacggggctgactcctgctctctggaggacggtcagtccatgtctcggagaaacgggtgagctgagcttggcgtttggacccagttcagtgaggttcttgggttttgtgcctttggggcagactccagacaaggatgtctgagaccacttgggctctgttttctcagctccaatttcaagagtgagctatcaaacccagagcggaaggagggagctctgatgagcacggtttgtcacacgataaagggattttttttttcagggctactacggttgatcttgcaactctgtaaatatgtatgtagacacttttaaaagcacgtatttatgtccctgactgtaaatgctccatttttaaagttttataacttgtgttatttaatgagtcagtcaatcggctgcagtatgggatctgataaggatctaggagaagggtctcatgcggaccctcacatgggcagaaaaatggtggtcattggccgacatcacagttttcctgtttcccacccagctaaaaaccgttgtttgctttaaattttcataaactggaatcctttcacccgctcctacagctaaccctcacaagcatgaagtgctgtggctgttccttatcctaatgatgcgcttttgtcccgtaaatgttaacactcatgaagcataccccggcctctcagttcttgagggcctccccaccgcagcagcaaggaaagctcacgaaccccaaacctggcaagtcacctgcagcccatggtgagctctgggaagtgtggttgaggccttggggtcactccttttttgcatgtgcaaatgtgctggtcacccttcaacgctcccagacggtcaggaaaactgttccaatcatgaaaaggggggatgattttgtaaaagtggcatttcctggtcagtggtggtcttcaagacgacagctctgtatctgccatgtgaagagaattaacaataaaagtgtgaagagcgattgtgaggaacaag

SEQ ID NO: 289 - protein, 1719 aa, Homo sapiens [sequence omitted]

SEQ ID NO: 290 - DNA, 7467 bp, Homo sapiens
gtaaaagtgacattctaaatgttcctcactctgcgaggcttattttttagggactttgctataattctgaaagacttagttttacagtacatctgaaagtaggagttttcagaagtatggctcttgggataaatttagattcttaattgtgaagctctgttaccacttgttagaaggcaggtcagctcacctgcttggggaggtaaatatatgaatgcactctcgagtaatttaatggagccctacctcaatgtacagaatgacagtatcacagatcaagaatggagtacgagtgattttcggctatggtgggggtaggtaggtcacttgtcccctgttgtctcttactatttgtaaagtgaagactatgattagtctttttgatcgggatggtttgagatgaataaagaataggcaggcaatttggatactttaggcttttcaagaacattagtaacattttttcttagatatttctcctaatacaatgagtgttgtgaaataacatggcagttattgttgagagaaaagccttcccagttatgtattgagtccttaggcgttttgaccttccctccactcttacagaacttggtggaaggggccactatgttttctacctccttccgtgcctttcacaaagccacatcctgcaccgtctacccttctctgtggatatttttccgcttggcaatttcctttcctgaggcacccacttgggacatctgaatctccatctccatgttgatggcccgtttgtgcttggacgtgttcttccacttgagactgagggttcatgtaatcaaagaagtttctttgttgtgtgtatctttacagaacacaacaggaattgaaaatgaatcagaacactactgagcctgtggcggccaccgagaccctggctgaggtacccgaacatgtgctgcgaggacttccggaggaagtgaggcttttcccttctgctgttgacaagacccggattggtgtctgggccactaaaccaattttaaaaggcaaaaaatttgggccatttgttggtgataagaaaaaaagatctcaggttaagaataatgtatacatgtgggaggtgtattacccaaatttgggatggatgtgcattgatgccactgatccagagaagggaaactggctgcgatatgtgaattgggcttgctcaggagaagagcaaaatttattcccactggaaatcaacagagccatttactataaaactttaaagccaatcgcgccgggcgaggagctcctggtctggtacaatggggaagacaaccctgagatagcagctgcgattgaggaagagcgagccagcgcccggagcaagcggagctcccccaagagccggaaagggaagaaaaaatcccaggaaaataaaaacaaaggaaacaaaatccaagacatacaactgaagacaagtgagccagatttcacctctgcaaatatgagagattctgcagaaggtcctaaagaagacgaagagaagccttcagcctcagcacttgagcagccggccaccctccaggaggtggccagtcaggaggtgcctccagaactagcaacccctgcccctgcctgggagccacagccagaaccagacgagcgattagaagcggcagcttgtgaggtgaatgatttgggggaagaggaggaggaggaagaggaggaggatgaagaagaagaagaagatgatgatgatgatgagttggaagacgagggggaagaagaagccagcatgccaaatgaaaattctgtgaaagagccagaaatacggtgtgatgagaagccagaagatttattagaggaaccaaaaacaacttcagaagaaactcttgaagactgctcagaggtaacacctgccatgcaaatccccagaactaaagaagaggccaatggtgatgtatttgaaacgtttatgtttccgtgtcaacattgtgaaaggaagtttacaaccaaacaggggcttgagcgtcacatgcatatccatatatccaccgtcaatcatgctttcaaatgcaagtactgtgggaaagcctttggcacacagattaaccggcggcgacatgagcggcgccatgaagcagggttaaagcggaaacccagccaaacactacagccgtcagaggatctggctgatggcaaagcatctggagaaaacgttgcttcaaaagatgattcgagtcctcccagtcttgggccagactgtctgatcatgaattcagagaaggcttcccaagacacaataaattcttctgtcgtagaagagaatggggaagttaaagaacttcatccgtgcaaatattgtaaaaaggtttttggaactcatactaatatgagacggcatcagcgtagagttcacgaacgtcatctgattcccaaaggtgtacggcgaaaaggaggccttgaagagccccagcctccagcagaacaggcccaggccacccagaacgtgtatgtaccaagcacagagccggaggaggaaggggaagcagatgatgtgtacatcatggacatttctagcaatatctctgaaaacttaaattactatattgatggtaaaattcaaactaataacaacactagtaactgtgatgtgattgagatggagtctgcttcggcagatttgtatggtataaattgtctgctcactccagttacagtggaaattactcaaaatataaagaccacacaggtccctgtaacagaagatcttcctaaagagcctttgggcagcacaaatagtgaggccaagaagcggagaactgcgagcccacctgcactgcccaaaattaaggccgaaacagactctgaccccatggtcccctcttgctctttaagtcttcctcttagcatatcaacaacagaggcagtgtctttccacaaagagaaaagtgtttatttgtcatcaaagctcaaacaacttcttcaaacccaagataaactaactcctgcagggatttcagcaactgaaatagctaaattaggtcctgtttgtgtgtctgctcctgcatcaatgttgcctgtgacctcaagtaggtttaagaggcggaccagctctcctcccagttctccacagcacagtcctgcccttcgagactttggaaagccaagtgatgggaaagcagcatggaccgatgccgggctgacttccaaaaaatccaaattagaaagtcacagcgactcaccagcatggagtttgtctgggagagatgagagagaaactgtgagccctccatgctttgatgaatataaaatgtctaaagagtggacagctagttctgcttttagcagtgtgtgcaaccagcagccactggatttatccagcggtgtcaaacagaaggctgagggtacaggcaagactccagtccagtgggaatctgtcttagatctcagtgtgcataaaaagcattgtagtgactctgaaggcaaggaattcaaagaaagtcattcagtgcagcctacgtgtagtgctgtaaagaaaaggaaaccaaccacctgcatgctgcagaaggttcttctcaatgaatataatggcatcgatttacctgtagaaaaccctgcagatgggaccaggagcccaagtccttgtaaatccctagaagctcagccagatcctgacctcggtccgggctctggtttccctgcccctactgttgagtccacacctgatgtttgtccttcatcacctgccctgcagacaccctccctttcatccggtcagctgcctcctctcttgatccccacagatccctcttcccctccaccctgtcccccggtattaactgttgccactccgccccctcccctccttcctaccgtacctcttccagccccctcttccagtgcatctccacacccatgcccctctccactctcaaatgccaccgcacagtccccacttccaattctgtccccaacagtgtccccctctccctctcccattcctcccgtggagcccctgatgtctgccgcctcacccgggcctccaacactttcttcttcctcctcttcatcttcctcctcctcttcgttttcttcttcatcttcctcctcttctccttctccacctcctctctccgcaatatcatctgttgtttcctctggtgataatctggaggcttctctccccatgatatctttcaaacaggaggaattagagaatgaaggtctgaaacccagggaagagccccagtctgctgctgaacaggatgttgttgttcaggaaacattcaacaaaaactttgtttgcaacgtctgtgaatcaccttttctttccattaaagatctaaccaaacatttatctattcatgctgaagaatggcccttcaaatgtgaattttgtgtgcagctttttaaggataaaacggacttgtcagaacatcgctttttgcttcatggagttgggaatatctttgtgtgttctgtttgtaaaaaagaatttgcttttttgtgcaatttgcagcagcaccagcgagatctccacccagataaggtgtgcacacatcacgagtttgaaagcgggactctgaggccccagaactttacagatcccagcaaggcccatgtagagcatatgcagagcttgccagaagatcctttagaaacttctaaagaagaagaggagttaaatgattcctctgaagagctttacacgactataaaaataatggcttctggaataaagacaaaagatccagatgttcgattgggcctcaatcagcattacccaagctttaaaccacctccatttcagtaccatcaccgtaaccccatggggattggtgtgacagccacaaatttcactacacacaatattccacagactttcactaccgccattcgctgcacaaagtgtggaaaaggtgtcgacaatatgccggagttgcacaaacatatcctggcttgtgcttctgcaagtgacaagaagaggtacacgcctaagaaaaacccagtaccattaaaacaaactgtgcaacccaaaaatggcgtggtggttttagataactctgggaaaaatgccttccgacgaatgggacagcccaaaaggcttaactttagtgttgagctcagcaaaatgtcgtcgaataagctcaaattaaatgcattgaagaaaaaaaatcagctagtacagaaagcaattcttcagaaaaacaaatctgcaaagcagaaggccgacttgaaaaatgcttgtgagtcatcctctcacatctgcccttactgtaatcgagagttcacttacattggaagcctgaataaacacgccgccttcagctgtcccaaaaaacccctttctcctcccaaaaaaaaagtttctcattcatctaagaaaggtggacactcatcacctgcaagtagtgacaaaaacagtaacagcaaccaccgcagacggacagcggatgcggagattaaaatgcaaagcatgcagactccgttgggcaagaccagagcccgcagctcaggccccacccaagtcccacttccctcctcatccttcaggtccaagcagaacgtcaagtttgcagcttcggtgaaatccaaaaaaccaagctcctcctctttaaggaactccagcccgataagaatggccaaaataactcatgttgaggggaaaaaacctaaagctgtggccaagaatcattctgctcagctttccagcaaaacatcacggagcctgcacgtgagggtacagaaaagcaaagctgttttacaaagcaaatccaccttggcgagtaagaaaagaacagaccggttcaatataaaatctagagagcggagtggggggccagtcacccggagccttcagctggcagctgctgctgacttgagtgagaacaagagagaggacggcagcgccaagcaggagctgaaggacttcaggaacttcctgtagaaaagcccccaaaacaaaacaaaccttaattgactaaaaagtattgcatgctcaacttaggataagcactacggcaaaggatacgaaatctaccaagcttgcaagaccagttgaagctgactcaaaaatcctaacattcagctgattgccggcagcttagagtcaggcatctgctgcttcggtgggggcccaacgcgcatgctgggcgcccgggtgattgagatccaaagagaagggcactgtaagacaggccagatgaactggctcctcgtcatgggactggtacctcagatctgagcatggcccttgtttttggcacgtagcagagaaaggattgatttgaacttaaccttgcaaagcaagttgcctgttttagcagtagtttgttgtaggtttcagggatgacagatttggatgcactcatttaaaacgttttggtcacatatcagctcttgatgcctttcttttaaattaattatagacagagagaggcatttagctgatctcttacccctggtatttcttttttttgttgttttcgtttttttaaatcacaagtagattgccagcgtaatggagaggaaaccagattggatatggactcttttttatgcctattctggtgttgcgtttgtatatccaaatggacgttatcctctcagattcttatctggcactaatttataactattatattatcagagactatgtagcaatatatcagtgcacaggcgcatcccaggcctgtacagatgtatgtctacacgtaagtataaatgaatttgcataccaggttttacacttgcatctctaatagagattaaaaacaacaaattggcctcttcctaagtatattaatatcatttatccttacattttatgcctccccctaaattaatgactgagttggtggaaagcggctaggttttattcatactgttttttgttctcaacttcaaaagtaatctacctctgaaaaatttgtagtttaatatttgtttggtgaatttgtgccactttaatccttccactatcattcccattttgttacatttctgttatggggactttatgttgaaatattgtataaagcatttgtagcaatttaaaaataaaatatttaaaattatttaaattgttttggacgcttcaattgtattatatgtgatttacatttcactttttttgttggcgttgttaacccggagagtgctcctgtattgaactttgctgttagttattttattgcttctttttggagagtgctataaaagactattctaatgaaaacattaaaatttacaatttgacatacaaaaaggggttgtccattgattttaaccaatgtagcactgagagagagagaggttaattatagatagacaagagtggtgtttgttgtttttcccctcccagcattgaaatcattggggcttgtcagatgtattaaaaaaagatttgttgtgctattgctgcaaacacttaataactagaggagaatttaaacaatgcattttatattattgtaaccaataaaaaactttctaaaaaaaaaaaaaaaa

SEQ ID NO: 291 - protein, 1482 aa, Homo sapiens
MRDSAEGPKEDEEKPSASALEQPATLQEVASQEVPPELATPAPAWEPQPEPDERLEAAACEVNDLGEEEEEEEEEDEEEEEDDDDDELEDEGEEEASMPNENSVKEPEIRCDEKPEDLLEEPKTTSEETLEDCSEVTPAMQIPRTKEEANGDVFETFMFPCQHCERKFTTKQGLERHMHIHISTVNHAFKCKYCGKAFGTQINRRRHERRHEAGLKRKPSQTLQPSEDLADGKASGENVASKDDSSPPSLGPDCLIMNSEKASQDTINSSVVEENGEVKELHPCKYCKKVFGTHTNMRRHQRRVHERHLIPKGVRRKGGLEEPQPPAEQAQATQNVYVPSTEPEEEGEADDVYIMDISSNISENLNYYIDGKIQTNNNTSNCDVIEMESASADLYGINCLLTPVTVEITQNIKTTQVPVTEDLPKEPLGSTNSEAKKRRTASPPALPKIKAETDSDPMVPSCSLSLPLSISTTEAVSFHKEKSVYLSSKLKQLLQTQDKLTPPAGISATEIAKLGPVCVSAPASMLPVTSSRFKRRTSSPPSSPQHSPALRDFGKPSDGKAAWTDAGLTSKKSKLESHSDSPAWSLSGRDERETVSPPCFDEYKMSKEWTASSAFSSVCNQQPLDLSSGVKQKAEGTGKTPVQWESVLDLSVHKKHCSDSEGKEFKESHSVQPTCSAVKKRKPTTCMLQKVLLNEYNGIDLPVENPADGTRSPSPCKSLEAQPDPDLGPGSGFPAPTVESTPDVCPSSPALQTPSLSSGQLPPLLIPTDPSSPPPCPPVLTVATPPPPLLPTVPLPAPSSSASPHPCPSPLSNATAQSPLPILSPTVSPSPSPIPPVEPLMSAASPGPPTLSSSSSSSSSSSSFSSSSSSSSPSPPPLSAISSVVSSGDNLEASLPMISFKQEELENEGLKPREEPQSAAEQDVVVQETFNKNFVCNVCESPFLSIKDLTKHLSIHAEEWPFKCEFCVQLFKDKTDLSEHRFLLHGVGNIFVCSVCKKEFAFLCNLQQHQRDLHPDKVCTHHEFESGTLRPQNFTDPSKAHVEHMQSLPEDPLETSKEEEELNDSSEELYTTIKIMASGIKTKDPDVRLGLNQHYPSFKPPPFQYHHRNPMGIGVTATNFTTHNIPQTFTTAIRCTKCGKGVDNMPELHKHILACASASDKKRYTPKKNPVPLKQTVQPKNGVVVLDNSGKNAFRRMGQPKRLNFSVELSKMSSNKLKLNALKKKNQLVQKAILQKNKSAKQKADLKNACESSSHICPYCNREFTYIGSLNKHAAFSCPKKPLSPPKKKVSHSSKKGGHSSPASSDKNSNSNHRRRTADAEIKMQSMQTPLGKTRARSSGPTQVPLPSSSFRSKQNVKFAASVKSKKPSSSSLRNSSPIRMAKITHVEGKKPKAVAKNHSAQLSSKTSRSLHVRVQKSKAVLQSKSTLASKKRTDRFNIKSRERSGGPVTRSLQLAAAADLSENKREDGSAKQELKDFRNFL

SEQ ID NO: 292 - DNA, 2073 bp, Homo sapiens
cagcaccacaccaggaccctccagaggctgtgagaaacatcctgcacccaggtcctctctatctgtttatcattgtctattttgtattctgcattcagaaccaagagcctgaagacgacccaggagctttagctatggctgtcttcattattttgtccctgtttagtgttctggtgacaggcatgggtgaaggtggggctgggagtgagaaaggaggtgagagggaatgtaagctgaaccagcttccccattgcccctccgtatctcccagtgcccagccttggacacaccctggccagagccagctgtttgcagacctgagccgagaggagctgacggctgtgatgcgctttctgacccagcagctggggccagggctggtggatgcagcccaggcccagccctcggacaactgtgtcttctcagtggagttgcagctgcctcccaaggctgcagccctggctcacttggacagggggagccccccacctgcccgggaggcactggccatcgtcttctttggcaggcaaccccagcccaacgtgagtgagctggtggtggggccactgcctcacccctcctacatgcgggacgtgactgtggagcgtcatggaggccccctgccctatcaccgacgccccatgttgttccaagagtacctggacatagaccagatgatcttcgacagagagctgccccaggcttctgggcttctccatcactgttgcttctacaagcgccggggacggaacctggtgacaatgaccacggctccccgtggtctgcaatcaggggaccgggccacctagtttggcctctactacaacatctcgggcgctgggttcttcctgcaccacgtgggcttggagctgctagtgaaccacaaggcccttgaccctgcccgctggactatccagaaggtgttctatcaaggccgctactatgacagcctggcccagctggaggcccagtttgaggccggcctggtgaatgtggtgctgatcccagacaatggcacaggtgggtcctggtccctgaagtcccctgtgcccccgggtccagctccccctctgcagttccatccccaaggcccccgcttcagtgtccagggaagtcgagtggcctcctcactgtggactttctcctttggcctcggagcattcagtggcccaaggatctttgacgttcccttccaaggggagagggtggcctatgaagtcagtgtccaggcggccttggccatctatggaggcaattctccttctgctctacgaagccggtacatagatagtggctttggcttgggccacttctccacgcccctgacccatggggtggactgcccctacctggccacctacgtggactggcacttcctttttgagtcccaggccgccaagacaatacgcgatgccttttgtatatttgaacagaaccagggcctccccctgcggcgacaccactcagatctctactcccactactttgggggccttgcggaaacggtgctggtcatcagatctgtgtctactatgctcaactatgactatgtgtgggatatggtcttccaccctaatggggccatagaaatcagactccacaccaccggctacatcagctcagcattcccctttggtgctgcccagaggtatggaaacaaagtttcagagcacaccctgggcacggtccacacccacagcgcccacttcaaggtggacctggatgtagcaggtaaggcatcctggcagaggcaaaagtgctggaggggtgagctgaagtctccatgcctagctttaaaagttttcgttgggctgggagcagtagcttatgcctgtaagcccaacactttgggagactgaggggggtggatcacttgaggtcaggagttcaaaaccagcctggccaacatggcgaaatcctgtctgtactaaaaatacaaaaattagctgggcatgggtatgctgtaatcctagctactcgggaggctgaggcaggagaatcacttgaatctgggagtcagaggttgcagtgagctgagattgagccactgcactccatcctgcgtgactgaac

SEQ ID NO: 293 - protein, 224 aa, Homo sapiens [sequence omitted]

SEQ ID NO: 294 - DNA, 793 bp, Homo sapiens
ccaagatggcggtgctgtcagctcctggcctgcgcggcttccggatccttggtctgcgctccagcgtgggcccggctgtgcaggcacgaggtgtccatcagagcgtggccaccgatggcccaagcagcacccagcctgccctgccaaaggccagagccgtggctcccaaacccagcagccggggcgagtatgtggtggccaagctggatgacctcgtcaactgggcccgccggagttctctgtggcccatgaccttcggcctggcctgctgcgccgtggagatgatgcacatggcagcaccccgctacgacatggaccgctttggcgtggtcttccgcgccagcccgcgccagtccgacgtcatgatcgtggccggcacactcaccaacaagatggccccagcgcttcgcaaggtctacgaccagatgccggagccgcgctacgtggtctccatggggagctgcgccaacggaggaggctactaccactattcctactcggtggtgaggggctgcgaccgcatcgtgcccgtggacatctacatcccaggctgcccacctacggccgaggccctgctctacggcatcctgcagctgcagaggaagatcaagcgggagcggaggctgcagatctggtaccgcaggtagcgccgccgccgccgccgccggagcctgtcgccgtcctgtccccagcctgcttgtgtcccgtgaggttgtcaataaacctgccctcgggctgccgccaaaaaaaaaaaaaaaaaaaaaaaaaaaaaaaaaaaaaaaaaaaaaaaaaa

SEQ ID NO: 295 - protein, 213 aa, Homo sapiens
MAVLSAPGLRGFRILGLRSSVGPAVQARGVHQSVATDGPSSTQPALPKARAVAPKPSSRGEYVVAKLDDLVNWARRSSLWPMTFGLACCAVEMMHMAAPRYDMDRFGVVFRASPRQSDVMIVAGTLTNKMAPALRKVYDQMPEPRYVVSMGSCANGGGYYHYSYSVVRGCDRIVPVDIYIPGCPPTAEALLYGILQLQRKIKRERRLQIWYRR

SEQ ID NO: 296 - DNA, 3051 bp, Homo sapiens
gggcaacccgcgcgggacccttcctccctagtcgcggggagtctgagaaagcgcgcctgtttcgcgaccatcacgcacctcccctccgcttgtggccatgtaccgctacctgggcgaagcgctgttgctgtcccgggccgggcccgctgccctgggctcggcgtccgccgactcggccgcgttgctgggctgggcccggggacagcccgccgccgccccgcagccggggctggcattggccgcccggcgccactacagcgaggcggtggccgaccgcgaggacgaccccaacttcttcaagatggtggagggcttcttcgatcgcggcgccagcatcgtggaggacaagctggtggaggacctgaggacccgggagagcgaggagcagaagcggaaccgggtgcgcggcatcctgcggatcatcaagccctgcaaccatgtgctgagtctctccttccccatccggcgcgacgacggctcctgggaggtcatcgaaggctaccgggcccagcacagccagcaccgcacgccctgcaagggaggtatccgttacagcactgatgtgagtgtagatgaagtaaaagctttggcttctctgatgacatacaagtgtgcagtggttgatgtgccgtttgggggtgctaaagctggtgttaagatcaatcccaagaactatactgataatgaattggaaaagatcacaaggaggttcaccatggagctagcaaaaaagggctttattggtcctggcattgatgtgcctgctccagacatgagcacaggtgagcgggagatgtcctggatcgctgatacctatgccagcaccatagggcactatgatattaatgcacacgcctgtgttactggtaaacccatcagccaagggggaatccatggacgcatctctgctactggccgtggtgtcttccatgggattgaaaatttcatcaatgaagcttcttacatgagcattttaggaatgacaccagggtttggagataaaacatttgttgttcagggatttggtaatgtgggcctacactctatgagatatttacatcgttttggtgctaaatgtattgctgttggtgagtctgatgggagtatatggaatccagatggtattgacccaaaggaactggaagacttcaaattgcaacatgggtccattctgggcttccccaaggcaaagccctatgaaggaagcatcttggaggccgactgtgacatactgatcccagctgccagtgagaagcagttgaccaaatccaacgcacccagagtcaaagccaagatcattgctgaaggtgccaatgggccaacaactccagaagctgacaagatcttcctggagagaaacattatggttattccagatctctacttgaatgctggaggagtgacagtatcttactttgagtggctgaagaatctaaatcatgtcagctatggccgtttgaccttcaaatatgaaagggattctaactaccacttgctcatgtctgttcaagagagtttagaaagaaaatttggaaagcatggtggaactattcccattgtacccacggcagagttccaagacaggatatcgggtgcatctgagaaagacatcgtgcactctggcttggcatacacaatggagcgttctgccaggcaaattatgcgcacagccatgaagtataacctgggattggacctgagaacagctgcctatgttaatgccattgagaaagtcttcaaagtgtacaatgaagctggtgtgaccttcacatagatggatcatggctgacttcctcactatcctcttcacatgtaacttctgcagacctatcacaagtttacatgtaaccacagaaatccctttctctcctgactcattaataatggataccattctcaacaagtcaatccaagtcagcccgttaaggagaaagaaattaaggttagcggatcatgtacaagctgagtgtgaaagtagaaatcacctacaccagagagccattttggtattttgcctttaaataaaaagcctcctttatctggctgtgcagccttgctctgtggcttttcccaacacaatcagtgctagtgctggggaggaacagtcaagagcagtcagttgcttgcttattttttctggatgagtctgggacacactgtaactttaacacatttaagaagtaggtgtgtggccttttcagaaggtggcatggtcctcaagtgagttcttagtattttatatcagcaaaataattcaattttgcaggttgcaaacaaatataaaacctgtttctgtttatgaatattattcttttagaatagaataagtacatgctgctgtaataaaattgcctttaatcacttaacaagcctaaccttgactcaaacagtgaatgcctatagaaataataaatgaaaaaaactagtatttttatatcataaaacaatgtcatttatagcttatcattcatgtattgtccagcagacattaaaagccctgtggataattaagttatcttcatacctgcaaaatggtggaggctattttcattaaaactgtcagaatttgcttaccataattatgatacagtccaaagaatgcagtcactttttatcatgttaactaattgttctcttttgaagatctatggttgactaattaaacaataattcaagtagagtgtcccagaaaaaaaccacttgggctccctgtttggagtctggctggctctgagcattgccaatggcccctactcacctgactttgtatcctctccttttagaggctttgcattctgcacccagcttcactaacagtgggctgaaaacatccttgggttgagtgtttcatttgggagttatttggccagggccttttgaacagtagtgtccccatgaagtgctagataatatatgtgtaagagtcagcttttttttttttttttaactctaacacccttcagaaatttctaactactttgtaactgcatggcttaacctggtgataaaagcagttattaaaagtctacgttttccaaaaaaaaaaaaaaa

SEQ ID NO: 297 - protein, 558 aa, Homo sapiens
MYRYLGEALLLSRAGPAALGSASADSAALLGWARGQPAAAPQPGLALAARRHYSEAVADREDDPNFFKMVEGFFDRGASIVEDKLVEDLRTRESEEQKRNRVRGILRIIKPCNHVLSLSFPIRRDDGSWEVIEGYRAQHSQHRTPCKGGIRYSTDVSVDEVKALASLMTYKCAVVDVPFGGAKAGVKINPKNYTDNELEKITRRFTMELAKKGFIGPGIDVPAPDMSTGEREMSWIADTYASTIGHYDINAHACVTGKPISQGGIHGRISATGRGVFHGIENFINEASYMSILGMTPGFGDKTFVVQGFGNVGLHSMRYLHRFGAKCIAVGESDGSIWNPDGIDPKELEDFKLQHGSILGFPKAKPYEGSILEADCDILIPAASEKQLTKSNAPRVKAKIIAEGANGPTTPEADKIFLERNIMVIPDLYLNAGGVTVSYFEWLKNLNHVSYGRLTFKYERDSNYHLLMSVQESLERKFGKHGGTIPIVPTAEFQDRISGASEKDIVHSGLAYTMERSARQIMRTAMKYNLGLDLRTAAYVNAIEKVFKVYNEAGVTFT

SEQ ID NO: 298 - DNA, 2385 bp, Homo sapiens
cccacgcgtccgcggacgcgtgggccgcgccggacccttccttcctagtcgcggggagtctgagaaagcgcacctgttccgcgaccgtcacgcacccctcctccgcctgccgcgatgtaccgctacctggccaaagcgctgctgccgtcccgggccgggcccgctgccctgggctccgcggccaaccactcggccgcgttgctgggccggggccgcggacagcccgccgccgcctcgcagccggggctcgcattggccgcccggcgccactacagcgagttggtggccgaccgcgaggacgaccccaacttcttcaagatggtggagggcttcttcgatcgcggcgccagcatcgtggaggacaagttggtgaaggacctgaggacccaggaaagcgaggagcagaagcggaaccgggtgcgcggcatcctgcggatcatcaagccctgcaaccatgtgctgagtctctccttccccatccggcgcgacgacggctcctgggaggtcatcgaaggctaccgggcccagcacagccagcaccgcacgccctgcaagggaggtatccgttacagcactgatgtgagtgtagatgaagtaaaagctttggcttctctgatgacatacaagtgtgcagtggttgatgtgccgtttgggggtgctaaagctggtgttaagatcaatcccaagaactataccgaaaatgaattggaaaagatcacaaggaggttcaccatggagctagcaaagaagggctttattggtcctggcgttgatgtgcctgctccagacatgaacacaggtgagcgggagatgtcctggattgctgatacctatgccagcaccatagggcactatgatattaatgcacacgcctgtgttactggtaaacccatcagccaagggggaatccatggacgcatctctgctactggccgtggtgtcttccatgggattgaaaacttcatcaatgaagcttcttacatgagcattttaggaatgacaccagggtttagagataaaacatttgttgttcagggatttggtaatgtgggcctacactctatgagatatttacatcgttttggtgctaaatgtattgctgttggtgagtctgatgggagtatatggaatccagatggtattgacccaaaggaactggaagacttcaaattgcaacatgggtccattctgggcttccccaaggcaaagccctatgaaggaagcatcttggaggtcgactgtgacatactgatcccagctgccactgagaagcagttgaccaaatccaacgcacccagagtcaaagccaagatcattgctgaaggtgccaatgggccaacaactccagaagctgataagatcttcctggagagaaacattttggttattccagatctctacttgaatgctggaggagtgacagtatcttactttgagtggctgaagaatctaaatcatgtcagctatggccgtttgaccttcaaatatgaaagggattctaactaccacttgctcctgtctgttcaagagagtttagaaagaaaatttggaaagcatggtggaactattcccattgtacccacggcagagttccaagacagtatatcgggtgcatctgagaaagacattgtgcactctgccttggcatacacaatggagcgttctgccaggcaaattatgcacacagccatgaagtataacctgggattggacctgagaacagctgcctatgtcaatgccattgaaaaagtcttcaaagtgtacagtgaagctggtgtgaccttcacatagatggatcatggctgacttcctcactaacctcttcacgtgtaacttctgcagacctaccacaagtttacatgtaaccacagaaatccctttctctcctgactcattactaatggataccattctcaacaagtcaatccaaatcagcccgttaaggagaaagaaattaatatacaagctgagtgtgaaagtagaaatcacctacaccagagagctattttggtattttgcctttaaataaaaagcctcctccatatggctgtgcagccttgctctgtggcttttcccagcacaatcagtgctagtgctggggaagggacagtcaagagcagtcagttgcttacttattttgctctggatgagtctgggacacgctgtaactttaacacatttaagaagaaggtgtgtggccttttcagaaggtggcatggtcctcaagtgagttcttagtattttatatcagcaaaataactcaattttgcagattgcaaacaaatataaaagctgtttctgtttatgaattttattcttttagaatagaataagtacatgctgctgtaataaaattgcctttaatcacttaaaaaaaaaaaaaaa

SEQ ID NO: 299 - protein, 558 aa, Homo sapiens
MYRYLAKALLPSRAGPAALGSAANHSAALLGRGRGQPAAASQPGLALAARRHYSELVADREDDPNFFKMVEGFFDRGASIVEDKLVKDLRTQESEEQKRNRVRGILRIIKPCNHVLSLSFPIRRDDGSWEVIEGYRAQHSQHRTPCKGGIRYSTDVSVDEVKALASLMTYKCAVVDVPFGGAKAGVKINPKNYTENELEKITRRFTMELAKKGFIGPGVDVPAPDMNTGEREMSWIADTYASTIGHYDINAHACVTGKPISQGGIHGRISATGRGVFHGIENFINQASYMSILGMTPGFRDKTFVVQGFGNVGLHSMRYLHRFGAKCIAVGESDGSIWNPDGIDPKELEDFKLQHGSILGFPKAKPYEGSILEVDCDILIPAATEKQLTKSNAPRVKAKIIAEGANGPTTPEADKIFLERNILVIPDLYLNAGGVTVSYFEWLKNLNHVSYGRLTFKYERDSNYHLLLSVQESLERKFGKHGGTIPIVPTAEFQDSISGASEKDIVHSALAYTMERSARQIMHTAMKYNLGLDLRTAAYVNAIEKVFKVYSEAGVTFT

SEQ ID NO: 300 - DNA, 3272 bp, Homo sapiens
ccaaagctctgggtaattattaaacattagaagtatagaacaaacaggccagccaggcccggcgaggccgcggcgggtccggcgccccggacctccggacccggaggtcctggcgccctggttggcgccctgcccccaaagtccgtcctccccgttaggtggcgcccaaggggaggggacagccgggcaggcaggaagctgcggcttaaaagggcaacccgcgccggacccttccttcctagtcgcggggagtctgagaaagcgcacctgttccgcgaccgtcacgcacccctcctccgcctgccgcgatgtaccgctacctggccaaagcgctgctgccgtcccgggccgggcccgctgccctgggctccgcggccaaccactcggccgcgttgctgggccggggccgcggacagcccgccgccgcctcgcagccggggctcgcattggccgcccggcgccactacagcgagttggtggccgaccgcgaggacgaccccaacttcttcaagatggtggagggcttcttcgatcgcggcgccagcatcgtggaggacaagttggtgaaggacctgaggacccaggaaagcgaggagcagaagcggaaccgggtgcgcggcatcctgcggatcatcaagccctgcaaccatgtgctgagtctctccttccccatccggcgcgacgacggctcctgggaggtcatcgaaggctaccgggcccagcacagccagcaccgcacgccctgcaagggaggtatccgttacagcactgatgtgagtgtagatgaagtaaaagctttggcttctctgatgacatacaagtgtgcagtggttgatgtgccgtttgggggtgctaaagctggtgttaagatcaatcccaagaactataccgaaaatgaattggaaaagatcacaaggaggttcaccatggagctagcaaagaagggctttattggtcctggcgttgatgtgcctgctccagacatgaacacaggtgagcgggagatgtcctggattgctgatacctatgccagcaccatagggcactatgatattaatgcacacgcctgtgttactggtaaacccatcagccaagggggaatccatggacgcatctctgctactggccgtggtgtcttccatgggattgaaaacttcatcaatcaagcttcttacatgagcattttaggaatgacaccagggtttagagataaaacatttgttgttcagggatttggtaatgtgggcctacactctatgagatatttacatcgttttggtgctaaatgtattgctgttggtgagtctgatgggagtatatggaatccagatggtattgacccaaaggaactggaagacttcaaattgcaacatgggtccattctgggcttccccaaggcaaagccctatgaaggaagcatcttggaggtcgactgtgacatactgatcccagctgccactgagaagcagttgaccaaatccaacgcacccagagtcaaagccaagatcattgctgaaggtgccaatgggccaacaactccagaagctgataagatcttcctggagagaaacattttggttattccagatctctacttgaatgctggaggagtgacagtatcttactttgagtggctgaagaatctaaatcatgtcagctatggccgtttgaccttcaaatatgaaagggattctaactaccacttgctcctgtctgttcaagagagtttagaaagaaaatttggaaagcatggtggaactattcccattgtacccacggcagagttccaagacagtatatcgggtgcatctgagaaagacatcgtgcactctgccttggcatacacaatggagcgttctgccaggcaaattatgcacacagccatgaagtataacctgggattggacctgagaacagctgcctatgtcaatgccattgaaaaagtcttcaaagtgtacagtgaagctggtgtgaccttcacatagatggatcatggctgacttcctcactaacctcttcacgtgtaacttctgcagacctaccacaagtttacatgtaaccacagaaatccctttctctcctgacatcattactaatggataccattctcaacaagtcaatccaaatcagcccgttaaggagaaagaaattaatatacaagctgagtgtgaaagtagaaatcacctacaccagagagctattttggtattttgcctttaaataaaaagcctcctccatatggctgtgcagccttgctctgtggcttttcccagcacaatcagtgctagtgctggggaagggacagtcaagagcagtcagttgcttacttattttgctctggatgagtctgggacacgctgtaactttaacacatttaagaagaaggtgtgtggccttttcagaaggtggcatggtcctcaagtgagttcttagtattttatatcagcaaaataactcaattttgcagattgcaaacaaatataaaagctgtttctgtttatgaattttattcttttagaatagaataagtacatgctgctgtaataaaattgcctttaatcacttaacaagcctaaccttgactcagtgaatgcctataaaaataataaatgaaaaaaaaccagtatttttatatcataaaagtttcatttgtagcttatcattcatgtattgtccagcagacattaaaagccctgtggataattacgttatcttcatacctgcaaaacggtggaggcattttcgttaaaactgtcagaattcgctgttataattatgacacatagtccaaagaatgcagtaacctttttatcatgttaactaattgttctcttttgaagatctatggttgactaattaaacaataattcaagtagagtgtcccagaaaaaaaccacttgggctccctgtttggagtctggctggctctgagcattgccaatggcccctactcacctgactttgtatcctcttcttttagaggctttgcattctgcacccagcttcactaacagtgggctgaaaccaaccttgggttgagtgtttcatttgggagttatttggccagggccttttgaacaaatagtgtccccatgaagtgctagataatatatgtgtaagaatcagcttttttttttttaactataatatccttcagaaatttctaactactttgtaactgcatggcttaacctggtgataaaagcagttattaaaagtctagatttttttttaaaaaaaagatagaacaaataatgggagattgggttaac

SEQ ID NO: 301 - DNA, 2083 bp, Homo sapiens
catcaaaagaatgaagaacataagaaaaggtaactacatcagtaaatatattgcttttttcttcttatttaaatgctttaaaagagaattgattgtttaaataaaaatatcaatgtaggctacatgcagtggctcacacctataatcccagcactttgggaggctgaggtgggtggatcacttgaggtcagaatgttcaagaccagcctggccaacatggtgatctttgtgtctattaaaaaatacaaaaataagccaggcgtggtggcgggcacctgtaatccagctactctaaggctgaggcaagagatcacttgaatccaggaggcagaggctgcagtcagccaaaattactccactgccctccagcctaggcaacagagtgagaatctgtctcaaaaataaaaataaaaataaatcaatgtagtatcagacttatatgtagaaattaaatatttgacaaaataacatgaaattataaggagagaaattaaaatttattattttaaggttcttaatatacaaactagtatattatcagttgaagatagtctgcaataatttaaagctatatactataaacactaaagcaaccattaatatagcaaaattgaaaatatgaagttaatagggcaacaaaggagataaaatgtaattttaagaaatatacaaataattacaaaaagacagcataatagtaaaagagaatgaacagataaaacaattataaaacaaacaccaagctgagagacttaaacctaatcacacgataatcacactaaatgtaaatggtccaaatacccccatcaaaaaggagagactttcaaatagataatgaaaattcaagacctaaccacaaaaaaaacacacttagaatataaagtcacagatagggtaaaagtggaagaatgacaaaagaagagacattcttcaccaagagtcctcggggtttcctgcttcagcagtgcttggacggaacccggcacttgtcccccacccaggccagctgcccatagccagccctccgtcacgtcttcactgcaccctcagaccaccccaaggcccccaccgccgctccagcgccacgcagccaccgccgccgcagcctctccttagtcattgccatgatgactgcatccaactcgcaggtgcgccagaactaccaccaggactcagaggccgccatcaaccgccagatcaacctggagctctacgcctcctactttaacctctccatgtcttactactttgaccgtgatgatgcggctttgaagaactttgccaaatactttcttcaccaatctcatgaggagagggagcatgctgagaaactgatgaaactgcagaaccaacaaggtggctgaattttccttcaggatatcaagaaaccagactgatgactgggatagtgggctgaatgtgatagagtgtgcattacatttggaaaaaaatgtgaatcagtcactactggaactgcacaaactggccactgacaaaaatgacccccatttgtgtgacttcattgagacacattacctgaatgagcaggtgaaagccatcaaagaattgggtgaacgtgaccaacttgcacaagatgggagcacccgaatctggcttggcagaatatctctttgacaagcacaccctgggagaaagtgataatgaaagctaagcctcaggctaatttccccatagctgtggggtgacttccctggtcaccaaggcagtgcatgcatgttggggtttcctttaccttttctataagttgtaccaaaacatccacttaagttcttttgatttgtaccattccttcaaataaagaaatctggtacccccccccaaaaaagaatgacaaaagatagcacatgtgaatacaaataaaaagtaagctactgtggctacattcatgtcagacaaagtaaatttcagagtagagaatattaccagtaataaatgattatttcatagtgataaaggggtcaattcatgaaaaagacataatcctaaacctaatacaacagttcaaaataaatgcagcaaaaactggaaggagaaagaaacagatcctctagagtcgacctgc

SEQ ID NO: 302 - DNA, 1867 bp, Homo sapiens
gggcgagcgcgacgcgggagccggggcggcgcgggcagcgcgggccggccgggctgtgcggggcgagcggcggcgcggcgggggccttcggccggggcggcagctgggcgccggcgggagctagcagcgtctgcagccgcgcccggccagccccctccggctcggcatggagctgccagctgttggcgagcacgtcttcgcggtggagagcatcgagaagaagcggatccgcaagggcagagtggagtatctggtgaaatggagaggctggtcgcccaaatataacacgtgggaaccggaggagaacatcctggaccccaggctgctgatcgccttccagaacagggaacggcaggagcagctgatgggatatcggaagagagggccgaagcccaaaccgctagtggtgcaggtgcctacctttgcccgtcgttccaatgtcctgaccggcctccaggactcctccactgacaaccgtgccaagctggatttgggcgcgcaggggaagggccaggggcatcagtacgagctcaacagcaagaagcaccaccagtaccagccgcacagcaaggaggggaagccccggccgccgggcaagagcggcaagtactactaccagctcaacagcaagaagcaccacccctaccagcccgaccccaaaatgtacgacctgcagtaccagggcggccacaaggaggcgcccagccccacctgcccggacctgggggccaagagccacccgcccgacaagtgggcgcaaggtgcgggggccaaaggctacctgggggcggtgaagcccctggccggtgcggcgggtgctccaggcaaaggctccgagaagggcccccccaacggaatgatgccggcccccaaagaggctgtgacgggcaacgggattgggggcaagatgaagatagtcaagaacaagaacaagaacggacgcatcgtgatcgtgatgagcaaatacatggagaacggcatgcaggcggtgaagatcaagtccggcgaggtggcagagggggaggctcgctcccccagccacaagaagcgggcagccgacgagcgccaccctcctgccgacaggacttttaaaaaggcggcgggcgcagaggagaagaaggtggaggcgccgcccaagaggagggaggaggaggtgtccggggttagcgatccgcagccccaggatgccggctcccgcaagctgtccccgaccaaggaggcctttggagagcagcccctgcagctcaccaccaagcccgacctgcttgcctgggacccggcccggaacacgcacccgccctcacaccacccgcacccgcacccccatcaccaccaccaccaccaccaccaccaccaccacgccgtcggcctgaatctctcccacgtgcgcaagcgctgcctctccgagacccacggcgagcgcgagccctgcaagaagcggctgactgcgcgcagcatcagcacccccacctgcctggggggcagcccagccgctgagcgcccggccgacctgccaccagccgccgccctccggcagcccgaggtcatcctgctagactcagacctggatgaacccatagacttgcgctcggtcaagagccgcagcgaggccggggagccgcccagctccctccaggtgaagcccgagacaccggcgtcggcggcggtggcggtggcggcggcagcggcacccaccacgacggcggagaagcctccagccgaggcccaggacgaacctgcagagtcgctgagcgagttcaagcccttctttgggaatataattatcaccgacgtcaccgcgaactgcctcaccgttactttcaaggagtacgtgacggtgtagccggagggcgtcggaaggggcgcc

SEQ ID NO: 303 - protein, 558 aa, Homo sapiens
MELPAVGEHVFAVESIEKKRIRKGRVEYLVKWRGWSPKYNTWEPEENILDPRLLIAFQNRERQEQLMGYRKRGPKPKPLVVQVPTFARRSNVLTGLQDSSTDNRAKLDLGAQGKGQGHQYELNSKKHHQYQPHSKEGKPRPPGKSGKYYYQLNSKKHHPYQPDPKMYDLQYQGGHKEAPSPTCPDLGAKSHPPDKWAQGAGAKGYLGAVKPLAGAAGAPGKGSEKGPPNGMMPAPKEAVTGNGIGGKMKIVKNKNKNGRIVIVMSKYMENGMQAVKIKSGEVAEGEARSPSHKKRAADERHPPADRTFKKAAGAEEKKVEAPPKRREEEVSGVSDPQPQDAGSRKLSPTKEAFGEQPLQLTTKPDLLAWDPARNTHPPSHHPHPHPHHHHHHHHHHHHAVGLNLSHVRKRCLSETHGEREPCKKRLTARSISTPTCLGGSPAAERPADLPPAAALRQPEVILLDSDLDEPIDLRSVKSRSEAGEPPSSLQVKPETPASAAVAVAAAAAPTTTAEKPPAEAQDEPAESLSEFKPFFGNIIITDVTANCLTVTFKEYVTV

SEQ ID NO: 304 - DNA, 2083 bp, Homo sapiens
ctaagacggataacgcgtcatctcgccttcccaaattttcccccctcgctagaccgggtccaaaacctccatccggagccggcaggagaggagaacgatgtttaactcggtcaacctgggcaacttctgctctccgtcgcgcaaggagaggggcgcagatttcggcgagcgagggagctgcgcctccaacctctatctgcccagttgcacttactacatgcccgagttctccacggtctcctccttcctgccccaggccccctctcgtcagatctcctatccctactcggcccaagtgcccccggtccgggaggtctcctacggcctggagccatccggcaagtggcaccatcggaacagctactcctcctgctatgcggcggccgacgagcttatgcaccgggagtgcctgcctccttccaccgtcaccgagatcctcatgaaaaacgaaggctcctacggcggccaccaccaccccagcgccccgcacgcaacccccgccggcttctactcctcagtcaacaagaacagcgtcctgcctcaagccttcgaccgtttcttcgacaacgcctactgcggtggcggcgacccgcccgccgagcccccctgctccggcaagggcgaggccaagggggagcccgaggcacccccggcctcgggactggcgtcccgggctgaggcgggtgccgaggcggaggctgaggaggagaacacaaatcccagctcgtccggttcagcccactccgtggccaaggagccggccaaaggagccgcccccaacgccccccgcacccgcaagaagcgctgcccttattcgaaattccagatccgggaactggagcgagagtttttcttcaacgtgtatatcaacaaagagaagcggctgcagctgtcccggatgctgaacctgacggaccgacaagtgaaaatttggtttcagaacagaaggatgaaagaaaagaaactgagcagagaccggctgcagtatttctcgggaaatcctctgctgtaacctgcagaccgggcccttttgggggcggggggaggggaaaattattttattttatttttattttttattttctaactcgtcttctttccgccggtggaaaactggactgtggccagggctggcccccaccgctgtggccggcactccattccggaacctcctggaccctctatctgactctcgctgtgggacagggaccgggcctggaaagggggtgaagggaagtgtctgatgcacggcgagtgaacaccgttggcgccgaggccaagactttgatttaaaagaaaacacacctcggcgacaatgtcttgctgctcggattaggtgggggaggggcgacagtagtgagcgcctgagccgaacaatcctcgaactaaaagccttcccttgcccatgtgaaaagatccgctaagacagcatgtctgccagcggaaacttctcgagctcccccctctaccccgccccaccttgccccactactttagggggcagctaaatgtgatcctgccttgctgtgaaatttctgtaccttcaacctggtgttaggtgtgcaaagtccgtgtcctacctccgtcttcgccaaggccccgcccgagcctagttgttctccccctgaatgtgtagaaccttcctttgaaatttcttaatcggtgcattgaggtttccacatctttttccaagcagtgccccacttcatggatttatagctatagtctatgcagtcgttacctcttttttttttttttttttaagaaaattgaagattggggtggtggaggcagtagggagatgggattgggcacctcccccgtgctggggcctggatttttgtaaataaatttcccaagcgtttctttccacctggagggaaagggggggacgcccccagtgagattcaaatcacgcatctctactcctctgcgtgagtgcgtgtgtacatgtgcactccccaccctgctcccttcccagagggattgctgtgaaatttttttggtggcaaataaagataaatttcattctgttcaaaaaaaaaaaaaaaaaaaaaaaaaaaaaaaaaaaaaaaaaaaaaaa

SEQ ID NO: 305 - protein, 304 aa, Homo sapiens
MFNSVNLGNFCSPSRKERGADFGERGSCASNLYLPSCTYYMPEFSTVSSFLPQAPSRQISYPYSAQVPPVREVSYGLEPSGKWHHRNSYSSCYAAADELMHRECLPPSTVTEILMKNEGSYGGHHHPSAPHATPAGFYSSVNKNSVLPQAFDRFFDNAYCGGGDPPAEPPCSGKGEAKGEPEAPPASGLASRAEAGAEAEAEEENTNPSSSGSAHSVAKEPAKGAAPNAPRTRKKRCPYSKFQIRELEREFFFNVYINKEKRLQLSRMLNLTDRQVKIWFQNRRMKEKKLSRDRLQYFSGNPLL

SEQ ID NO: 306 - DNA, 975 bp, Homo sapiens
  misc_feature (1)..(1): n is a, c, g, or t
  misc_feature (12)..(12): n is a, c, g, or t
  misc_feature (26)..(26): n is a, c, g, or t
  misc_feature (55)..(55): n is a, c, g, or t
  misc_feature (61)..(61): n is a, c, g, or t
  misc_feature (83)..(83): n is a, c, g, or t
  misc_feature (174)..(174): n is a, c, g, or t
  misc_feature (404)..(404): n is a, c, g, or t
  misc_feature (467)..(467): n is a, c, g, or t
  misc_feature (491)..(491): n is a, c, g, or t
  misc_feature (494)..(494): n is a, c, g, or t
  misc_feature (536)..(536): n is a, c, g, or t
  misc_feature (560)..(560): n is a, c, g, or t
  misc_feature (568)..(568): n is a, c, g, or t
  misc_feature (588)..(588): n is a, c, g, or t
  misc_feature (626)..(626): n is a, c, g, or t
  misc_feature (632)..(632): n is a, c, g, or t
  misc_feature (638)..(638): n is a, c, g, or t
  misc_feature (643)..(643): n is a, c, g, or t
  misc_feature (650)..(650): n is a, c, g, or t
  misc_feature (665)..(665): n is a, c, g, or t
  misc_feature (672)..(672): n is a, c, g, or t
  misc_feature (685)..(685): n is a, c, g, or t
  misc_feature (687)..(687): n is a, c, g, or t
  misc_feature (694)..(694): n is a, c, g, or t
  misc_feature (724)..(724): n is a, c, g, or t
  misc_feature (726)..(726): n is a, c, g, or t
  misc_feature (733)..(733): n is a, c, g, or t
  misc_feature (744)..(744): n is a, c, g, or t
  misc_feature (757)..(757): n is a, c, g, or t
  misc_feature (764)..(764): n is a, c, g, or t
  misc_feature (785)..(785): n is a, c, g, or t
  misc_feature (789)..(789): n is a, c, g, or t
  misc_feature (801)..(801): n is a, c, g, or t
  misc_feature (808)..(808): n is a, c, g, or t
  misc_feature (810)..(810): n is a, c, g, or t
  misc_feature (813)..(813): n is a, c, g, or t
  misc_feature (824)..(824): n is a, c, g, or t
  misc_feature (830)..(830): n is a, c, g, or t
  misc_feature (833)..(833): n is a, c, g, or t
  misc_feature (836)..(836): n is a, c, g, or t
  misc_feature (838)..(838): n is a, c, g, or t
  misc_feature (843)..(843): n is a, c, g, or t
  misc_feature (853)..(854): n is a, c, g, or t
  misc_feature (870)..(870): n is a, c, g, or t
  misc_feature (872)..(872): n is a, c, g, or t
  misc_feature (875)..(875): n is a, c, g, or t
  misc_feature (894)..(894): n is a, c, g, or t
  misc_feature (898)..(898): n is a, c, g, or t
  misc_feature (919)..(919): n is a, c, g, or t
  misc_feature (925)..(925): n is a, c, g, or t
  misc_feature (928)..(928): n is a, c, g, or t
  misc_feature (930)..(930): n is a, c, g, or t
  misc_feature (944)..(944): n is a, c, g, or t
  misc_feature (947)..(947): n is a, c, g, or t
  misc_feature (962)..(962): n is a, c, g, or t
  misc_feature (964)..(964): n is a, c, g, or t
  misc_feature (972)..(972): n is a, c, g, or t
  misc_feature (975)..(975): n is a, c, g, or t
ncctcccccctncccttttcgtcttnccgttaaggtggaggaggtcaccgatgtnaccatngtgccacaggctgatttcctgnctcacacccaggctctagggaagtaggcttgttgctgacagcctgggcctaaccccatctgctcacctcatgttgcctgatctgctgatgnagggtggtaagttgagtgcagcccaacaggtggatggggactcctaaatatcccccaaatgctggactcactgccacccccacaaggacacatgggcatcctgtactgagactgcaagtacagcatatggggtctgtctccaagccctgtttccttctcaggcctactgcctccccagtgcctctccctgtgtggtccacccttgggttcagcgctatgcctatgcagtnggctccctccaatcctcaagctgagtgggtaaattacgctttggagagtgagggttgtcaccntcctaagcctggaacagacttggnctngtcttgcttgtaaatcacctggtcctccttttcccttagggnggtgagtcgccctctgaaggcttnggccaggngggggaattcttggcttcantctcttgctcctccattttcttttccaataaaattgtnggttantaattngtgcnccccacnggggaaaaaattttnggacctncttcttttgtgangnttttggnaaccctgggatcccccagggaggtgggggngntcaccanaatccagggangcccctcttttgnggggggnggaataaaggggggaatttgntttngggggggggggnggaaccncnggnggttctccccnggtttnaanaantnttcgnaaggggattnnccaaattcgggcaatnanggncccgggaattaggaattcncctncgggggtccttaacattttcntacganccnanttcccccccggttnggnactttctacacccgncntaaaactnttn

SEQ ID NO: 307 - DNA, 3628 bp, Homo sapiens
gcgggcgcgcgtcccgtccaggtccggagtaaccgccgccgccgccgccaaagctcgccaacatggcggacctggaggccgtgctggccgatgtcagttacctgatggccatggagaagagcaaggcgaccccggccgcccgcgccagcaagaggatcgtcctgccggagcccagtatccggagtgtgatgcagaagtaccttgcagagagaaatgaaataacctttgacaagattttcaatcagaaaattggtttcttgctatttaaagatttttgtttgaatgaaattaatgaagctgtacctcaggtgaagttttatgaagagataaaggaatatgaaaaacttgataatgaggaagaccgcctttgcagaagtcgacaaatttatgatgcctacatcatgaaggaacttctttcctgttcacatcctttctcaaagcaagctgtagaacacgtacaaagtcatttatccaagaaacaagtgacatcaactctttttcagccatacatagaagaaatttgtgaaagccttcgaggtgacatttttcaaaaatttatggaaagtgacaagttcactagattttgtcagtggaaaaacgttgaattaaatatccatttgaccatgaatgagttcagtgtgcataggattattggacgaggaggattcggggaagtttatggttgcaggaaagcagacactggaaaaatgtatgcaatgaaatgcttagataagaagaggatcaaaatgaaacaaggagaaacattagctttaaatgaaagaatcatgttgtctcttgtcagcacaggagactgtcctttcattgtatgtatgacctatgccttccataccccagataaactctgcttcatcctggatctgatgaacgggggcgatttgcactaccacctttcacaacacggtgtgttctctgagaaggagatgcggttttatgccactgaaatcattctgggtctggaacacgtgcacaatcggtttgttgtctacagagatttgaagccagcaaatattctcttggatgaacatggacacgcaagaatatcagatcttggtcttgcctgcgatttttccaaaaagaagcctcatgcgagtgttggcacccatgggtacatggctcccgaggtgctgcagaaggggacggcctatgacagcagtgccgactggttctccctgggctgcatgcttttcaaacttctgagaggtcacagccctttcagacaacataaaaccaaagacaagcatgaaattgaccgaatgacactcaccgtgaatgtggaacttccagacaccttctctcctgaactgaagtcccttttggagggcttgcttcagcgagacgttagcaagcggctgggctgtcacggaggcggctcacaggaagtaaaagagcacagctttttcaaaggtgttgactggcagcatgtctacttacaaaagtacccaccacccttgattcctccccggggagaagtcaatgctgctgatgcctttgatattggctcatttgatgaagaggataccaaagggattaagctacttgattgcgaccaagaactctacaagaacttccctttggtcatctctgaacgctggcagcaagaagtaacggaaacagtttatgaagcagtaaatgcagacacagataaaatcgaggccaggaagagagctaaaaataagcaacttggccacgaagaagattacgctctggggaaggactgtattatgcacgggtacatgctgaaactgggaaacccatttctgactcagtggcagcgtcgctatttttacctctttccaaatagacttgaatggagaggagagggagagtcccggcaaaatttactgacaatggaacagattctctctgtggaagaaactcaaattaaagacaaaaaatgcattttgttcagaataaaaggagggaaacaatttgtcttgcaatgtgagagtgatccagagtttgtgcagtggaagaaagagttgaacgaaaccttcaaggaggcccagcggctattgcgtcgtgccccgaagttcctcaacaaacctcggtcaggtactgtggagctcccaaagccatccctctgtcacaggaacagcaacggcctctgacacccagaaacagggagggtcctcgaggaggacacaccagggtctcagccttttggggtgaacgaggatgaggcatctgatctattcgctaccgggactcctccaggctcccgagaggagtcgggacccttcggcttggggtcagctcagctccctgccttgtcacatttgtctgcattagaaactactgaagaaataaaagttctttttctttgctacacactttggtacctatgaacctagaacttgaagtgactcctacttatcacgtaaatttttatgtctgatatcaaacacatcttagactccccagaatggaatttaaagatgttcagtgttgggtaacagattgccctaagcattgccacatattctgtctagtcactgctgattttctatgtctttgctccatactgctgggggatgggagagccacagtgtgtttcttttgtgcacttcgcaactgacttcttgtcctggggttaaaagttgaagatattttctgatgatattaaaagttgaagatatttctgcacttgggccctcctctgggagccgcacccacatgactgccctgcctctgaccagtctgttccggggccccctcagccaggtgggaatgacggacacgtactatccaagtgtatgggattaactaatcattgaaggcattcatccgtccatcattggaaagatttacagtgattctgaaggacaggccgtggagttttaggtttcaggggcaagagcagttttcaaaagtctttgagtccagtgtgcacgagtcgacaagcagtacctggcatgcaggagcactcatgggtgagtccgtctcaggtctcgacaattagcagttgtgtgacagtcattctggttccttctgcctgaccctgggagacatatcagtaatggatgtacaaaagcaggtctgttttatgtcttagtataatttcagatgaattgtattgaaaaaatgctgaggaatgaatgtgtcaaaatgggttaactgtgtatattgactttcatgtcgtcatgcatctgtcatgaatgaatgatactttgcactgggctgtacgacagtgaggaccttagggcatgaagcctttttcctggtcccagcagcatctgccctgtgaagtttgttttctcccactgcctccaggccccactgatacccccaaatagatgctgggttatgagaaccagcgaaatcccccatgtcatcagtcttaaaaaaaaaattttacaaatccacgtatttgtcccattcttggagtagttttagtgtatgtctttacattaactactaacagtataaataacttgacatcgtaattgtctgcatcctgtccttgatatttttagcagttccaaatctttgtttttgtatttgtttgctgtgttcatgggcaaagtaagtactttttaatgcagttattttgagagtttggaagataattaccaaaagggtccattatttcataagagttactttgcaa

SEQ ID NO: 308 - protein, 688 aa, Homo sapiens
MADLEAVLADVSYLMAMEKSKATPAARASKRIVLPEPSIRSVMQKYLAERNEITFDKIFNQKIGFLLFKDFCLNEINEAVPQVKFYEEIKEYEKLDNEEDRLCRSRQIYDAYIMKELLSCSHPFSKQAVEHVQSHLSKKQVTSTLFQPYIEEICESLRGDIFQKFMESDKFTRFCQWKNVELNIHLTMNEFSVHRIIGRGGFGEVYGCRKADTGKMYAMKCLDKKRIKMKQGETLALNERIMLSLVSTGDCPFIVCMTYAFHTPDKLCFILDLMNGGDLHYHLSQHGVFSEKEMRFYATEIILGLEHVHNRFVVYRDLKPANILLDEHGHARISDLGLACDFSKKKPHASVGTHGYMAPEVLQKGTAYDSSADWFSLGCMLFKLLRGHSPFRQHKTKDKHEIDRMTLTVNVELPDTFSPELKSLLEGLLQRDVSKRLGCHGGGSQEVKEHSFFKGVDWQHVYLQKYPPPLIPPRGEVNAADAFDIGSFDEEDTKGIKLLDCDQELYKNFPLVISERWQQEVTETVYEAVNADTDKIEARKRAKNKQLGHEEDYALGKDCIMHGYMLKLGNPFLTQWQRRYFYLFPNRLEWRGEGESRQNLLTMEQILSVEETQIKDKKCILFRIKGGKQFVLQCESDPEFVQWKKELNETFKEAQRLLRRAPKFLNKPRSGTVELPKPSLCHRNSNGL

SEQ ID NO: 309 - DNA, 1503 bp, Homo sapiens
gcacgcccagcgagttccagaggcgccagtggaagctgcggcggcggtgtctcgcgttcggcgggatttctcttcgctccggctcggcctaggtctacgtccccagctccagccgccggctcggactcggtctctgacccccaactcggtcccctagtccggccccggctccgggccccccaaccctcgctccggcccggcccggcccccaccccagccctgccgcccggccccaggcccggccgcggccgctcccgcctggagccgccgcgcgcccccagcccccctgcaccccctcggcccctcgccttcctcttcccggcgcggccccccggcttccgcgcgccgcccgccaccaatcctcttgctaccatgtccgtggagctcgaggaggccctgccagtgacgaccgccgagggaatggccaagaaggtgaccaaggctggcggctcggcggcgttgtccccatctaagaagaggaagaatagcaagaagaagaaccagccgggcaagtacagccagctggtggtggagaccatccgtaggctgggcgagcgcaacggctcgtcgctggccaagatctacaccgaggccaagaaggttccgtggttcgaccagcagaatgggcgcacctacctcaagtactcgatcaaggcgctggtgcagaacgacacgcttctgcaggtgaagggcaccggcgccaacggttccttcaagctcaaccgcaagaagctggagggcggcggggagcggcgcggagccccggcggccgccaccgccccggcccccaccgcgcacaaagcgaagaaggcagccccgggcgcggccggctcccggcgcgcggacaagaagcccgccaggggccagaagccggagcagcgctcgcacaagaagggcgctggcgccaagaaggacaaaggcggcaaggccaagaagacggcggccgccgggggcaagaaggtgaagaaggcggccaagcccagcgtccccaaagtgcccaagggccgcaagtgagcgtgtcggccggtcagagcggccggcgtgggcttttcggtgtttttgtttttctaccccaagtgacgtagattttgtacggctcacgccggccggggccgcgaggcctggtctgagcctcagggaggggccccgggtcctctcagtctttcccctcccccaacgatgtagcgtttttcgttgtttgctttaggtttttgaaacagccccggcgacgcctctattggctctcggccttggcaacggccgtcgtcatggttactggcccctaggcgccgatggccgaggccgcgcctgcccaccgggcggggtcgctggttggccgggcccaggcgcgcggggacgcggaggccgcgcatcctttcccagctccccaccctccttgcctttgggtgcgcgacaaacaatcgctccgggctcagggctgcgcggctcttcccttcattccatgggcctttttttgggcacaataaagcgtttaaacctttc

SEQ ID NO: 310 - protein, 213 aa, Homo sapiens
MSVELEEALPVTTAEGMAKKVTKAGGSAALSPSKKRKNSKKKNQPGKYSQLVVETIRRLGERNGSSLAKIYTEAKKVPWFDQQNGRTYLKYSIKALVQNDTLLQVKGTGANGSFKLNRKKLEGGGERRGAPAAATAPAPTAHKAKKAAPGAAGSRRADKKPARGQKPEQRSHKKGAGAKKDKGGKAKKTAAAGGKKVKKAAKPSVPKVPKGRK

SEQ ID NO: 311 - DNA, 5361 bp, Homo sapiens
gccagcgatcagagcagcgctgggtgttcaggggccaagatggcggcgcgccggggacggagagacggagtcgcgccgcccccgagtgggggccccggtccggaccctggcgggggagcccgcggcagtggttggcgaagtcgaagccaagcgccgtatgggactttgggcgctgtgagcggcggcgagcaggtgctgctgcatgaggaggcgggtgattctggctttgtcagtctctctcggcagggcccatctctgagggacaaggacctggaaatggaggagctaatgctgcaggatgagacactgctggggaccatgcagagctacatggatgcctcccttatctccctcattgaggattttgggagccttggagagagcaggttatctctggaggaccacaatgaagtgtcgctgctcacggctctgacggagatcttggacaatgcagattctgagaacctttctccatttgacagcattcctgattcggagctgcttgtgtcaccccgggagggctcctctctgcacaagctgcttactctctctcggacacccccagaacgtgacctcatcaccccagttgacccactggggcccagtacgggcagcagtagagggagtggggttgaaatgtctcttccagatccctcttgggacttctccccaccctctttcttagagacctcttcccccaagcttcctagctggagacccccaagatcaagaccacgctggggccaatccccacctccccagcagcgcagtgatggagaagaagaggaggaggtggccagcttcagtggccagattcttgccggggagcttgacaactgtgtgagcagtatcccggacttccccatgcatttggcctgccctgaggaggaagataaagcaacagcagcagagatggcagtgccagcagctggtgatgagagcatctcctccctgagtgagctggtgcgggccatgcacccatactgcctgcccaacctcacccacctggcatcacttgaggatgagcttcaggagcagccagatgatttgacactgcctgagggctgcgtagtgctggagattgtggggcaggcagccacagctggcgatgacctggagatcccagttgtggtgcgacaggtctctcctggaccccggcctgtgctcctggatgactcgctagagactagttctgccttgcagctgcttatgcctacactggagtcagagacagaggctgctgtgcccaaggtaaccctctgctctgagaaagaggggttgtcattgaactcagaggagaagctggactcagcctgcttattgaagcccagggaggtcgtggagccggtggtgcccaaggagcctcagaacccacctgccaatgcagcaccaggttcccagagagctcgaaagggcaggaagaagaagagcaaggagcagccagcagcctgtgtggaaggctatgccaggaggctgaggtcatcttctcgcgggcagtctactgtaggtacagaagtgacctctcaggtagacaacttgcagaaacagcctcaggaagaacttcaaaaagagtctgggcctctccagggtaaggggaagccccgggcttgggctcgggcctgggcagctgccttggagaattctagccctaagaacttggagagaagtgctggacaaagtagtcctgctaaagaaggccctctagacctctacccaaagctggctgacactatccaaaccaatcctataccaacccatctctcattggtcgactctgcccaagccagccccatgccagttgactctgttgaagctgatcccactgcagttggccctgttctagctggccctgtacctgttgaccctgggttggttgaccttgcttcaaccagctcagaactggttgagcctctcccggctgagccagtgctgatcaacccagtcctggctgactcagcagcagttgaccctgcagtggttcccatctcagataacttgccaccagttgatgctgtcccgtctggcccagcaccagttgatctagcactggttgaccctgttcctaatgacctgactccagttgacccagtgctagttaagtccagaccaactgatcccagacgtggtgcagtgtcatcagccctggggggttcagcaccccagctcctcgtggagtcagagtccttggacccaccaaagaccatcatccctgaagtcaaagaggttgtggattctctgaaaattgaaagtggtaccagtgctacaacccatgaagccagacctcggcctctcagcttatctgagtaccggcgacgaaggcagcaacgccaagcagaaacagaagagagaagtccacagcccccaactgggaagtggcctagccttccagagactcccacagggctggcagacatcccttgtcttgtcatcccaccagccccagccaagaagacagctctgcagagaagccctgaaacaccccttgagatttgccttgtgcctgtaggtcccagccctgcttctcctagtcctgagccacctgtaagcaaacctgtggcctcatctcccactgagcaggtgccatcccaggagatgccactgttggcgagaccttcccctcctgtgcagtctgtgtcccctgctgtgcccacacctccctcgatgtctgctgccctgcctttccctgcaggtgggcttggcatgccccccagtctgcccccacctcccttgcagcctcctagtcttccattgtctatggggccagtactacctgatccgtttactcactatgcccccttgccatcctggccttgttatcctcatgtgtccccttctggctatccttgcctgccccccccaccaacggtgcccctagtgtctggtactcctggtgcctatgccgtgcctcccacttgcagtgtgccttgggcaccccctcctgccccagtctcaccttacagttccacatgtacctatgggcccttgggatggggcccagggcctcaacatgctccattctggtctactgttcccccacctcctttgcctccagcctccattgggagagctgttccccaacctaaaatggagtctaggggcactccagctggccctcctgaaaatgtacttcccttgtcgatggctcctcccctcagtcttgggctacctggccatggagctcctcagacagagcctaccaaggtggaggtcaagccagtgcctgcatctccccatccgaaacacaaggtgtctgccctggtgcaaagtccccagatgaaggctctagcatgtgtgtctgctgaaggtgtgactgttgaggagcctgcatcagagaggctaaagcctgagacccaagagaccaggcccagggagaagccccccttgcctgctaccaaggctgttcccacaccaaggcagagcactgtccccaagctgcctgctgtccacccagcccgtctaaggaagctgtccttcctgcctaccccacgtactcagggttctgaagatgtggtacaggctttcatcagtgagattggaattgaggcatcggacctgtccagtctgctggagcagtttgagaaatcagaagccaaaaaggagtgtcctcctccggctcctgctgacagcttggctgtaggaaactcaggcggcgttgacattccccaggagaagaggcccctagaccggttacaagccccagaactggccaacgtggcagggctcacccctccagctacccctccccaccagttatggaagcccctggctgctgtctcactgctggccaaagccaaatctcctaagtccaccgcccaggagggaaccctgaagcctgaaggagttacggaggccaaacatccagctgcagttcgcctccaagaaggggtccatggccctagtcgagtccatgtgggctctggggaccatgactattgtgtccggagcaggacccccccaaaaaagatgcctgccctagtcattccagaggtgggctcccgatggaatgtcaagcgccatcaggacatcaccatcaaacctgtcttgtccttgggcccagctgcccctccgcccccatgcatagctgcctcccgggagccgcttgatcacaggactagcagtgagcaggcagatccctcagcaccctgccttgccccatccagcttgctgtcccctgaggcctcaccctgccggaatgacatgaacactaggactccccctgaaccctcagccaagcagcggtcaatgcgctgttaccgaaaagcctgcaggtcagccagcccctcaagccagggctggcagggccgccgaggccgcaacagccgttctgtcagctctgggtccaaccggactagcgaagcatcttcctcatcctcatcatcgtcttcctcatcccgatctcggtccaggtccctctcccccccacacaagaggtggcgaaggtccagctgtagttcctctggacgttctcgaagatgctcttcctcttcttcgtcatcatcttcctcttcgtcttcctcatcctcatcatccagttctcgaagccgctcacgatccccatccccccgccggagaagtgacaggaggcggcggtacagctcttatcgttcacatgaccattaccaaaggcaaagagtgctacaaaaggagcgtgcaatagaagaaagaagggtggtcttcattggaaagatacctggccgcatgactcgatcagagctgaaacagaggttctccgtttttggagagattgaggagtgcaccatccacttccgtgtccaaggggacaactacggcttcgtcacttatcgctatgctgaggaggcatttgcagccattgagagtggccacaagctgcggcaggcagatgagcagccctttgatctctgctttgggggccgaaggcagttctgcaagaggagctattctgatcttgactccaaccgggaagactttgacccagcacctgtaaagagcaaatttgattctcttgactttgacacattgttgaaacaggcccagaagaacctcaggaggtaaccttgggcccttccctgctatcctttttctcctttggaggtgcccaacctcctccacccccttcccctactctaggggagagagctgctagtgagatgactgttttataaagaaatggaaaaaagtgaaataaaaaatatgttgaatcagattttttaaaaggggtatttgtttttttataacaggtattgaaacaagttaacttgcattcctatgtaagataggaggggctgaggggatccccagtgtttggaacataagtcactatgcagactaataaacatcaactagagagagaaaaaaaaaaaaaaaaaaaaaaaaaaaaaa

SEQ ID NO: 312 - protein, 1664 aa, Homo sapiens
MAARRGRRDGVAPPPSGGPGPDPGGGARGSGWRSRSQAPYGTLGAVSGGEQVLLHEEAGDSGFVSLSRQGPSLRDKDLEMEELMLQDETLLGTMQSYMDASLISLIEDFGSLGESRLSLEDHNEVSLLTALTEILDNADSENLSPFDSIPDSELLVSPREGSSLHKLLTLSRTPPERDLITPVDPLGPSTGSSRGSGVEMSLPDPSWDFSPPSFLETSSPKLPSWRPPRSRPRWGQSPPPQQRSDGEEEEEVASFSGQILAGELDNCVSSIPDFPMHLACPEEEDKATAAEMAVPAAGDESISSLSELVRAMHPYCLPNLTHLASLEDELQEQPDDLTLPEGCVVLEIVGQAATAGDDLEIPVVVRQVSPGPRPVLLDDSLETSSALQLLMPTLESETEAAVPKVTLCSEKEGLSLNSEEKLDSACLLKPREVVEPVVPKEPQNPPANAAPGSQRARKGRKKKSKEQPAACVEGYARRLRSSSRGQSTVGTEVTSQVDNLQKQPQEELQKESGPLQGKGKPRAWARAWAAALENSSPKNLERSAGQSSPAKEGPLDLYPKLADTIQTNPIPTHLSLVDSAQASPMPVDSVEADPTAVGPVLAGPVPVDPGLVDLASTSSELVEPLPAEPVLINPVLADSAAVDPAVVPISDNLPPVDAVPSGPAPVDLALVDPVPNDLTPVDPVLVKSRPTDPRRGAVSSALGGSAPQLLVESESLDPPKTIIPEVKEVVDSLKIESGTSATTHEARPRPLSLSEYRRRRQQRQAETEERSPQPPTGKWPSLPETPTGLADIPCLVIPPAPAKKTALQRSPETPLEICLVPVGPSPASPSPEPPVSKPVASSPTEQVPSQEMPLLARPSPPVQSVSPAVPTPPSMSAALPFPAGGLGMPPSLPPPPLQPPSLPLSMGPVLPDPFTHYAPLPSWPCYPHVSPSGYPCLPPPPTVPLVSGTPGAYAVPPTCSVPWAPPPAPVSPYSSTCTYGPLGWGPGPQHAPFWSTVPPPPLPPASIGRAVPQPKMESRGTPAGPPENVLPLSMAPPLSLGLPGHGAPQTEPTKVEVKPVPASPHPKHKVSALVQSPQMKALACVSAEGVTVEEPASERLKPETQETRPREKPPLPATKAVPTPRQSTVPKLPAVHPARLRKLSFLPTPRTQGSEDVVQAFISEIGIEASDLSSLLEQFEKSEAKKECPPPAPADSLAVGNSGGVDIPQEKRPLDRLQAPELANVAGLTPPATPPHQLWKPLAAVSLLAKAKSPKSTAQEGTLKPEGVTEAKHPAAVRLQEGVHGPSRVHVGSGDHDYCVRSRTPPKKMPALVIPEVGSRWNVKRHQDITIKPVLSLGPAAPPPPCIAASREPLDHRTSSEQADPSAPCLAPSSLLSPEASPCRNDMNTRTPPEPSAKQRSMRCYRKACRSASPSSQGWQGRRGRNSRSVSSGSNRTSEASSSSSSSSSSSRSRSRSLSPPHKRWRRSSCSSSGRSRRCSSSSSSSSSSSSSSSSSSSSRSRSRSPSPRRRSDRRRRYSSYRSHDHYQRQRVLQKERAIEERRVVFIGKIPGRMTRSELKQRFSVFGEIEECTIHFRVQGDNYGFVTYRYAEEAFAAIESGHKLRQADEQPFDLCFGGRRQFCKRSYSDLDSNREDFDPAPVKSKFDSLDFDTLLKQAQKNLRR

SEQ ID NO: 313 - DNA, 2634 bp, Homo sapiens
ggcacgaggctgagtgtccgtctcgcgcccggaagcgggcgaccgccgtcagcccggaggaggaggaggaggaggaggaggagggggcggccatggggctgctgtcccagggctcgccgctgagctgggaggaaaccaagcgccatgccgaccacgtgcggcggcacgggatcctccagttcctgcacatctaccacgccgtcaaggaccggcacaaggacgttctcaagtggggcgatgaggtggaatacatgttggtatcttttgatcatgaaaataaaaaagtccggttggtcctgtctggggagaaagttcttgaaactctgcaagagaagggggaaaggacaaacccaaaccatcctaccctttggagaccagagtatgggagttacatgattgaagggacaccaggacagccctacggaggaacaatgtccgagttcaatacagttgaggccaacatgcgaaaacgccggaaggaggctacttctatattagaagaaaatcaggctctttgcacaataacttcatttcccagattaggctgtcctgggttcacactgcccgaggtcaaacccaacccagtggaaggaggagcttccaagtccctcttctttccagatgaagcaataaacaagcaccctcgcttcagtaccttaacaagaaatatccgacataggagaggagaaaaggttgtcatcaatgtaccaatatttaaggacaagaatacaccatctccatttatagaaacatttactgaggatgatgaagcttcaagggcttctaagccggatcatatttacatggatgccatgggatttggaatgggcaattgctgtctccaggtgacattccaagcctgcagtatatctgaggccagatacctttatgatcagttggctactatctgtccaattgttatggctttgagtgctgcatctcccttttaccgaggctatgtgtcagacattgattgtcgctggggagtgatttctgcatctgtagatgatagaactcgggaggagcgaggactggagccattgaagaacaataactataggatcagtaaatcccgatatgactcaatagacagctatttatctaagtgtggtgagaaatataatgacatcgacttgacgatagataaagagatctacgaacagctgttgcaggaaggcattgatcatctcctggcccagcatgttgctcatctctttattagagacccactgacactgtttgaagagaaaatacacctggatgatgctaatgagtctgaccattttgagaatattcagtccacaaattggcagacaatgagatttaagccccctcctccaaactcagacattggatggagagtagaatttcgacccatggaggtgcaattaacagactttgagaactctgcctatgtggtgtttgtggtactgctcaccagagtgatcctttcctacaaattggattttctcattccactgtcaaaggttgatgagaacatgaaggtagcacagaaaagagatgctgtcttgcagggaatgttttatttcaggaaagatatttgcaaaggtggcaatgcagtggtggatggttgtggcaaggcccagaacagcacggagctcgctgcagaggagtacaccctcatgagcatagacaccatcatcaatgggaaggaaggtgtgtttcctggactgatcccaattctgaactcttaccttgaaaacatggaagtggatgtggacaccagatgtagtattctgaactacctaaagctaattaagaagagagcatctggagaactaatgacagttgccagatggatgagggagtttatcgcaaaccatcctgactacaagcaagacagtgtcataactgatgaaatgaattatagccttattttgaagtgtaaccaaattgcaaatgaattatgtgaatgcccagagttacttggatcagcatttaggaaagtaaaatatagtggaagtaaaactgactcatccaactagacattctacagaaagaaaaatgcattattgacgaactggctacagtaccatgcctctcagcccgtgtgtataatatgaagaccaaatgatagaactgtactgttttctgggccagtgagccagaaattgattaaggctttctttggtaggtaaatctagagtttatacagtgtacatgtacatagtaaagtatttttgattaacaatgtattttaataacatatctaaagtcatcatgaactggcttgtacatttttaaattcttactctggagcaacctactgtctaagcagttttgtaaatgtactggtaattgtacaatacttgcattccagagttaaaatgtttactgtaaatttttgttcttttaaagactacctgggacctgatttattgaaatttttctctttaaaaacattttctctcgttaattttcctttgtcatttcctttgttgtctacattaaatcacttgaatccattgaaagtgcttcaagggtaatcttgggtttctagcaccttatctatgatgtttcttttgcaattggaataatcacttggtcaccttgccccaagctttcccctctgaataaatacccattgaactctgaaaaaaaaaaaaaaaaaaa

SEQ ID NO: 314 - protein, 637 aa, Homo sapiens
MGLLSQGSPLSWEETKRHADHVRRHGILQFLHIYHAVKDRHKDVLKWGDEVEYMLVSFDHENKKVRLVLSGEKVLETLQEKGERTNPNHPTLWRPEYGSYMIEGTPGQPYGGTMSEFNTVEANMRKRRKEATSILEENQALCTITSFPRLGCPGFTLPEVKPNPVEGGASKSLFFPDEAINKHPRFSTLTRNIRHRRGEKVVINVPIFKDKNTPSPFIETFTEDDEASRASKPDHIYMDAMGFGMGNCCLQVTFQACSISEARYLYDQLATICPIVMALSAASPFYRGYVSDIDCRWGVISASVDDRTREERGLEPLKNNNYRISKSRYDSIDSYLSKCGEKYNDIDLTIDKEIYEQLLQEGIDHLLAQHVAHLFIRDPLTLFEEKIHLDDANESDHFENIQSTNWQTMRFKPPPPNSDIGWRVEFRPMEVQLTDFENSAYVVFVVLLTRVILSYKLDFLIPLSKVDENMKVAQKRDAVLQGMFYFRKDICKGGNAVVDGCGKAQNSTELAAEEYTLMSIDTIINGKEGVFPGLIPILNSYLENMEVDVDTRCSILNYLKLIKKRASGELMTVARWMREFIANHPDYKQDSVITDEMNYSLILKCNQIANELCECPELLGSAFRKVKYSGSKTDSSN

SEQ ID NO: 315 - DNA, 2515 bp, Homo sapiens
gggggagctcgcccgctgtccgccagcccgcgggagggaggagagaagcgaagcgtttccgcggttggctactcagtgtcttggtctcaagttgcctcattgcggctggcgttcccaatacagacgcatcgtttcttttttaatactccctaagaaagggaataaccttcaagctggcgggagcaatggttcacataaagaaaggcgagctgacccaggaggagaaggagctactggaagtcatcgggaaaggtactgtccaagaagctggaacattattatccagcaagaatgttcgtgtcaactgtttggacgagaatggaatgactcctctaatgcatgcagcatataaaggaaaactcgatatgtgcaaattactactgcgacatggagccgatgtaaattgtcatcagcatgaacatggatacacagccctcatgtttgctgcactttctggtaataaagacatcacatgggtaatgttagaggctggtgctgagacagatgttgtcaactctgtgggaagaacagcagctcagatggcagcctttgtgggtcaacatgattgtgtgaccataatcaacaatttctttcctcgagagagactggattattacactaagccccagggactggataaagagccaaaactgcccccaaagttggcaggcccgctgcacaaaattatcaccacaacgaatcttcatcctgtcaagatcgtgatgcttgtaaatgagaatcctctgctgacagaagaagcagccctgaataaatgctacagagtgatggatttgatttgtgagaaatgtatgaagcaaagagacatgaatgaagtattggctatgaagatgcattacataagctgtatctttcagaaatgcattaacttcttaaaagatggagagaataaactggacaccttgatcaaaagcttgctaaaaggccgagcttctgatggctttccagtgtatcaagaaaagatcattagagaaagtatcagaaaaatttccttactgtgaagctacactcctccagcagctggttcgaagcattgctcctgttgaaattggttctgatcccactgcattctccgtccttacccaagccatcactggccaggtgggttttgtggatgtggaattttgcactacctgtggagaaaagggagcaagtaaaagatgttcagtttgcaaaatggtaatatattgtgatcaaacctgccagaaaacacactggtttactcataagaaaatctgtaagaatctgaaggacatttacgaaaagcaacagttggaggctgccaaagaaaagagacaagaggaaaaccacggcaaacttgatgtcaattctaactgtgttaatgaagagcaaccagaggctgaagtaggtatctctcaaaaggattccaatcctgaagattccggggaaggaaagaaagaatctcttgaaagcgaagctgagttggaaggcttacaggatgctcctgcagggccacaggtgtctgaggagtaaaagccagagcaagtgccagtgtggatggtcctcaccctgcaagaagctggaaaactcctaggaatgcattgtcctcaccttgttacacctgcgtggcaccatggcaggattccacatttcatagaatacaggttttcaagcaaacccctgttgaccatgccctaatttcctattgatttctgttctatgattgaatggatattcctatggaaaattttttgtttcaaaatacaggaaaaacatacctattacctttctgaggctggctttccagcaattgtttcaaaggaaaatagatccccttaaagaaaaaatacaggctttagggtacaaagggacaagcagaacaggtgtggaagagagattttcaggaagggaaaaatttatagctacagagggtagttagaaaaatcataacttatatgtgaataaaatacatataagcagcatttacggtagtggcattctacttattaagatgcaatgaaatgaagaaaggctttatgttcaaggacctttgccatagttcagctaattgtagttttatatagaaatgatcctgaacactctgaacttgacgtagtcctgcggtgatattctatctgcagtatttgtacctccagaatggcagatccctcagcaggaacaaaggcatattgacggttctctcagcgtatgcattaaaaaaggtacttcctgaaacttttgattcaataatgactaaacatactatgtacacaattactgtaaggctaattcacgtgccatactccacctgaaagcctgagttatcttgctataagcttttcatggagcacttcctttccagaaactgatttgtaactcatttagagaatgtcctggcgtcggtttttagcatatgtggtatttaaacagagctagaatgtgatgtctgaagataatgctgcatttctgggtttcttgtgtggattttaaaataaattgtgcctacaaatataaacaaaaaaaaaaaaaaaaaaaa

SEQ ID NO: 316 - DNA, 2006 bp, Homo sapiens
ctagcagcgggtcggagatcgaaggaacgggccaattgcggctgaaacgtctttggaaggaggaagggggtgagggagcatccctttgagtttcgcctcttctcgaggcggtggtgggaagggagacatacttaatactgccctcttaatccaacggaccttacatcgtgtagactgccgggagggcggcgggaaaagggcaagacgggagttggggaagggaaggagccaggaagccgcgcgggagggcgcgcgcgcgcgcccctttttcagcagtgtggcggggtcgcacgcacgcccgcctcggcggctgggcgcgatttgcgacagtggggggggcggtggaggtggcggcggcagcggcaactttgcggcaagctcgggccgggcttgcttgacggcggtgtggcggaggccccgccccaggcggcaggaacctggagggaggcggaggaatatgtccgagagggaagtgtcgactgcgccggcgggaacagacatgcctgcggccaagaagcagaagctgagcagtgacgagaacagcaatccagacctctctggagacgagaatgatgacgctgtcagtatagaaagtggtacaaacactgaacgccctgatacacctacaaacacgccaaatgcacctggaaggaaaagttggggaaagggaaaatggaagtcaaagaaatgcaaatattctttcaaatgtgtaaatagtctcaaggaagatcataaccaaccattgtttggagttcagtttaactggcacagtaaagaaggagatccattagtgtttgcaactgtaggaagcaacagagttaccttgtatgaatgtcattcacaaggagaaatccggttgttgcaatcttacgtggatgctgatgctgatgaaaacttttacacttgtgcatggacctatgatagcaatacgagccatcctctgctggctgtagctggatctagaggcataattaggataataaatcctataacaatgcagtgtataaagcactatgttggccatggaaatgctatcaatgagctgaaattccatccaagagatccaaatcttctcctgtcagtaagtaaagatcatgctttacgattatggaatatccagacggacactctggtggcaatatttggaggcgtagaagggcacagagatgaagttctaagtgctgattatgatcttttgggtgaaaaaataatgtcctgtggtatggatcattctcttaaactttggaggatcaattcaaagagaatgatgaatgcaattaaggaatcttatgattataatccaaataaaactaacaggccatttatttctcagaaaatccattttcctgatttttctaccagagacatacataggaattatgttgattgtgtgcgatggttaggcgatttgatactttctaagtcttgtgaaaatgccattgtgtgctggaaacctggcaagatggaagatgatatagataaaattaaacccagtgaatctaatgtgactattcttgggcgatttgattacagccagtgtgacatttggtacatgaggttttctatggatttctggcaaaagatgcttgcattgggcaatcaagttggcaaactttatgtttgggatttagaagtagaagatcctcataaagccaaatgtacaacactgactcatcataaatgtggtgctgctattcgacaaaccagttttagcagggatagcagcattcttatagctgtttgtgatgatgccagtatttggcgctgggatcgacttcgataaaatacttttgcctaatcaaaattagagtgtgtttgttgtctgtgtaaaatagaattaatgtatcttgctagtaagggcacgtagagcatttagagttgtctttcagcattcaatcaggctgagctgaatgtagtgatgtttacattgtttacattctttgtactgtcttcctgctcagactctactgcttttaataaaaatttatttttgtaaaaaaaaaaaa

SEQ ID NO: 317 - protein, 427 aa, Homo sapiens
MPAAKKQKLSSDENSNPELSGDENDDAVSIESGTNTERPDTPTNTPNAPGRKSWGKGKWKSKKCKYSFKCVNSLKEDHNQPLFGVQFNWHSKEGDPLVFATVGSNRVTLYECHSQGEIRLLQSYVDADADENFYTCAWTYDSNTSHPLLAVAGSRGIIRIINPITMQCIKHYVGHGNAINELKFHPRDPNLLLSVSKDHALRLWNIQTDTLVAIFGGVEGHRDEVLSADYDLLGEKIMSCGMDHSLKLWRINSKRMMNAIKESYDYNPNKTNRPFISQKIHFPDFSTRDIHRNYVDCVRWLGDLILSKSCENAIVCWKPGKMEDDIDKIKPSESNVTILGRFDYSQCDIWYMRFSMDFWQKMLALGNQVGKLYVWDLEVEDPHKAKCTTLTHHKCGAAIRQTSFSRDSSILIAVCDDASIWRWDRLR

SEQ ID NO: 318 - DNA, 2413 bp, Homo sapiens
ctagcagcgggtcggagatcgaaggaacgggccaattgcggctgaaacgtctttggaaggaggaagggggtgagggagcatccctttgagtttcgcctcttctcgaggcggtggtgggaagggagacatacttaatactgccctcttaatccaacggaccttacatcgtgtagactgccgggagggcggcgggaaaagggcaagacgggagttggggaagggaaggagccaggaagccgcgcgggagggcgcgcgcgcgcgcccctttttcagcagtgtggcggggtcgcacgcacgcccgcctcggcggctgggcgcgatttgcgacagtggggggggcggtggaggtggcggcggcagcggcaactttgcggcaagctcgggccgggcttgcttgacggcggtgtggcggaggccccgccccaggcggcaggaacctggagggaggcggaggaatatgtccgagagggaagtgtcgactgcgccggcgggaacagacatgcctgcggccaagaagcagaagctgagcagtgacgagaacagcaatccagacctctctggagacgagaatgatgacgctgtcagtatagaaagtggtacaaacactgaacgccctgatacacctacaaacacgccaaatgcacctggaaggaaaagttggggaaagggaaaatggaagtcaaagaaatgcaaatattctttcaaatgtgtaaatagtctcaaggaagatcataaccaaccattgtttggagttcagtttaactggcacagtaaagaaggagatccattagtgtttgcaactgtaggaagcaacagagttaccttgtatgaatgtcattcacaaggagaaatccggttgttgcaatcttacgtggatgctgatgctgatgaaaacttttacacttgtgcatggacctatgatagcaatacgagccatcctctgctggctgtagctggatctagaggcataattaggataataaatcctataacaatgcagtgtataaagcactatgttggccatggaaatgctatcaatgagctgaaattccatccaagagatccaaatcttctcctgtcagtaagtaaagatcatgctttacgattatggaatatccagacggacactctggtggcaatatttggaggcgtagaagggcacagagatgaagttctaagtgctgattatgatcttttgggtgaaaaaataatgtcctgtggtatggatcattctcttaaactttggaggatcaattcaaagagaatgatgaatgcaattaaggaatcttatgattataatccaaataaaactaacaggccatttatttctcagaaaatccattttcctgatttttctaccagagacatacataggaattatgttgattgtgtgcgatggttaggcgatttgatactttctaagtcttgtgaaaatgccattgtgtgctggaaacctggcaagatggaagatgatatagataaaattaaacccagtgaatctaatgtgactattcttgggcgatttgattacagccagtgtgacatttggtacatgaggttttctatggatttctggcaaaagatgcttgcattgggcaatcaagttggcaaactttatgtttgggatttagaagtagaagatcctcataaagccaagtaagtatttagaaatttctgttcaaaatttcaggctttttctccacacttgtatgccaatgtagagaagatcatttatatttgcagtgccatccttaagtcatttttaacatttactgttttcagagttaaagttattcttttttattccaataatttttgtttttcctaagtaccttggtgacaagtcatttcttgtttttatacaaattatgtagtgcttgttgaacttaaaatatatctaaattttataaaatttgagactgagctcttagtgaagtatattctggttttaagtgcttttcgtatgacttggaacatctgcttattttctaatccgctgttttagggtagacactgacaacgttatgtgtggtctttaacctgttgtcatgttttttccctagatgtacaacactgactcatcataaatgtggtgctgctattcgacaaaccagttttagcagggatagcagcattcttatagctgtttgtgatgatgccagtatttggcgctgggatcgacttcgataaaatacttttgcctaatcaaaattagagtgtgtttgttgtctgtgtaaaatagaattaatgtatcttgctagtaagggcacgtagagcatttagagttgtctttcagcattcaatcaggctgagctgaatgtagtgatgtttacattgtttacattctttgtactgtcttcctgctcagactctactgcttttaataaaaatttatttttgtaaaaaaaaaaaa

SEQ ID NO: 319 - protein, 400 aa, Homo sapiens
MSEREVSTAPAGTDMPAAKKQKLSSDENSNPDLSGDENDDAVSIESGTNTERPDTPTNTPNAPGRKSWGKGKWKSKKCKYSFKCVNSLKEDHNQPLFGVQFNWHSKEGDPLVFATVGSNRVTLYECHSQGEIRLLQSYVDADADENFYTCAWTYDSNTSHPLLAVAGSRGIIRIINPITMQCIKHYVGHGNAINELKFHPRDPNLLLSVSKDHALRLWNIQTDTLVAIFGGVEGHRDEVLSADYDLLGEKIMSCGMDHSLKLWRINSKRMMNAIKESYDYNPNKTNRPFISQKIHFPDFSTRDIHRNYVDCVRWLGDLILSKSCENAIVCWKPGKMEDDIDKIKPSESNVTILGRFDYSQCDIWYMRFSMDFWQKMLALGNQVGKLYVWDLEVEDPHKAK

SEQ ID NO: 320 - DNA, 894 bp, Homo sapiens
ggaagggacagtcggccgcagaccgcgctgggttgccgctgccgctgccgccatcgtgccagcccctcgggtctccgtgaggccgggtgacgctccagaatgggagacaagccaatttgggagcagattggatccagcttcattcaacattactaccagttatttgataatgatagaacccaactaggcgcaatttacattgacgcgtcatgccttacgtgggaaggacaacagttccaggggaaagctgccattgtggagaagttgtctagccttccgttccagaaaattcagcacagcatcaccgcgcaggaccatcagcccactccagatagctgcatcatcagcatggttgtgggccagcttaaggcggatgaagaccccatcatggggttccaccagatgttcctattaaagaacatcaacgatgcttgggtttgcaccaatgacatgttcaggctcgccctgcacaactttggctgacctcctctcagctaggcactcacgctgtttcctcctccctcctcttcccaatactattcccactcctccagatgctccaaatatcatgcacaaatgagcagggccgcggtgggagtgggcgcagtgcgctgctgccactgaggtgttgtgcatgatgtttggatgctagactagttgcatctgacgggagaagtttgtgttgtaccagcgcatgccttggaaagacttaagtaatgcaaaaggttgtccttttttttttttttttttttttaatctactgacaagttgctctagtaacccaaagaagtgaaggagaaagcagctgcctcaccgcccagacattgatttgttcagatgtttcaatgcctcatgatacaataaaaccacaaaaattttcttaacaaaaaaaaa

SEQ ID NO: 321 - protein, 127 aa, Homo sapiens
MGDKPIWEQIGSSFIQHYYQLFDNDRTQLGAIYIDASCLTWEGQQFQGKAAIVEKLSSLPFQKIQHSITAQDHQPTPDSCIISMVVGQLKADEDPIMGFHQMFLLKNINDAWVCTNDMFRLALHNFG

SEQ ID NO: 322 - DNA, 1211 bp, Homo sapiens
ggccccccccccccctagaaatgctcgaaccaggacggctcctggagtcctcgcgccctcgcagaaggactacgggccccggcgaccccgggggcggggcttccggcgcgctgccttgtgggcacggtagttccgccgggtctggcttccgcctgccgagcggccccggaccgcaggccggactacacttcccgtcggcccgcctgctctcccgatgccgccttggcgcgagacgttggcaagcagagtgtctccaagatggccgcttggggaaggaggcgtcttggcccgggcagcagtggcggcagcgcccgagagagggtgagcttgtcggccacagactgctacattgtgcatgagatctacaatggggagaatgcccaagaccagtttgagtacgagctggagcaggccctggaagcccagtacaagtacattgtgattgagcccactcgcattggcgacgagacagcccgctggatcaccgtgggcaactgcctgcacaagacggccgtgctggcgggcaccgcctgcctcttcaccccgttggcgctgcccttagattattcccactacatttccctgcccgctggtgtgctgagcctggcctgctgcaccctctatgggatctcctggcagtttgacccttgctgcaagtaccaagtggagtacgacgcctataaactgtcgcgcctgcctctgcacacactcacctcctccaccccggtggtgctggtccggaaggacgacctgcacagaaagagactgcacaacacgatagcactggccgccctggtgtactgtgtaaagaagatttacgaactctatgccgtatgatttcagtagaacagggagcgaagcaaaaccacccggcccacaagagacaacagagtattcagatcgccacactctgtgaggcagcagagcctgggcaggtgtttggcttagtatttgttatttttaaaaaataacagatcacgggtgtacccagggtttttcagctcattacactaagatgtggatttccataacccaagaggggggtctgaggctgtggaagtccgactgggcagtggaatgctgatggaggcagacgctgccgagggggtgtggacgtgctttgggggaggtctttaagtctattgtttaactgtaccatccagagcccaccagaagctattgatcattaaaattatgagaatttcaactcc

SEQ ID NO: 323 - protein, 192 aa, Homo sapiens
MAAWGRRRLGPGSSGGSARERVSLSATDCYIVHEIYNGENAQDQFEYELEQALEAQYKYIVIEPTRIGDETARWITVGNCLHKTAVLAGTACLFTPLALPLDYSHYISLPAGVLSLACCTLYGISWQFDPCCKYQVEYDAYKLSRLPLHTLTSSTPVVLVRKDDLHRKRLHNTIALAALVYCVKKIYELYAV

SEQ ID NO: 324 - DNA, 4994 bp, Homo sapiens
ccgcagcgctcggctggctgcagcggcaccgcgggttgcgcggccggggatgctccagcgggcgcgatggcccccgccatgcagccggccgagatccaatttgcccagcggctggcgtccagcgagaagggcatccgggaccgagcggtgaagaagctgcgccagtacatcagcgtgaagacgcagagggagacaggaggtttcagtcaggaagaacttctacaggaagagctcgccaacaccattgcacagctagtccatgctgttaacaactcagcggctcaacacctgttcattcagaccttttggcaaaccatgaatcgagaatggaaaggaatagacaggctacgcctggacaaatactatatgctgattcgtctggtcctgaggcagtcctttgaagtcttgaagcgaaatggctgggaagaaagccgaatcaaggttttcttggatgtcctgatgaaggaggtcctgtgtcctgagagtcagtctcctaatggagtgagattccacttcattgatatttacctggatgaactctccaaagtcggggggaaggagcttttagcagatcagaatctcaagtttatcgatccattctgcaaaattgctgcaaagacgaaggaccacaccctggtacagaccatagctcggggtgtcttcgaagctatcgtagatcagtctccttttgtgcctgaagagacgatggaggaacagaagacaaaagtgggtgatggtgacctctctgctgaggagatacctgaaaatgaggtatccttgagaagagctgtcagtaaaaagaagacagcactgggcaaaaaccattccagaaaagatggactcagtgatgaaagaggaagagatgactgtggaacctttgaggacacagggccccttctccagtttgactataaggctgttgctgatcgactcctggaaatgaccagcaggaagaacacgccccacttcaacaggaagcgcctctccaaactcatcaagaaattccaagacctttctgaaggaagcagtatatctcaactcagttttgcggaggacatttctgctgatgaagatgaccaaatcctcagtcaaggaaagcataagaagaaaggaaataaacttttagagaaaactaacttggaaaaggagaaaggaagcagagtcttttgtgtagaggaagaggacagtgaaagcagtcttcaaaagagaagaaggaagaagaagaagaagcaccacctgcagcctgaaaatccaggcccagggggtgcagccccgtccctggaacagaaccggggcagggagcccgaggcctctgggccgaaagccctgaaggcacgtgtggccgagccaggtgcagaggccacgtccagcactggggaggagagtggctccgagcatcctccagccgtccccatgcacaataaaaggaaacggccacggaagaagagcccgagggcccacagggaaatgttggaatcagcagtgttgcccccagaggacatgtctcagagtggcccgagtggcagtcatcctcagggacctagagggtccccgacaggtggagcccaactcctaaaaaggaagcggaaacttggagttgtgcccgtcaatggcagtggcctgtccacgccggcctggcctccattgcagcaggaaggccctcccacaggccccgcagagggggcgaacagccacaccacgctgccccagcgcaggaggctgcagaaaaagaaggcagggcccggcagcctggagctctgtggcctgcccagccagaaaacagcaagtttgaaaaagaggaagaaaatgagagtgatgtcaaacttggtggagcacaacggggtgctggagtccgaagctgggcaaccccaggctctgggaagcagtgggacttgcagttccctgaagaagcagaagctgagggcagagagcgactttgtgaagtttgacacccccttcttaccaaagcccctgttcttcagaagagccaagagcagcactgccacccaccctccaggccctgccgtccagctaaacaagacaccatccagctccaagaaagtcacctttgggctgaacagaaacatgactgccgaattcaagaagacagacaagagtatcttggtcagtcccacgggcccttctcgagtggccttcgaccctgaacagaagcccctccacggggtgctgaagacccccaccagctcacctgccagctcacccctggtggccaagaagcccctgaccaccacaccaaggagaaggcccagggctatggatttcttctgaggagcagcagagtcccttgtaaaagactgcttttgtacagaatgcgctataaattatacctttaagaatgtggggccttttttatgattttgtaagttcccataagttgtgtgcacgaggttctgagagtgcccgcaggctgctgcgtcctggcccctctgtagtggctgcgggcgtcttggttgaatcttttgctacaaaccatgtttgcgtttgagctctccaggattttacatttttgggtaacctcagtgattcccattggtgtaggaaatgagaccctctctgaagctgaggagagcacgttgatctgaactttaaatcaatcagtgctgctggcacaatgaaaggtggaactgcacttgtgttgagctctcagttctgcggaatttggtactcattaccgtattcgccgtactaagttggtttctgttagtcttaacagtctgttttcttttaaaagcatgtagggcttcattgccatgttctgtgggtgtttggcaggttaccgatggggaagattcttgtcacagaatcagcaataccatagtttttctacatgtgctcagctgggggtgtggacaggtaggggtggggaaagaagaggctctgcgttctgggggctttttcttctcctccccctacccggtttccctccctgttttcctacctctacggcaagcccaaagtgtcttcccgggagcccagcgcagcccccggctcttacccaggaccccgccccgtgctgagccttctgctgaggtccttgcgtggagcacactcattcctccaagcccttgcgctcccgtttctctctctctccgtccacgttccagccgagtcactgcctgcctgaccggctccatggcagctccccatcttccctagaggctgcctgcgcatctggagcctgcgctccggctcagcgacctttcctctcaaatgcggaagcgtgcacttacagttcagaccgttctcctgtaagttcattacaaacacgggcggaaggcactcaggctttcgttggagaaacagaaataaggccttcttttgagcagcgattgctggatcattgatctgtttgaggaagtgtctgacctgggcctgagagctggagaaggtgcagattcaaagtgagcggctcctgaggagagccgccaaggctgctcgccttctccgtggcttccgcagctaccgtctgcacggtgagagggcacgggcacacggttcgggctggcgtgcagctctcccagccagccacgctctgctcaggcctggaagtgaaagccgcctccttcccgttatgccccccatacaggagcctcggtttttcagcaaaacgcggccagtccccttctccactgctgcctcccagcagagggccccaggatctccaaggtcccagctatggctttggacaacgtggcttcggcccctggggttgcagagcttgcattgggtttacctcggtctcattcattcatggagccaagggtggggtttcacctgcgaacatcagactgacttgctggcgtcaagagcagttgactcactgatgaaggccctggtgaggagaaagcactctgttcttcgcctactctgtaatcgttttgtcataatgagccatgaaaaaagtaatgaacttgtgctgttaatcgtcactgtaatgagaagtcttacgtacaacatagctgtggtggctgcgtggtttaatggctgcattagataggatcctcacatcccattcagaaccaaaactgatacagtgaaacaattaaggtgagcaaatagttttaacttttcttttttttttaagtttcattcttcctagaatatttttctaacaatttttatttcagctttaaagatgggtcatatagccaaacgggccatataatccaacattgttgagatgtcttaggacatctaaggcaaaactggcacatttgttctgcagactattgcaggaatgttttttcctagcatttctatattatctgtccattctgaggaaccagtgaatgtcctataaatgcacctcctgtcaaaaccatgcctgagaggtcccggctgggagtgacagggtgcttcttagattctattggtccttctctcattctccgaacttactcctttttatgggtaagtcaactaggtttacagtcccttatttttaatgcctaagttttgacagcaggaagaaaacaattttttaaaaattctcattacatagacgcacaagaatatgtcacataaagaaaatgtgtttagaatactggttttctatttacgcatgatattttcctaagtaaaattgccaagtggacttggaagtccagaaaggaaaataatttaaattaatgctggtgatcttaacaatattttgtaaaatgatgcttcccccttctccatggtctagtcaattttgtacaattaggtatctgactttacaagtttgttatcctttctaatttttactgaactgaaagcacaaagaagactacacagaaaatctggaaacagttgcaggtgttgggaggaagatgaaatcgagctgtcttttaacttttgtatgtgttttatcagaatttgctggactatgctggcaaggactttgtttacgatcaaattgtactagtgtctgcagggtttgtcagtactcgtcaaagccaagtccaattaaaaaaaaaaagtctttgccctcc

SEQ ID NO: 325 - protein, 762 aa, Homo sapiens
PQRSAGCSGTAGCAAGDAPAGAMAPAMQPAEIQFAQRLASSEKGIRDRAVKKLRQYISVKTQRETGGFSQEELLQEELANTIAQLVHAVNNSAAQHLFIQTFWQTMNREWKGIDRLRLDKYYMLIRLVLRQSFEVLKRNGWEESRIKVFLDVLMKEVLCPESQSPNGVRFHFIDIYLDELSKVGGKELLADQNLKFIDPFCKIAAKTKDHTLVQTIARGVFEAIVDQSPFVPEETMEEQKTKVGDGDLSAEEIPENEVSLRRAVSKKKTALGKNHSRKDGLSDERGRDDCGTFEDTGPLLQFDYKAVADRLLEMTSRKNTPHFNRKRLSKLIKKFQDLSEGSSISQLSFAEDISADEDDQILSQGKHKKKGNKLLEKTNLEKEKGSRVFCVEEEDSESSLQKRRRKKKKKHHLQPENPGPGGAAPSLEQNRGREPEASGPKALKARVAEPGAEATSSTGEESGSEHPPAVPMHNKRKRPRKKSPRAHREMLESAVLPPEDMSQSGPSGSHPQGPRGSPTGGAQLLKRKRKLGVVPVNGSGLSTPAWPPLQQEGPPTGPAEGANSHTTLPQRRRLQKKKAGPGSLELCGLPSQKTASLKKRKKMRVMSNLVEHNGVLESEAGQPQALGSSGTCSSLKKQKLRAESDFVKFDTPFLPKPLFFRRAKSSTATHPPGPAVQLNKTPSSSKKVTFGLNRNMTAEFKKTDKSILVSPTGPSRVAFDPEQKPLHGVLKTPTSSPASSPLVAKKPLTTTPRRRPRAMDFF

SEQ ID NO: 326 - DNA, 1099 bp, Homo sapiens
cggccggagtgcggcgctgggcggaagctaccatggcggccgagagaaagacaaagttgtccaagaatctgctgcgcatgaagtttatgcaaaggggactggactcagaaaccaagaaacaactagaagaagaagaaaagaaaatcattagtgaagagcactggtacttggatttgccagagcttaaagagaaagagagtttcataatagaagagcagagtttcttactatgtgaagatcttctctatggaagaatgtcattcagaggatttaatcctgaggttgagaaattgatgcttcagatgaatgctaagcacaaagcagaagaagttgaagatgaaacagtagagcttgatgtgtcagatgaagagatggctagaagatatgagaccttggtggggacaattgggaaaaagtttgccagaaagagagaccatgccaattatgaagaagatgaaaatggagacatcacaccaattaaagcaaagaagatgttcttaaagccccaggattaagatggatgccttaagcgatggcccaggggtgcttggtggaagtcagcagggcatctggagctcatcccaatggtgtctctatagttattaatactgtaacgtttacttgtaaagagattatcattttagaaacatgctgtttttgaaacagatgtgtgatggatgttgtacatcctttgcttcttggtattcattcagagtggatttttagcccctgatctacaaatgtacattgttacagggctgcttcctaaagattttttttacctcaggtttctcttaatatagttctccagtcactgaccttgaattgacttacataaactactgccaatgtttaaattgcccttatgtttatgtttattatgtcaagccaattcgtacatacaatttggaatcaagtgtcataagaatttattatataaatttatcaagaataaaaatgcctctccagccttaagtatttacatgctcccaggtcattgtcagtttatggtattatgttgttttatttaaagcattgaattgatagaaaaatttgctctgtaataaaaatctactttcaaaaaaaaaaaaaaaaaaaa

SEQ ID NO: 327 - protein, 160 aa, Homo sapiens
MAAERKTKLSKNLLRMKFMQRGLDSETKKQLEEEEKKIISEEHWYLDLPELKEKESFIIEEQSFLLCEDLLYGRMSFRGFNPEVEKLMLQMNAKHKAEEVEDETVELDVSDEEMARRYETLVGTIGKKFARKRDHANYEEDENGDITPIKAKKMFLKPQD

SEQ ID NO: 328 - DNA, 3729 bp, Homo sapiens
ggggcacggcgcgtggcgtgagacggggcggggcgcgcgtatcggcgccgcggccgcgtgacgcgttttcaaatcttcaaccgccgcagcccactcgtttgtgctttgcgccttcctcctccgcgccttggagccggatccggccccggaaacccgacctgcagacgcggtacctctactgcgtagaggccgtagctggcggaaggagagaggcggccgtcctgtcaacaggccgggggaagccgtgctttcgcggctgcccggtgcgacactttctccggacccagcatgtaggtgccgggcgactgccatgaactccggagccatgaggatccacagtaaaggacatttccagggtggaatccaagtcaaaaatgaaaaaaacagaccatctctgaaatctctgaaaactgataacaggccagaaaaatccaaatgtaagccactttggggaaaagtattttaccttgacttaccttctgtcaccatatctgaaaaacttcaaaaggacattaaggatctgggagggcgagttgaagaatttctcagcaaagatatcagttatcttatttcaaataagaaggaagctaaatttgcacaaaccttgggtcgaatttctcctgtaccaagtccagaatctgcatatactgcagaaaccacttcacctcatcccagccatgatggaagttcatttaagtcaccagacacagtgtgtttaagcagaggaaaattattagttgaaaaagctatcaaggaccatgattttattccttcaaatagtatattatcaaatgccttgtcatggggagtaaaaattcttcatattgatgacattagatactacattgaacaaaagaaaaaagagttgtatttactcaagaaatcaagtacttcagtaagagatgggggcaaaagagttggtagtggtgcacaaaaaacaagaacaggaagactcaaaaagccttttgtaaaggtggaagatatgagccaactttataggccattttatcttcagctgaccaatatgccttttataaattattctattcagaagccctgcagtccatttgatgtagacaagccatctagtatgcaaaagcaaactcaggttaaactaagaatccaaacagatggcgataagtatggtggaacctcaattcaactccagttgaaagagaagaagaaaaaaggatattgtgaatgttgcttgcagaaatatgaagatctagaaactcaccttctaagtgagcaacacagaaactttgcacagagtaaccagtatcaagttgttgatgatattgtatctaagttagtttttgactttgtggaatatgaaaaggacacacctaaaaagaaaagaataaaatacagtgttggatccctttctcctgtttctgcaagtgtcctgaaaaagactgaacaaaaggaaaaagtggaattgcaacatatttctcagaaagattgccaggaagatgatacaacagtgaaggagcagaatttcctgtataaagagacccaggaaactgaaaaaaagctcctgtttatttcagagcccatcccccacccttcaaatgaattgagagggcttaatgagaaaatgagtaataaatgttccatgttaagtacagctgaagatgacataagacagaattttacacagctacctctacataaaaacaaacaggaatgcattcttgacatttccgaacacacattaagtgaaaatgacttagaagaactaagggtagatcactataaatgtaacatacaggcatctgtacatgtttctgatttcagtacagataatagtggatctcaaccaaaacagaagtcagatactgtgctttttccagcaaaggatctcaaggaaaaggaccttcattcaatatttactcatgattctggtctgataacaataaacagttcacaagagcacctaactgttcaggcaaaggctccattccatactcctcctgaggaacccaatgaatgtgacttcaagaatatggatagtttaccttctggtaaaatacatcgaaaagtgaaaataatattaggacgaaatagaaaagaaaatctggaaccaaatgctgaatttgataaaagaactgaatttattacacaagaagaaaacagaatttgtagttcaccggtacagtctttactagacttgtttcagactagtgaagagaaatcagaatttttgggtttcacaagctacacagaaaagagtggtatatgcaatgttttagatatttgggaagaggaaaattcagataatctgttaacagcgtttttctcgtccccttcaacttctacatttactggcttttagaatttaaaaaatgcatacttttcagaagtgataaggatcatattcttgaaatttttataaatatgtatggaaattcttaggatttttttaccagctttgtttacagacccaaatgtaaatattaaaaataaatatttgcaattttctacagaattgaatacctgttaaagaaaaattacagaataaacttgtgactggtcttgttttacattatatatatgttcgtaattgtttcctgagaattacaatgaataataatttgctttgtcactgaaaaccaccagtgaagtgcaatttggggaatatcaaacttagcattatacatttggatattctagttgtattgtaaattttaaaagattatcaggataacatgaccttgccttgaaaaacctaaatttcatacagaaaggaaaaatacatttctatgcttgaattctggaaatcatcagaaatattgacacttgagggtcactggtggaccatgctagtattttggtgctgagtaattagattatgtataggggtaactggaagccatgaaggaaggacttaaccaggctaccaagtggaatataatttatctgctatttttaattacttaccttgtaaataactttaataatattcaaaagttgactctcctgtggctcatgccacaggatcccagcactttgggaggccgaggcaggctgatcacgaggtcagaagatcaagaccatcctggccaacatggtgaaaccttgtctactaaaaatacaaaaaattagctgggcatggcggcatgcgcctgtagtcccagctactccctccagaggctgagaattgcttgaacctgggaagtgcaggttgcagtgagccaagattgtgccactgtattccagactgggtgacagagtgagactccatctcaaaaaaaaaaaagttgactctaccccctaatttggtaggagatgaaggagaaaaggatggcattgaattatagatacagttttgggatatatacaaggattgccttgatctggcacttactgatacaagcatttggagaagagaaaattcaaatataagaaatttcaatttgaatctgtggatataaggcatttgcctttgagtatgttcttgtaggagtaagactaccaccagtgacattcaattggttctattgcatagtacatgaatctattgtcactaaaaattaggttactaatcttaatttttttgaaatatatgattctcagtacaggactaattcatatgcttttcctgcatacattattttgatcatttggataacatcaatgaacactggctttttaacacctttgtttttcataccagtacctgaagtaggctcaataaaagagtctttacagtgaaaaaaaaaaaaaaaa

SEQ ID NO: 329 - protein, 674 aa, Homo sapiens
MNSGAMRIHSKGHFQGGIQVKNEKNRPSLKSLKTDNRPEKSKCKPLWGKVFYLDLPSVTISEKLQKDIKDLGGRVEEFLSKDISYLISNKKEAKFAQTLGRISPVPSPESAYTAETTSPHPSHDGSSFKSPDTVCLSRGKLLVEKAIKDHDFIPSNSILSNALSWGVKILHIDDIRYYIEQKKKELYLLKKSSTSVRDGGKRVGSGAQKTRTGRLKKPFVKVEDMSQLYRPFYLQLTNMPFINYSIQKPCSPFDVDKPSSMQKQTQVKLRIQTDGDKYGGTSIQLQLKEKKKKGYCECCLQKYEDLETHLLSEQHRNFAQSNQYQVVDDIVSKLVFDFVEYEKDTPKKKRIKYSVGSLSPVSASVLKKTEQKEKVELQHISQKDCQEDDTTVKEQNFLYKETQETEKKLLFISEPIPHPSNELRGLNEKMSNKCSMLSTAEDDIRQNFTQLPLHKNKQECILDISEHTLSENDLEELRVDHYKCNIQASVHVSDFSTDNSGSQPKQKSDTVLFPAKDLKEKDLHSIFTHDSGLITINSSQEHLTVQAKAPFHTPPEEPNECDFKNMDSLPSGKIHRKVKIILGRNRKENLEPNAEFDKRTEFITQEENRICSSPVQSLLDLFQTSEEKSEFLGFTSYTEKSGICNVLDIWEEENSDNLLTAFFSSPSTSTFTGF

SEQ ID NO: 330 - DNA, 3132 bp, Homo sapiens
cggatcgcagctctcgcggcagtcgcctgagacttaaggttattgcttggccgcggcctggtattccggcgattcgtttcttgctcggcttcctggagctgtggtccgtgtgggcttccacctcagacagttgcgctggctcagcggggccggaacatggctgcgtccggtctggatcatctcaaaaatggctacagaagaagattttgtcgaccttccagggcacgtgacattaacacagagcaaggccagaatgttctggaaatcttacaagactgttttgaagaaaaaagtcttgccaatgattttagtacaaattctacaaaatcagtgcctaattcaacacgcaaaataaaagacacttgtattcagtcaccaagcaaagagtgccagaaatcacatccaaagtcagttccagtttcttcaaagaagaaagaagcctctctacagtttgttgtagaaccaagtgaagccacaaacagatcagttcaggcccatgaagttcatcagaaaattctggcaactgatgttagttccaaaaatacacctgactcgaaaaaaatatcaagtagaaacataaatgatcatcacagtgaagctgatgaagaattttacttatccgttggctcaccttctgttcttttggatgcaaaaacatctgtatcacaaaatgttattccatctagtgccaaaaagagagagacttacacttttgaaaattcagtaaatatgctgccttcaagtacagaggtttcagttaaaaccaaaaaaaggttaaactttgatgataaagttatgttaaagaaaatagaaatagataataaagtatcagatgaagaggataaaacatcggaaggacaagaaagaaaaccatcaggatcatctcagaatagaatacgagattcagaatatgaaattcaacgacaagctaaaaaaagtttttcaacattgtttttagaaacagtaaaacgaaaaagtgaatccagtcccattgttaggcatgcggcaactgctccacctcattcgtgtcctcccgatgatacgaagttgatagaggatgaatttataattgatgagtcggatcaaagttttgccagtagatcttggattacaataccaagaaaggcagggtctctgaaacaacgcacaatatccccggctgagagcactgcactctttcaaggtagaaagtcaagagaaaagcatcataatatattacctaagactttggcaaatgacaaacattcccataaacctcacccagtagagacatctcagccctctgataaaacagtactggatacaagttatgctttgatagatgaaacagtaaataattatagatctacaaaatatgaaatgtattccaagaatgcagaaaaaccatctagaagcaaaaggactataaaacaaaaacagagaagaaaattcatggctaaaccagctgaagaacagcttgatgtgggacagtctaaagatgaaaacatacatacatcacatattacccaagacgaatttcaaagaaattcagacagaaatatggaagagcatgaagagatgggaaatgattgtgtttccaaaaaacagatgccacctgtgggaagcaagaaaagtagcactagaaaagataaggaagaatctaaaaagaagcgcttttccagtgagtccaagaacaaacttgtacctgaagaagtgacttcaactgtcacgaaaagtcgaagaatttccaggcgtccatctgattggtgggtggtaaaatcagaggagagtcctgtttatagcaattcttcagtaagaaatgaattaccaatgcatcacaatagtagccgaaaatctactaagaaaacaaatcagtcatctaagaatattaggaaaaaaactattccacttaaaaggcagaagacagcaactaaaggcaaccaaagagtacagaagtttttaaatgctgaaggttctggaggtatcgttggtcatgatgaaatttccagatgttcactgagtgagccattggaaagtgatgaggcagacttggctaagaagaaaaatcttgattgttctagatctacaagaagctcaaagaatgaagataacattatgactgcacagaatgttcccctaaagcctcagaccagtggatatacatgtaatataccaacagagtcaaacttggattctggagagcataagacttcagttttagaggaaagtggaccttccaggctcaataataattatttaatgtctggaaagaatgatgtggatgatgaggaagttcatggaagttcagatgactcaaaacaatctaaagtgataccaaagaacagaatccatcacaaactagtattgccctccaacacaccaaatgttcgcaggaccaagagaacacgtttgaaacctttggagtactggcgaggagagcgaatagattatcaaggaaggccatcaggaggattcgtgattagtggagtactatctccagacacaatatcgtctaaaaggaaggcaaaagaaaatattggaaaagtcaacaaaaaatctaataagaaaaggatctgtcttgataacgatgaaagaaagactaacttaatggtaaatctaggtatacctcttggagatcctttgcagccaacgagggtaaaggacccagaaacaagagagattattctcatggatcttgtaaggccacaagatacatatcaattttttgttaagcatggtgagttgaaggtatacaagacattggatacaccctttttttctactgggaaattgatattaggaccacaagaagaaaagggaaagcagcatgttggccaggatatattggttttttatgttaactttggtgaccttttgtgtactttacatgaaacaccttatatattaagtactggggattcgttctatgttccttcaggtaactattataacatcaaaaatctccggaatgaggaaagtgttcttctttttactcagataaaaagatgaaagatcaaccaaccttaaatatatgtatgtatatatgtatatgtaaaaacagtttgtatagttggaatatttgtctttgtaattacttgtgatgttttaaaataaaaattttattcagttttgtgtaaaaaaaaaaaaaaaaaa

SEQ ID NO: 331 - protein, 943 aa, Homo sapiens
MAASGLDHLKNGYRRRFCRPSRARDINTEQGQNVLEILQDCFEEKSLANDFSTNSTKSVPNSTRKIKDTCIQSPSKECQKSHPKSVPVSSKKKEASLQFVVEPSEATNRSVQAHEVHQKILATDVSSKNTPDSKKISSRNINDHHSEADEEFYLSVGSPSVLLDAKTSVSQNVIPSSAKKRETYTFENSVNMLPSSTEVSVKTKKRLNFDDKVMLKKIEIDNKVSDEEDKTSEGQERKPSGSSQNRIRDSEYEIQRQAKKSFSTLFLETVKRKSESSPIVRHAATAPPHSCPPDDTKLIEDEFIIDESDQSFASRSWITIPRKAGSLKQRTISPAESTALFQGRKSREKHHNILPKTLANDKHSHKPHPVETSQPSDKTVLDTSYALIDETVNNYRSTKYEMYSKNAEKPSRSKRTIKQKQRRKFMAKPAEEQLDVGQSKDENIHTSHITQDEFQRNSDRNMEEHEEMGNDCVSKKQMPPVGSKKSSTRKDKEESKKKRFSSESKNKLVPEEVTSTVTKSRRISRRPSDWWVVKSEESPVYSNSSVRNELPMHHNSSRKSTKKTNQSSKNIRKKTIPLKRQKTATKGNQRVQKFLNAEGSGGIVGHDEISRCSLSEPLESDEADLAKKKNLDCSRSTRSSKNEDNIMTAQNVPLKPQTSGYTCNIPTESNLDSGEHKTSVLEESGPSRLNNNYLMSGKNDVDDEEVHGSSDDSKQSKVIPKNRIHHKLVLPSNTPNVRRTKRTRLKPLEYWRGERIDYQGRPSGGFVISGVLSPDTISSKRKAKENIGKVNKKSNKKRICLDNDERKTNLMVNLGIPLGDPLQPTRVKDPETREIILMDLVRPQDTYQFFVKHGELKVYKTLDTPFFSTGKLILGPQEEKGKQHVGQDILVFYVNFGDLLCTLHETPYILSTGDSFYVPSGNYYNIKNLRNEESVLLFTQIKR

SEQ ID NO: 332 - DNA, 5475 bp, Homo sapiens
tcgcccccgccgggcgctctcgcttcagtcagtcgggccgcgccgcgcctcagctctggttgatgataattagaagcatgctttccactgaacttcccgacaacatttgttatgcagaatgtctctgagtgagaactcggtttttgcctatgaatcttctgtgcatagcaccaatgttttactcagccttaatgaccagcggaagaaagatgtgctgtgcgatgtcaccatctttgtggagggacagcggttccgcgctcaccggtccgtgctggcggcatgcagcagttacttccactcaagaatcgtaggccaggctgatggagagctgaacattactcttccagaagaggtgacagttaaaggatttgaacctttaattcagtttgcctacactgctaaactgattttaagtaaagagaatgtggatgaagtgtgcaaatgtgtggagtttttaagtgtacataatattgaggaatcctgctttcagtttctgaaatttaagtttttggactccactgcagaccagcaagaatgcccaagaaaaaaatgcttttcatcacactgtcagaaaacagaccttaaactttcacttttggaccagagggatctagaaactgatgaagtggaggaatttctggaaaataaaaatgttcagactcctcagtgtaaactccgcaggtatcaaggaaatgcaaaagcctcacctcctctacaagacagtgccagtcagacatatgagtccatgtgcttagagaaggatgctgctctggccttgccttctttatgccccaaatacagaaaattccaaaaagcatttggaactgacagagtccgtactggggaatctagtgtcaaagacattcatgcttctgttcagccaaatgaaaggtctgaaaatgaatgcctgggaggagtcccggagtgtagagatttgcaggtgatgttaaaatgtgacgaaagtaaattagcaatggaacctgaagaaacgaagaaagatcctgcttctcagtgcccaactgaaaaatcagaagtgactcctttcccccacaattcttccatagaccctcatggactttattctttgtctcttttacacacatatgaccaatatggtgacttgaattttgctggtatgcaaaacacaacagtgttaacagaaaagcctttgtcaggtacagacgtccaagaaaaaacatttggtgaaagtcaggatttacctttgaaatccgacttgggcaccagggaagatagtagtgttgcatctagtgataggagtagtgtggagcgagaagtggcagaacacctagcaaaaggcttctggagtgacatttgcagcacggacactccttgccaaatgcagttatcacctgctgtggccaaagatggctcagaacagatctcacagaaacggtctgagtgtccgtggttaggtatcaggattagtgagagcccagaaccaggtcaaaggactttcacaacattaagttctgtcaactgcccttttataagtactctgagtactgaaggctgttcaagcaatttggaaattggaaacgatgattatgtttcagaaccccagcaagaaccttgcccatatgcttgtgtcattagcttgggagacgactctgagacggacaccgaaggagacagtgaatcctgttcagccagagaacaagaatgtgaggtaaaactgccattcaatgcacaacggataatttcactgtctcgaaatgattttcagtccttgttgaaaatgcacaagcttactccagaacagctggattgtatccatgatattcgaagaagaagtaaaaacagaattgctgcacagcgctgtcgcaagagaaaacttgactgtatacagaatcttgaatcagaaattgagaagctgcaaagtgaaaaggagagcttgttgaaggaaagagatcacattttgtcaactctgggcgagacaaagcagaacctaactggactttgccagaaagtttgtaaagaagcagctctgagtcaagaacaaatacagatactcgccaagtactcagctgcagattgcccactttcatttttaatttctgaaaaagataaaagtactcctgatggtgaactggcgttaccatcaattttcagtttatctgaccggcctccagcagtgctgcctccctgtgccagaggaaacagtgagcctggctacgcgcgagggcaggagtcccagcagatgtccacagccacctctgagcaagctgggcctgcggaacagtgtcgtcagagtggtgggatctcagatttctgtcagcagatgactgataaatgtactactgatgagtaaacttgcattcacttccttcaaaccatctaattttctcctgaagttttggcagcgtcttgaaagcctaatatgaccatctgttgctcaacaatactgtttttttcctttagtagtttaccacaagggaatttcctttaagtcaaccatgatttctccttgatttctacaagagacaaagaaatgattttgcctcctggatatcagaaaaatccatgtgaaaatgtagtaaacctttaaaactcatgttttaaagaataataactctagtaataactcttcctgctattcagaataagtaggagaatgaaaactgcagcatatcagacagcaatttaacagcttgaaacatctacagatagttcctactaaaagaagtggcctgcagaagtttaataatttgacttttttctaatattttagtttgaaagaaaatttcttcccaagcaatgctaatagagttctattcttagaagcagggtgtcagctactgggaatatttttgtagagctgcattgtgaaaaaaagatggtcttacctgaatcttagggctttgttcttcggctcctaaaatcaggctttaagctacattgggaagatttagtaaataggcaagtggttggcctaagacgggggctgcttctcctcttcagtatggactctagaaagtctggctacatgaatagatttaagtgtcactttccctccctgccccccgcttcagtctctaccatatctggtcccatcatggacttcctatttcctggcatttttgtccctttggaagaagaaataggactcagaatacagtggcatgagtgattacactggcagcattatctcaggctccctagaatctggagagcttaccaacatgtaaagctgttcatttttccaccgtgggtcaccaatgccagaaaaccagacatcacggggaaagaatgttgcttactttttaccaggagtgcagttcatttttttcaccctgtttttgaagtcgtattattcacttgtaaaaatgattgtaacagataaaaaatgtatctgcagcaactctgcaggtttgtgaaataggatgaaactcaatctttttctattgtgggtttgcatttgaaaagcaggttgaatccttgctctcttctccaaatttggtgtggtataaagacacacaaatcattttaacttggacatttaaagatcagtcttagtgtttgttcagtcctgttacaaaatagataactgagcacctatcgcataacattttgcggtggcttttagccatgctggggttagatgtgtttgagagtcaaatgaaagctatggatcttctcagcaattaaaaaaaatgcatatattcacattcacagaaacattggcagaacccagttttaatggtacagaggagtagtttatagtgttgatttcaccaaaatcagagggctgaaagagacacttctatagactgcatcctgagcctagtgcagggcttgtctagctaatgtgggcagccaccacccactgtgtatgaacaagtctgaagcaagttggccttgcccttgagagtatatggggaccagtcttcatgtcttggagtaatttgtcaaatgttaccctttttgatcagggtgtagggggaggatattgctagtatattttcagtggtttgtatgttctctctgtcactgacttatttgtaagagaaaattagttggacttgtttattttctagtagcttttataagtacactcaagaatttgtcagggagaataattctgatagtgcatcccatactgcaaaagaatttgtgtgtgtgtgtgtgtgtgtgtgtgtgtatgtgtatgtatacatatatatctctccatataggtatttctttgatacttgtaattttaaatttcagcttcacgatataaaataatataagaacttctggtttacaaaatgtaaaatcttaagccaatggaacccttgatttcctacctcagtgtacactcaactattggttgtatcagtttgtgtatgtgcaaatgtcaaataatcttttgctttaattgctactgtacttgctttgaaagattacctactattttatgataaaatgtagttgtctccagagcttaaatataatttgtaaagcacttggtttaaatttctctctacctataaacagtttagcattaagggtttctattaatgacacagaattattggccaagtgtaatttcttaaaatttagcattactttaaatagccagcatgtaatacaagtaactacactacctcatatctacatgattttcaagttgtaatgcagatggacagataaaaaagattttacgtttgtcttttggccataagtgggaaagttttctgtatattgcatagcattacacatttatgcctattttaacattaacttctaaagaagttttttctaagaaaatgtttcaaggcaatattttttttgaggctgccgaagacaaatgacaggattatgagtatacagtgtatgccttttccttcatgcagaattttgaaatgttttcagtttgtatattgcatattcacatgatcattgctcactattttatgaactggccttctcaatgtttgatgattttttaaaagctgttatgttgaattcagtaaaataacattaccttattttttttcttattcaaattctggaactatagcaaataattcgttaaattgtcatattcaaaacaaatgtggatacagtcttggttctccatctgtaattttttttaacagtttgctatagcttactgcttaactaattttaaataaggaaataagtatgttagatgcagtagacgatacaggttgcatgtggacactcagtcacattaacaacttgggaaaaaaatggcaatgttacggtgaattctcaggtgaacttttttcagttataaaacatctattttgaatctgtaaatattttaaatgttttattaaggcatgtaataaactattctttgaaacttgttgggtagaatgaaaattaaagccataatggtaaaagatggcatactgattataaaagaagcagaaaaacattgatttttttatatctttcataatataattttctaacaatgcaataaaaccactaaacttttgtgtc

SEQ ID NO: 333 - protein, 736 aa, Homo sapiens
MSLSENSVFAYESSVHSTNVLLSLNDQRKKDVLCDVTIFVEGQRFRAHRSVLAACSSYFHSRIVGQADGELNITLPEEVTVKGFEPLIQFAYTAKLILSKENVDEVCKCVEFLSVHNIEESCFQFLKFKFLDSTADQQECPRKKCFSSHCQKTDLKLSLLDQRDLETDEVEEFLENKNVQTPQCKLRRYQGNAKASPPLQDSASQTYESMCLEKDAALALPSLCPKYRKFQKAFGTDRVRTGESSVKDIHASVQPNERSENECLGGVPECRDLQVMLKCDESKLAMEPEETKKDPASQCPTEKSEVTPFPHNSSIDPHGLYSLSLLHTYDQYGDLNFAGMQNTTVLTEKPLSGTDVQEKTFGESQDLPLKSDLGTREDSSVASSDRSSVEREVAEHLAKGFWSDICSTDTPCQMQLSPAVAKDGSEQISQKRSECPWLGIRISESPEPGQRTFTTLSSVNCPFISTLSTEGCSSNLEIGNDDYVSEPQQEPCPYACVISLGDDSETDTEGDSESCSAREQECEVKLPFNAQRIISLSRNDFQSLLKMHKLTPEQLDCIHDIRRRSKNRIAAQRCRKRKLDCIQNLESEIEKLQSEKESLLKERDHILSTLGETKQNLTGLCQKVCKEAALSQEQIQILAKYSAADCPLSFLISEKDKSTPDGELALPSIFSLSDRPPAVLPPCARGNSEPGYARGQESQQMSTATSEQAGPAEQCRQSGGISDFCQQMTDKCTTDE

SEQ ID NO: 334 - DNA, 1273 bp, Homo sapiens
gggggccctctcaccccgctgcctctaggttctgggaagatggcgaaggtctcagagctttacgatgtcacttgggaagaaatgagagataaaatgagaaaatggagagaagaaaactcaagaaatagtgagcaaattgtggaagttggagaagaattaattaatgaatatgcttctaagctgggagatgatatttggatcatatatgaacaggtgatgattgcagcactagactatggtcgggatgacttggcattgttttgtcttcaagagctgagaagacagttccctggcagtcacagagtcaagcgattaacaggcatgagatttgaagccatggaaagatatgatgatgctatacagctatatgataggattttacaagaagatccaactaacactgctgcaagaaagcgtaagattgccattcgaaaagcccaggggaaaaatgtggaggccattcgggagctgaatgagtatctggaacaatttgttggagaccaagaagcctggcatgaacttgcagaactttacatcaatgaacatgactatgcaaaagcagccttttgtttagaggaactaatgatgactaatccacacaaccacttatactgtcagcagtatgctgaagttaagtatacccaaggtggacttgaaaacctcgaactttcaagaaagtattttgcacaggcattgaaactgaacaacagaaatatgagagctttgtttggactttatatgtcggcaagtcatattgcttctaatccaaaagcaagtgcaaaaacgaaaaaggacaacatgaaatatgctagttgggcagctagtcaaataaacagagcttatcagtttgcaggtcgaagtaagaaggaaaccaaatattctcttaaggctgtcgaagacatgttggaaacattgcagatcacccagtcttaaggtttcaaaaactctttgacattagatttcacaactgcacaattgaacttattggcctgtaacttatttactaaatgctcagtgctatttatatactacagtaattttctgttaagaaggcagttgtaaagaatgtgtttatataaacctaaaaatgccttttactgctaagtggggagatgggggaaatccatggaagagagatttaagacttattgattgtacatcagtctcttcatatcacatatacatgtatatatataaaactctaatgtagtataaccttgttaaataaaccatgatgatttacaaaaaaaaaaaaaaaaaaaaaaaaaaaaaa

SEQ ID NO: 335 - protein, 297 aa, Homo sapiens
MAKVSELYDVTWEEMRDKMRKWREENSRNSEQIVEVGEELINEYASKLGDDIWIIYEQVMIAALDYGRDDLALFCLQELRRQFPGSHRVKRLTGMRFEAMERYDDAIQLYDRILQEDPTNTAARKRKIAIRKAQGKNVEAIRELNEYLEQFVGDQEAWHELAELYINEHDYAKAAFCLEELMMTNPHNHLYCQQYAEVKYTQGGLENLELSRKYFAQALKLNNRNMRALFGLYMSASHIASNPKASAKTKKDNMKYASWAASQINRAYQFAGRSKKETKYSLKAVEDMLETLQITQS

SEQ ID NO: 336 - DNA, 547 bp, Homo sapiens
acggaagtgtaggttacggtctgagacatcaccgccaagctgggcatcggggagatggccgagactgaccccaagaccgtgcaggacctcacctcggtggtgcagacactcctgcagcagatgcaagataaatttcagaccatgtctgaccagatcattgggagaattgatgatatgagtagtcgcattgatgatctggaaaagaatatcgcggacctcatgacacaggctggggtggaagaactggaaagtgaaaacaagatacctgccacgcaaaagagttgaaggttgctaataatttatactggaatctggcatttttccaagccaagagaagatcgaatggctttttgcagctaactactatgtgtagacaggttttatattataaagtatgcattcttatcacctagtatatagttagtttgtagagtgatttccccccagtttcttgaacatggtatcttcacatcttggaccttggtcagttgtgctattcattattaaacactaaaactttggcggttcttgcataaaaaaaaaaaaa

SEQ ID NO: 337 - protein, 76 aa, Homo sapiens
MAETDPKTVQDLTSVVQTLLQQMQDKFQTMSDQIIGRIDDMSSRIDDLEKNIADLMTQAGVEELESENKIPATQKS

SEQ ID NO: 338 - DNA, 356 bp, Homo sapiens
ctttctctctcgcgcgcggtgtggtggcagcaggcgcagcccagcctcgaaatgcagaacgacgccggcgagttcgtggacctgtacgtgccgcggaaatgctccgctagcaatcgcatcatcggtgccaaggaccacgcatccatccagatgaacgtggccgaggttgacaaggtcacaggcaggtttaatggccagtttaaaacttatgctatctgcggggccattcgtaggatgggtgagtcagatgattccattctccgattggccaaggccgatggcatcgtctcaaagaacttttgactggagagaatcacagatgtggaatatttgtcataaataaataatgaaaacct

SEQ ID NO: 339 - protein, 83 aa, Homo sapiens
MQNDAGEFVDLYVPRKCSASNRIIGAKDHASIQMNVAEVDKVTGRFNGQFKTYAICGAIRRMGESDDSILRLAKADGIVSKNF

SEQ ID NO: 340 - DNA, 512 bp, Homo sapiens
cctttcctcagctgccgccaaggtgctcggtccttccgaggaagctaaggctgcgttggggtgaggccctcacttcatccggcgactagcaccgcgtccggcagcgccagccctacactcgcccgcgccatggcctctgtctccgagctcgcctgcatctactcggccctcattctgcacgacgatgaggtgacagtcacggaggataagatcaatgccctcattaaagcagccggtgtaaatgttgagcctttttggcctggcttgtttgcaaaggccctggccaacgtcaacattgggagcctcatctgcaatgtaggggccggtggacctgctccagcagctggtgctgcaccagcaggaggtcctgccccctccactgctgctgctccagctgaggagaagaaagtggaagcaaagaaagaagaatccgaggagtctgatgatgacatgggctttggtctttttgactaaacctcttttataacatgttcaataaaaagctgaacttt

SEQ ID NO: 341 - protein, 114 aa, Homo sapiens
MASVSELACIYSALILHDDEVTVTEDKINALIKAAGVNVEPFWPGLFAKALANVNIGSLICNVGAGGPAPAAGAAPAGGPAPSTAAAPAEEKKVEAKKEESEESDDDMGFGLFD

SEQ ID NO: 342 - DNA, 392 bp, Homo sapiens
cttcctttctgggctcggacctaggtcgcggcgacatggccaaacgtaccaagaaagtcgggatcgtcggtaaatacgggacccgctatggggcctccctccggaaaatggtgaagaaaattgaaatcagccagcacgccaagtacacttgctctttctgtggcaaaaccaagatgaagagacgagctgtggggatctggcactgtggttcctgcatgaagacagtggctggcggtgcctggacgtacaataccacttccgctgtcacggtaaagtccgccatcagaagactgaaggagttgaaagaccagtagacgctcctctactctttgagacatcactggcctataataaatgggttaatttatgtaacaaaaaaaaaaaaaaaaaaa

SEQ ID NO: 343 - protein, 92 aa, Homo sapiens [sequence omitted]

SEQ ID NO: 344 - DNA, 1606 bp, Homo sapiens
ggctactcgggaggctgagtcaggagaatggtgtgaacctgggaggcagagcttgcagtgagccgagatcgcgccactgcactccagcctgggcgacagagcaaggctctgtctcaaaaaaaaaaaaaaaaagaaaaagaaaaagaacagggcagggagtttccgtggcgctgaactctataaggctaatgacacaggtcaatagctgaggtgatgaacaatggactcgagatctcagtgaggtcaaagaactgctggataattgagctggacaggttggccaggtcttcccctggaaaggtacacctggctgggagtagacaaacacagggtggggtggaaaaggcaggagaaggaaaggctgagaagtgttagtggcagtatctgccacacccttaccctggtcttctgatcgctccatctgccgcccagcagcctcaaatccaggtctctgggtcctgggtggacctctagttgggagctgataagagaaggaggataggctgggcacggtgcctcatgccggtaatcccagcactttgggaggctgaggcgggcggatcactagaggtcaggagtttgataccagcctggccaacatggtgaagccccatcacatggtgaagccccatcacaccacttcactccagcctgggtgacagagtgaaactccatctcaaaaaaaaaaaaaaaaaaaaaaaatgaggttaaaccacataggggtcttattaggaggcaagggcaagatttggaggtggagagaagaactaccaccactatcactaacatctggtttttgtttttttttttttaccgggagtgcattaggagctgccaatggggctggggcatagaggtgagtgcagattgagggagaggggctccacagaacagccacaaagggaggatgacagtgggatgacacacagcaggcagcaacatggagagtgatccgcaatcaatctcactactcagaagtgaggagctttgctctccaaaaggagtgttagctgggaccagcgccagccctattggtgagagggcagggcttgatttccctcagccatagtccctttatgtctctgcacatttgcccacacagtctccaagacctaggatgcccacccccaatccctatccctccctgcccttcctttgcagatgcggatctccccttggtcattcaaggcactgctcaggcatcttatgcaagaaggcttcccaggttgcgaaggtgactcagacgcctcctttgggactccaacacccttccccggcagagcccctgcctgtctgcctccgtggtgtcaggttttgtgccctctactcactagattgtggacacagaaagcgctggtgctgtcaaaaccacttctgggttgccgggcgcggtggctcacacctataatcccagcactttgggaggccaagatgggcggattgcttgagcccaggagttcaagactaatctggcctacatggtgagaccctgtctctataaaaaatgcaaaaattaaaaaaaaaaaaaaaaaaaaaaaaaaaaaaaaaaaaaaaaaaaaaaaaaaaaaaaaaaaaaaaaaaaaaaaaaaaaaaaaaaaaaaaaaaa

SEQ ID NO: 345 - DNA, 2444 bp, Homo sapiens
ggttttttttttttaccccccttttttatttattatttttttgcacattgagcggatccttgggaacgagagaaaaaagaaacccaaactcacgcgtgcagaagatctccccccccttcccctcccctcctccctcttttcccctccccaggagaaaaagacccccaagcagaaaaaagttcaccttggactcgtctttttcttgcaatattttttgggggggcaaaactttgagggggtgattttttttggcttttcttcctccttcatttttcttccaaaattgctgctggtgggtgaaaaaaaaatgccgcagctgaacggcggtggaggggatgacctaggcgccaacgacgaactgatttccttcaaagacgagggcgaacaggaggagaagagctccgaaaactcctcggcagagagggatttagctgatgtcaaatcgtctctagtcaatgaatcagaaacgaatcaaaacagctcctccgattccgaggcggaaagacggcctccgcctcgctccgaaagtttccgagacaaatcccgggaaagtttggaagaagcggccaagaggcaagatggagggctctttaaggggccaccgtatcccggctaccccttcatcatgatccccgacctgacgagcccctacctccccaacggatcgctctcgcccaccgcccgaacctatctccagatgaaatggccactgcttgatgtccaggcagggagcctccagagtagacaagccctcaaggatgcccggtccccatcaccggcacacattgtctctaacaaagtgccagtggtgcagcaccctcaccatgtccaccccctcacgcctcttatcacgtacagcaatgaacacttcacgccgggaaacccacctccacacttaccagccgacgtagaccccaaaacaggaatcccacggcctccgcaccctccagatatatccccgtattacccactatcgcctggcaccgtaggacaaatcccccatccgctaggatggttagtaccacagcaaggtcaaccagtgtacccaatcacgacaggaggattcagacacccctaccccacagctctgaccgtcaatgcttccgtgtccaggttccctccccatatggtcccaccacatcatacgctacacacgacgggcattccgcatccggccatagtcacaccaacagtcaaacaggaatcgtcccagagtgatgtcggctcactccatagttcaaagcatcaggactccaaaaaggaagaagaaaagaagaagccccacataaagaaacctcttaatgcattcatgttgtatatgaaggaaatgagagcaaaggtcgtagctgagtgcacgttgaaagaaagcgcggccatcaaccagatccttgggcggaggtggcatgcactgtccagagaagagcaagcgaaatactacgagctggcccggaaggagcgacagcttcatatgcaactgtaccccggctggtccgcgcgggataactatggaaagaagaagaagaggaaaagggacaagcagccgggagagaccaatgaacacagcgaatgtttcctaaatccttgcctttcacttcctccgattacagacctcagcgctcctaagaaatgccgagcgcgctttggccttgatcaacagaataactggtgcggcccttgcaggagaaaaaaaaagtgcgttcgctacatacaaggtgaaggcagctgcctcagcccaccctcttcagatggaagcttactagattcgcctcccccctccccgaacctgctaggctcccctccccgagacgccaagtcacagactgagcagacccagcctctgtcgctgtccctgaagcccgaccccctggcccacctgtccatgatgcctccgccacccgccctcctgctcgctgaggccacccacaaggcctccgccctctgtcccaacggggccctggacctgcccccagccgctttgcagcctgccgccccctcctcatcaattgcacagccgtcgacttcttggttacattcccacagctccctggccgggacccagccccagccgctgtcgctcgtcaccaagtctttagaatagctttagcgtcgtgaaccccgctgctttgtttatggttttgtttcacttttcttaatttgccccccacccccaccttgaaaggttttgttttgtactctcttaattttgtgccatgtggctacattagttgatgtttatcgagttcattggtcaatatttgacccattcttatttcaatttctccttttaaatatgtagatgagagaagaacctcatgattggtaccaaaatttttatcaacagctgtttaaagtctttgtagcgtttaaaaaatatatatatatacataactgttatgtagttcggatagcttagttttaaaagactgattaaaaaacaaaaaaaa

SEQ ID NO: 346 - protein, 596 aa, Homo sapiens
MPQLNGGGGDDLGANDELISFKDEGEQEEKSSENSSAERDLADVKSSLVNESETNQNSSSDSEAERRPPPRSESFRDKSRESLEEAAKRQDGGLFKGPPYPGYPFIMIPDLTSPYLPNGSLSPTARTYLQMKWPLLDVQAGSLQSRQALKDARSPSPAHIVSNKVPVVQHPHHVHPLTPLITYSNEHFTPGNPPPHLPADVDPKTGIPRPPHPPDISPYYPLSPGTVGQIPHPLGWLVPQQGQPVYPITTGGFRHPYPTALTVNASVSRFPPHMVPPHHTLHTTGIPHPAIVTPTVKQESSQSDVGSLHSSKHQDSKKEEEKKKPHIKKPLNAFMLYMKEMRAKVVAECTLKESAAINQILGRRWHALSREEQAKYYELARKERQLHMQLYPGWSARDNYGKKKKRKRDKQPGETNEHSECFLNPCLSLPPITDLSAPKKCRARFGLDQQNNWCGPCRRKKKCVRYIQGEGSCLSPPSSDGSLLDSPPPSPNLLGSPPRDAKSQTEQTQPLSLSLKPDPLAHLSMMPPPPALLLAEATHKASALCPNGALDLPPAALQPAAPSSSIAQPSTSWLHSHSSLAGTQPQPLSLVTKSLE

SEQ ID NO: 347 - DNA, 6568 bp, Homo sapiens
cttgccatcgtgagagattggtacatgatgtgtaaattcagttcagcatatgtttcttcattatgaaaccactagcaatcccagctaaccatggagttatgggccagcaggagaaacactcacttcctgcagatttcacaaaactgcatcttactgacagtctccacccacaggtgacccacgtttcttctagccattcaggatgtagtatcactagtgattctgggagcagcagtctttctgatatctaccaggccacagaaagcgaggctggtgatatggacctgagtgggttgccagaaacagcagtggattccgaagacgacgacgatgaagaagacattgagagagcatcagatcctctgatgagcagggacattgtgagagactgcctagagaaggacccaattgaccggacagatgatgacattgaacaactcttggaatttatgcaccagttgcctgcttttgccaatatgacaatgtcagtgaggcgagaactctgtgctgtgatggtgttcgcagtggtggaaagagcagggaccatagtgttaaatgatggtgaagagctggactcctggtcagtgattctcaatggatctgtggaagtgacttatccagatggaaaagcagaaatactgtgcatgggaaatagttttggtgtctctcctaccatggacaaagaatacatgaaaggagtgatgagaacaaaggtggatgactgccagtttgtctgcatagcccagcaagattactgccgtattctcaatcaagtagaaaagaacatgcaaaaagttgaagaggaaggagagattgttatggtgaaagaacaccgagaacttgatcgaactggaacaagaaagggacacattgtcatcaagggtacctcagaaaggttaacaatgcatttggtggaagagcattcagtagtagatccaacattcatagaagactttctgttgacctataggacttttctttctagcccaatggaagtgggcaaaaagttattggagtggtttaatgacccgagcctcagggataaggttacacgggtagtattattgtgggtaaataatcacttcaatgactttgaaggagatcctgcaatgactcgatttttagaagaatttgaaaacaatctggaaagagagaaaatgggtggacacctaaggctgttgaatatcgcgtgtgctgctaaagcaaaaagaagattgatgacgttaacaaaaccatcccgagaagctcctttgccttttatcttacttggaggctctgagaagggatttggaatctttgttgacagtgtagattcaggtagcaaagcaactgaagcaggcttgaaacggggggatcagatattagaagtaaatggccaaaactttgaaaacattcagctgtcaaaagctatggaaattcttagaaataacacacatttatctatcactgtgaaaaccaatttatttgtatttaaagaacttctaacaagattgtcagaagagaaaagaaatggtgccccccaccttcctaaaattggtgacattaaaaaggccagtcgctactccattccagatcttgctgtagatgtagaacaggtgataggacttgaaaaagtgaacaaaaaaagtaaagccaacactgtgggaggaaggaacaagctgaaaaagatactcgacaagactcggatcagtatcttgccacagaaaccatacaatgatattgggattggtcagtctcaagatgacagcatagtaggattaaggcagacaaagcacatcccaactgcattgcctgtcagtggaaccttatcatccagtaatcctgatttattgcagtcacatcatcgcattttagacttcagtgctactcctgacttgccagatcaagtgctaagggtttttaaggctgatcagcaaagccgctacatcatgatcagtaaggacactacagcaaaggaagtggtcattcaggctatcagggagtttgctgttactgccaccccggatcaatattcactatgtgaggtctctgtcacacctgagggagtaatcaaacaaagaagacttccagatcagctttccaaacttgcagacagaatacaactgagtggaaggtattatctgaaaaacaacatggaaacagaaactctttgttcagatgaagatgctcaggagttgttgagagagagtcaaatttccctccttcagctcagcactgtggaagttgcaacacagctctctatgcgaaattttgaactctttcgcaacattgaacctactgaatatatagatgatttatttaaactcagatcaaaaaccagctgtgccaacctgaagagatttgaagaagtcattaaccaggaaacattttgggtagcatctgaaattctcagagaaacaaaccagctgaagaggatgaagatcattaagcatttcatcaagatagcactgcactgtagggaatgcaagaattttaactcaatgtttgcaatcatcagtggcctaaacctggcaccagtggcaagactgcgaacgacctgggagaaacttcccaataaatacgaaaaactatttcaagatctccaagacctgtttgatccttccagaaacatggcaaaatatcgtaatgttctcaatagtcaaaatctacaacctcccataatccctctattcccagttatcaaaaaggatctcaccttccttcacgaaggaaatgactcaaaagtagacgggctggtcaattttgagaagctaaggatgattgcaaaagaaattcgtcacgttggccgaatggcttcagtgaacatggaccctgccctcatgttcaggactcggaagaagaaatggcggagtttggggtctctcagccagggtagtacaaatgcaacagtgctagatgttgctcagacaggtggtcataaaaagcgggtacgtcgtagttcctttctcaatgccaaaaagctttatgaagatgcccaaatggctcgaaaagtgaagcagtacctttccaatttggagctagaaatggacgaggagagtcttcagacattatctctgcagtgtgagccagcaaccaacacattgcctaagaatcctggtgacaaaaagcctgtcaaatccgagacctctccagtagctccaagggcagggtcacaacagaaagctcagtccctgccacagccccagcagcagccaccaccagcacataaaatcaaccagggactacaggttcccgccgtgtccctttatccttcacggaagaaagtgcccgtaaaggatctcccaccttttggcataaactctccacaagctttaaaaaaaattctttctttgtctgaagaaggaagtttggaacgtcacaagaaacaggctgaagatacaatatcaaatgcatcttcgcagctttcttctcctcctacttctccacagagttctccaaggaaaggctatactttggctcccagtggtactgtggataatttttcagattctggtcacagtgaaatttcttcacgatccagtattgttagcaattcgtcttttgactcagtgccagtctcactgcacgatgagaggcgccagaggcattctgtcagcatcgtggaaacaaacctagggatgggcaggatggagaggcggaccatgattgaacctgatcagtatagcttggggtcctatgcaccaatgtccgagggccgaggcttatatgctacagctacagtaatttcttctccaagcacagaggaactttcccaggatcagggggatcgcgcgtcacttgatgctgctgacagtggccgtgggagctggacgtcatgctcaagtggctcccatgataatatacagacgatccagcaccagagaagctgggagactcttccattcgggcatactcactttgattattcaggggatcctgcaggtttatgggcatcaagcagccatatggaccaaattatgttttctgatcatagcacaaagtataacaggcaaaatcaaagtagagagagccttgaacaagcccagtcccgagcaagctgggcgtcttccacaggttactggggagaagactcagaaggtgacacaggcacaataaagcggaggggtggaaaggatgtttccattgaagccgaaagcagtagcctaacgtctgtgactacggaagaaaccaagcctgtccccatgcctgcccacatagctgtggcatcaagtactacaaaggggctcattgcacgaaaggagggcaggtatcgagagcccccgcccacccctcccggctacattggaattcccattactgactttccagaagggcactcccatccagccaggaaaccgccggactacaacgtggcccttcagagatcgcggatggtcgcacgatcctccgacacagctgggccttcatccgtacagcagccacatgggcatcccaccagcagcaggcctgtgaacaaacctcagtggcataaaccgaacgagtctgacccgcgcctcgccccttatcagtcccaagggttttccaccgaggaggatgaagatgaacaagtttctgctgtttgaggcacagacttttctggaagcagagcgagccacctgaaaggagagcacaagaagacgtcctgagcattggagccttggaactcacattctgaggacggtggaccagtttgcctccttccctgccttaaaagcagcatggggcttcttctccccttcttcctttcccctttgcatgtgaaatactgtgaagaaattgccctggcacttttcagactttgttgcttgaaatgcacagtgcagcaatcttcgagctcccactgttgctgcctgccacatcacacagtatcattccaaattccaagatcatcacaacaagatgattcactctggctgcacttctcaatgcctggaaggattttttttaatcttccttttagatttcaatccagtcctagcacttgatctcattgggataatgagaaaagctagccattgaactacttggggcctttaacccaccaaggaagacaaagaaaaacaatgaaatcctttgagtacagtgcttgtccacttgtttacaatgtcctccttttaaaaaaaaaaatgagtttaaagattttgttcagagagtaaatatatatccatttaatgattacagtattattttaaaccttaagtagggttgccagcctggtttctgaaaaaccaaatatgccggacagggtgtggccacaccaagaagacgggaagacctggcttgtgaccctggcttcccatgtccttctggtctcacccgcgaagtgccctatcctggaagtatgaaatgttagccaattaataccaagacacctcatctgctccttccccagtggatggggttcttctgtaaaactgtttgcacatggccaggggagggaactaggacccttgtgtcctgtctgagccttatggaggcaggacggtgtcattggcggatgtgtcctgctccattgagatggatggcaaaccccatttttaagttatatttctttgatttttgttaatttagaggtgtaggttttgttttttgttttttgtttttttttaagagaaacatttataactggatagcattgcagtgaaagcagcttgggatgttggagctaatgccagctgtttatactgctctttcaagacagcctccctttattgaattggcattagggaataaacaagcctttaaacgtgataaaagatcaaaaacctggttagacatgccagcctttgcaaggcaggttagtcaccaaagactaacctccaagtggctttatggacgctgcatatagagaaggcctaagtgtagcaaccatctgctcacagctgctattaaccctataatgactgaaatgacccctccactctatttttgtgttgttttgcacagactccggaaaagtgaaggctgccaatctgagtagtactcaaatgtgaggaactgctggtcttggattttttttccattaaattcagctgatcatattgatcagtagataaacgtaaatagcttcaaattttaaaagtggaattgcagtgttttttcactgtatcaaacaatgtcagtgctttatttaataattctcttctgtatcatggcatttgtctacttgcttattacattgtcaattatgcatttgtaattttacatgtaatatgcattatttgccagttttattatataggctatggacctcatgtgcatatagaaagacagaaatctagctctaccacaagttgcacaaatgttatctaagcattaagtaattgtagaacataggactgctaatctcagttcgctctgtgatgtcaagtgcagaatgtacaattaactggtgatttcctcatacttttgatactacttgtacctgtatgtcttttagaaagacattggtggagtctgtatcccttttgtatttttaatacaataattgtacatattggttatatttttgttgaagatggtagaaatgtactatgtttatgcttctacatccagtttgtacaagctggaaaataaataaatataacat

SEQ ID NO: 348 - protein, 1499 aa, Homo sapiens
MKPLAIPANHGVMGQQEKHSLPADFTKLHLTDSLHPQVTHVSSSHSGCSITSDSGSSSLSDIYQATESEAGDMDLSGLPETAVDSEDDDDEEDIERASDPLMSRDIVRDCLEKDPIDRTDDDIEQLLEFMHQLPAFANMTMSVRRELCAVMVFAVVERAGTIVLNDGEELDSWSVILNGSVEVTYPDGKAEILCMGNSFGVSPTMDKEYMKGVMRTKVDDCQFVCIAQQDYCRILNQVEKNMQKVEEEGEIVMVKEHRELDRTGTRKGHIVIKGTSERLTMHLVEEHSVVDPTFIEDFLLTYRTFLSSPMEVGKKLLEWFNDPSLRDKVTRVVLLWVNNHFNDFEGDPAMTRFLEEFENNLEREKMGGHLRLLNIACAAKAKRRLMTLTKPSREAPLPFILLGGSEKGFGIFVDSVDSGSKATEAGLKRGDQILEVNGQNFENIQLSKAMEILRNNTHLSITVKTNLFVFKELLTRLSEEKRNGAPHLPKIGDIKKASRYSIPDLAVDVEQVIGLEKVNKKSKANTVGGRNKLKKILDKTRISILPQKPYNDIGIGQSQDDSIVGLRQTKHIPTALPVSGTLSSSNPDLLQSHHRILDFSATPDLPDQVLRVFKADQQSRYIMISKDTTAKEVVIQAIREFAVTATPDQYSLCEVSVTPEGVIKQRRLPDQLSKLADRIQLSGRYYLKNNMETETLCSDEDAQELLRESQISLLQLSTVEVATQLSMRNFELFRNIEPTEYIDDLFKLRSKTSCANLKRFEEVINQETFWVASEILRETNQLKRMKIIKHFIKIALHCRECKNFNSMFAIISGLNLAPVARLRTTWEKLPNKYEKLFQDLQDLFDPSRNMAKYRNVLNSQNLQPPIIPLFPVIKKDLTFLHEGNDSKVDGLVNFEKLRMIAKEIRHVGRMASVNMDPALMFRTRKKKWRSLGSLSQGSTNATVLDVAQTGGHKKRVRRSSFLNAKKLYEDAQMARKVKQYLSNLELEMDEESLQTLSLQCEPATNTLPKNPGDKKPVKSETSPVAPRAGSQQKAQSLPQPQQQPPPAHKINQGLQVPAVSLYPSRKKVPVKDLPPFGINSPQALKKILSLSEEGSLERHKKQAEDTISNASSQLSSPPTSPQSSPRKGYTLAPSGTVDNFSDSGHSEISSRSSIVSNSSFDSVPVSLHDERRQRHSVSIVETNLGMGRMERRTMIEPDQYSLGSYAPMSEGRGLYATATVISSPSTEELSQDQGDRASLDAADSGRGSWTSCSSGSHDNIQTIQHQRSWETLPFGHTHFDYSGDPAGLWASSSHMDQIMFSDHSTKYNRQNQSRESLEQAQSRASWASSTGYWGEDSEGDTGTIKRRGGKDVSIEAESSSLTSVTTEETKPVPMPAHIAVASSTTKGLIARKEGRYREPPPTPPGYIGIPITDFPEGHSHPARKPPDYNVALQRSRMVARSSDTAGPSSVQQPHGHPTSSRPVNKPQWHKPNESDPRLAPYQSQGFSTEEDEDEQVSAV

SEQ ID NO: 349 - DNA, 2302 bp, Homo sapiens
gttcctcgtgccaacgtgtcttgtaaggtgcggctagaaactggggacatggcagcgcctggcccagcgctctgcctcttcgacgtggatgggaccctcaccgccccgcggcagaaaattaccaaagaaatggatgacttcctacaaaaattgaggcagaagatcaaaatcggagtggtaggcggatcggactttgagaaagtgcaggagcaactgggaaatgatgtggttgaaaaatacgattatgtgtttccagaaaatggcttggtagcatacaaagatgggaaactcttgtgtagacagaatattcaaagtcatctgggtgaggccctaatccaagatttaatcaactactgtctgagctacattgcgaaaattaaactcccgaagaagaggggtactttcattgaattccgaaatgggatgttaaacgtgtcccctattggaagaagctgcagccaagaagaacgcattgagttctacgaactcgataaaaaagaaaatataagacaaaagtttgtagcagatctacggaaagagtttgctggaaaaggcctcacgttttccataggaggccagatcagctttgatgtctttcctgatggatgggacaagagatactgtctgcgacatgtggaaaatgacggttataagaccatttatttctttggagacaaaactatgccaggtggcaatgaccatgagatcttcacagaccccagaaccatgggctactccgtgacagcgcctgaggacacgcgcaggatctgtgaactgctgttctcctaacgtgggagcgggaggggcggggtcccggctgacaagcagcatagggcattcggtggccagagccgagggtcctcccacacgtgctcacccacccgcagcctaggcaggctctgcatgctatgccaggcatgtgccgtctggacttccacctccagtgccagaaacttccagaaagaaggagaaactcttgtcaagaatggcccagaggaatgcctcgcacaaaaggtcttccccacccacccccagccccctagtctaatacccaccctgatacgtgcaatcatgtagttttggcggaaatttccccatcattctaggatgatacagaaagaaaactgtgcctggaccctccctcttggtgggtctgtggaaacataagcggtttttttaatgggcccctgcatcaataccaaacatgggggtttggtaatgagaaaccaggacaggccatctgcagtgacccagcccaggacgaagtttacaaacacctcctggaacgaagctcccgcctgcatgtcaccttgatgggggctgtgagtggggcagtgtgatacccagtgactagacgcactctgcgttttcccgtgtttggggctgaggcctgctggacagatggctggccaagtgggagcagaccctagggagtttgcacctcggctgggccggattcggaccggctctgtgttcactacactcagaatagcctgctgcttctctgtctccgagaccggagtacttgggaacaacagctgggctggagagttggtgctggcaaaacagtccttcccctggggccggttcttacccaggtccagagaaaccaacgcgggatgtcagacttcaccaaaaggactttctggttgcccctggctggcttcctggaggcgttcgcctctagtttctcagggatggagcgagagcccagccagagaacagtaagaggagctgctctcctatctgcactcacccaggccttcacccagactttaccgcggaggcggctgagtgcagctacagctaggtccgcgtccctcactcttttcatcttctgcacgttcttcgtgaaactggaaggatcccgggtctcagctagaacacggtggaagagaactttcctaggaaacggttcatgtgtcacttttcaggatgtggaaacactgagccatacaccctccattgcttggtgctggggttgtgtggcctccactgggcacttgccgacctgagtctggggccaggggagcccaggctgccctgcactcctgcctcccagcccacagccaggtgctttcatcacagctaaacctggttccctccaaacctcccagccactcgggcttgtaactgtctgagccccggatccggtggggtgaaagcagccagctcatcccagtgactcacaggacacagccatccagcggcatctttccttgtcgaatgatactgtaatgaccttccaaagtgaagagtagcacattaaagtgattttattgtttaaaaaaaaaaaaaaaaa

SEQ ID NO: 350 - protein, 246 aa, Homo sapiens
MAAPGPALCLFDVDGTLTAPRQKITKEMDDFLQKLRQKIKIGVVGGSDFEKVQEQLGNDVVEKYDYVFPENGLVAYKDGKLLCRQNIQSHLGEALIQDLINYCLSYIAKIKLPKKRGTFIEFRNGMLNVSPIGRSCSQEERIEFYELDKKENIRQKFVADLRKEFAGKGLTFSIGGQISFDVFPDGWDKRYCLRHVENDGYKTIYFFGDKTMPGGNDHEIFTDPRTMGYSVTAPEDTRRICELLFS

SEQ ID NO: 351 - DNA, 1698 bp, Homo sapiens
ggggatagcgatggagacgccgggcgcatcagcgtcgtccttgttgcttcccgccgcgtccaggcccccgaggaagcgcgaggcgggagaggctggggctgcgacgagcaagcagcgggtcctggacgaggaagagtatatcgagggcctccagacggtcatccaaagggatttctttcctgatgtggagaagctccaggcacagaaggagtacctggaagccgaggagaatggagacttggaacggatgcgccagattgccatcaagtttggctctgccttgggcaagatgtcccgggagcccccgccaccctatgtgactccagccacatttgaaacccctgaggtgcatgcaggcactggagtggtgggcaacaagcccaggccccgcggccgaggcctggaggatggagaggctggagaggaggaggagaaggagccgctgcccagcctagatgtcttcctgagccgctacacgagtgaggacaatgcctccttccaggagatcatggaggtggccaaggagagaagccgggcacgccacgcttggctctaccaggctgaggaagagtttgagaagaggcagaaagataatctcgaactcccgtcagcagagcaccaggccatcgagagcagccaggccagtgtggagacctggaagtacaaggccaagaattccctcatgtactatccagagggtgtccctgacgaggagcagctgtttaagaagccccggcaggtggtacataagaacacgcgcttccttagggaccccttcagccaagccctgagcaggtgccagctccagcaggcagccgccctcaatgcccagcacaaacagggcaaggtgggccccgatggcaaggagctgatcccccaggagtcccctcgagtgggtggatttggatttgttgccactccttcccctgcccctggtgtgaacgagtccccgatgatgacctggggggaggttgagaacacacccttgagagttgaagggtcggaaacgccctacgtggacaggacacccggcccagcttttaagatcctggagccaggccgcagggagcggctgggtctgaagatggccaacgaggccgctgccaagaaccgggccaagaagcaggaagccttgcggagagtgacggagaatctggccagcctcacccccaaaggcctgagcccagccatgtcgccagccctacagcgccttgtgagcaggacggccagcaagtacacagaccgggccctgcgggccagctacacaccatccccagcacgctccacccacctcaagaccccggccagtgggctgcagacccccacaagcacaccggcgcctggctctgccacacgcacccctctcacacaggacccggcctccatcacggacaacctgctgcagctccctgcccggcgcaaagcttcggacttcttttagagccaggcctgggctgggctcatagacgcttcacagagcctgcagggcagctgtacacccagcagaggactccagccttctcggggcccaggcctgggccagaagctgttgaccataccaggagtcactggagaaaggggctgtgctggggccagactggcacaaggcactcgtgcccacaccacaccccagggccttgccaagctgtttgctgtttaattggccccttgaactgtcattaaagaacacctaggtac

SEQ ID NO: 352 - protein, 476 aa, Homo sapiens
METPGASASSLLLPAASRPPRKREAGEAGAATSKQRVLDEEEYIEGLQTVIQRDFFPDVEKLQAQKEYLEAEENGDLERMRQIAIKFGSALGKMSREPPPPYVTPATFETPEVHAGTGVVGNKPRPRGRGLEDGEAGEEEEKEPLPSLDVFLSRYTSEDNASFQEIMEVAKERSRARHAWLYQAEEEFEKRQKDNLELPSAEHQAIESSQASVETWKYKAKNSLMYYPEGVPDEEQLFKKPRQVVHKNTRFLRDPFSQALSRCQLQQAAALNAQHKQGKVGPDGKELIPQESPRVGGFGFVATPSPAPGVNESPMMTWGEVENTPLRVEGSETPYVDRTPGPAFKILEPGRRERLGLKMANEAAAKNRAKKQEALRRVTENLASLTPKGLSPAMSPALQRLVSRTASKYTDRALRASYTPSPARSTHLKTPASGLQTPTSTPAPGSATRTPLTQDPASITDNLLQLPARRKASDFF

SEQ ID NO: 353 - DNA, 1567 bp, Homo sapiens
gaattcggcacgagggagaagccaaacgtaaagacaccaggagtttctcgggcccagctgtggctgctgccggggagccccaagccttggcggtccttgctgcgaataggagtctggtcaggcgtcaggctagtccgacgaagagtgggtgtgatcagcactggaaaagatgcctgcccctgctgccacatatgaaagagtagtttacaaaaacccttccgagtaccactacatgaaagtctgcctagaatttcaagattgtggagttggactgaatgctgcacagttcaaacagctgcttatttcggctgtgaaggacctgtttggggaggttgatgccgccttacctttggacatcctaacctatgaagagaagaccttgtcagccatcttgagaatatgtagcagtggtcttgtcaaattgtggagctctttgaccctgttaggatcctataaaggcaaaaaatgtgctttccgggtgattcaggtttctccatttcttcttgcattatctggtaatagtagggaactagtattggattgaatgaatagtcttccattttggaaacgttcatccactctcatatttattttttcggtgcctgcatgtttgaagactgaagcaggctaaaagctcttgatgaaatttgagggtgctgaagatgttcccactaatttccagccatcacctttggtggggtgggcttcggaggacagtctgtctgaacctgccagtgctgaccctgcagcactttcagcatatgcacatcaaagttggagaccgcgctgaacttaggagggccttcacacagactgatgtggctaccttctcagaattaacaggggatgttaatcctttgcatttgaatgaagactttgcaaaacacaccaagtttggaaatacaattgtacatggagttttgatcaacggacttatctcagctctcctaggaactaaaatgccagggccaggctgtgtatttctttcccaggaaattagctttccagcccctttatatattggagaagttgttttagcttctgcagaagtgaaaaagctgaagcggttcattgctattattgcagtgtcatgttctgtaatagaaagtaaaaagactgttatggaaggctgggttaaagttatggttccagaagcttccaaatcctgaaatagatgttttaaagatgcaacctcaaacaccaatgctgttgttaaagagcctatggggaattgctgctctttaccaaagaatggttgataggcccagaagcccatgttagttaggggaagggagcaggaagagggttgttcaaatgcccactttccagtttggccttatgctttatgcagacttgagtgtatgcaggatttcattatctgcctgggtttttttgtttgttttttgttttttaattcaagaagtaggctgggcccggtggctcatgcctgtaatcctggcactttgggaggctgcggcaggcggatcacttgaggtcaggagtccaagaccagcctggccaacatggtgaaaccccatctctaccaaaaaaaaaaaaaaaaaaaaaa

SEQ ID NO: 354 - protein, 124 aa, Homo sapiens
MPAPAATYERVVYKNPSEYHYMKVCLEFQDCGVGLNAAQFKQLLISAVKDLFGEVDAALPLDILTYEEKTLSAILRICSSGLVKLWSSLTLLGSYKGKKCAFRVIQVSPFLLALSGNSRELVLD

SEQ ID NO: 355 - DNA, 5160 bp, Homo sapiens
gttccaggtgcaagcgccgggtttgctgcccgctgggcgcccctgcagcggcccgagctgtggccggcgtggatgaggggcaggcgaggcagggccgcccctccagtattgccgcccctcccgccccagggcagggctgggagggtacagcccgggggcgggctcgggtcgcctcccggccgccgcgtcctcgctgccccgggccgggcgggcgggcgccgagagcctcccagcccgccccgtgccccgcccgcccggctgcttccgcggcggcgctgcccgcacatgggctaggctgccaggatgttcagcttcgaaggcgacttcaagacgcggcccaaggtgtcccttggcggcgcgagcaggaaggaggaaaaggcttctcttttacatcgtactcaggaagaaagaagaaagagagaggaagaaaggcgaaggttgaaaaatgcaataattatccagtcatttattcgaggctatagagacagaaaacagcaatattccatccaaagaagtgcatttgatcgctgtgctaccttgtcacagtccgggggcgcttttcccattgctaatggccccaaccttacccttttggtaaggcagcttctgtttttttacaaacaaaatgaagactcaaaacgtttgatatggctgtatcagaacttaattaaacacagctctctgtttgtcaagcagttggatggatctgagagacttacatgcttatttcagataaaaagattgatgagcctctgttgcaggttgctgcaaaactgtaatgatgacagtttgaatgttgcacttccaatgagaatgcttgaagtattttcgtctgagaatacttacttgcctgttttacaagatgctagctatgtggtgtcagtgattgaacaaattttgcactacatgattcacaatgggtattataggtctctatatttgttgattaacagcaagcttccatcaagtattgaatattctgatttatctcgagttcctatagcaaaaattttgctagagaatgttctaaaaccattgcactttacttacaactcctgtccggaaggtgcgaggcaacaagtttttacagccttcacagaggagtttctggcagcaccttttacagatcagatttttcatttcatcattccggcgcttgcagatgcgcagaccgttttcccttacgagccctttctgaatgcactgttgttaatagagagtagatgttcaagaaagagtggtggagcaccctggcttttctatttcgttttaactgttggcgaaaattatttgggggccctctctgaggaagggctgctggtgtatttgcgggtgctgcagaccttcctctctcagttaccagtctctcctgccagcgcgagctgtcacgactcagccagtgactctgaggaggagagtgaagaagccgacaagccctcaagcccggaggatggcagactgtcagtatcatacataacagaggaatgcctgaagaagctggacacaaagcagcagaccaacaccctgctcaacctggtgtggagggactctgcgagcgaggaggtcttcaccaccatggcctccgtctgccacacgctgatggtgcagcaccgcatgatggtacccaaagtcaggcttctctacagtttagcctttaatgccaggtttctgagacatctttggtttctaatatcttccatgtcaacacggatgatcacagggtctatggtaccgttgcttcaggtgatatccaggggttctcctatgtcttttgaagattctagtcgaatcatcccactcttttacctttttagctccttgtttagtcattcactaatttccatacatgataacgaattcttcggtgatcccatagaagttgtaggtcaaagacaatcatcaatgatgccttttactttagaagagctgataatgttgtctcgatgccttcgagatgcatgcctggggatcatcaagttggcttatccagaaaccaagccagaagttcgagaagaatatattacagcatttcagagtattggagttactactagctctgaaatgcaacaatgcatacagatggaacagaaaagatggattcagttatttaaggttatcaccaatctagtgaaaatgttgaagtccagagacacgaggagaaatttttgtcctccaaaccactggctgtcagaacaagaagatattaaagcagataaggtcactcagctctatgtgccagcatccagacatgtgtggaggttccggcggatggggaggataggcccgctgcagtccaccctggacgtgggtttggagtccccgccgctgtctgtgtctgaggaaagacagcttgctgtcctgacagagttgccttttgtggttccatttgaggaacgagtaaagatctttcagaggttgatttatgcagataagcaagaagttcaaggagatggtccatttctggatggaattaatgtcacaataagaagaaattacatttatgaagatgcttatgacaaactttctccagaaaatgagcctgatttgaaaaagcggatccgtgtgcacttgctcaatgcccatggcctggatgaagctggcattgatggtggtggtattttcagagagtttttaaatgaactactgaagtcaggatttaaccccaaccaggggttctttaagactactaatgaagggcttctgtaccccaacccggctgctcagatgcttgtgggagattcttttgccagacattactacttcctagccagaatgcttggaaaggctctctatgagaacatgctggtggagctgccctttgcaggcttctttctttccaagttgcttggaaccagtgccgacgtggacattcaccacctcgcctccctagaccctgaggtgtataagaatttgctctttctgaagagctacgaagacgatgtggaggagcttgggctgaacttcactgtggtgaacaatgacctgggagaggcgcaggtagttgaactaaaattcggtgggaaagacatccctgtcaccagcgccaaccggattgcgtacatccacttggtggcagactacaggctgaacaggcagatccgccagcactgcctggctttccgccagggccttgccaatgtcgtcagcctcgagtggctccgaatgtttgatcagcaagaaattcaggtattaatttctggtgcacaagttcccataagcctagaggacctaaaatcctttacaaactattcaggaggctattctgcagaccatcctgttattaaggtcttctggagagttgtggaagggttcactgatgaagaaaagcgcaaactgctgaagtttgtaacaagctgctctcgaccccctctcttggggtttaaggagttgtatcccgcattttgtattcacaacggaggctccgaccttgagcggctccccacagccagcacctgcatgaacctgctgaagctccccgagttctatgacgagacacttttgcgaagtaaacttctctatgcgattgaatgtgccgctggctttgagctgagctgaagctgatgctggggtcagacccctacagagaaccagtgcttccttcgtcagcagcgcctccccagacccacgaggatactcacactgcacgcctgaggctctcctaagctccttctttcattctgccattcctccctcccttccttttttaaatgatttttattacggtgtggtcacttatttagatggacattgcttttcaaataacttaaaataacacgttatgtgccatgtggctactttagtaatattgccaagaagagcacagtttttacactagtggcatctcagtgaaattaaccaaagatgaagctttggctttgctggtgagatcagagccctcctgagcaggcagcgccactccagggttcagacagggctgcacaggcggcagagatacagggtctgagggctgagacgccatggggccgctgctgcttatgtggttggattgtttacaagcctcattattaaaactgaaggcattttttttttctgctgcctttcccaaagtggttaggtttggaaaagagatgatgatggtaatattttatttgtgctttttaagccatttccccaaatgggactagcatgcttgttttcagtataccgtggcctgcctcatgatggtttggagatactgtctgtggatgtgaggtggggacttcattcattgtcctatttctatctccactttgtgcctggagagctttcaggggaggtggaggaggagggtctgccaagctactgcaacatctgtcacccactatacccagttacttgggggaggacagacactgtggtgtcattaaagttgtttgaaccaaagtggcggctgcatctttgtcccgatgctagccgtgccggtctcccatcatccgctcgccctcctttcccctgggctgcgcccacttgtcttcctggatatttgggggtgactcgccatgcttggcaccctctgcttcctggtgctgctctgactcgaagacgggacagtccctggtgcacatccagggaagaggagtgtcggtagttcttgcagtaggcactttatcaggacctgacctgttgctgggtgattttagtctctacaaacagaaagcgtttcaaagcgtcagctgtgggagcagagtgaccctttgctgatgctggggggaggggatctaaatcctcatttatctcttctatgtctagtattttactgtcactggaggctctgtgggctgtcatagttaattgaccataattagcaatatacttttaaagtgggaaagctgaatgacacttttaagacaatgaacattatcaaaacaaaatgtataatttcttaatttgaataataagcgtttaaatgctatttgtagtcttgatatacagaaataaaataattagggttggtcttttttattttaggttttatgttgaatgttctatatcttattagttaatttgtatattttattagtattttggaaatagcatatctgagactgaggagaaattgacaattcacttatttgtggtttttttctcagctattctgagcttatttatttatttgtatgttctaatggctaaacatttacattaaatattttttttccc

SEQ ID NO: 356 - protein, 1083 aa, Homo sapiens
MFSFEGDFKTRPKVSLGGASRKEEKASLLHRTQEERRKREEERRRLKNAIIIQSFIRGYRDRKQQYSIQRSAFDRCATLSQSGGAFPIANGPNLTLLVRQLLFFYKQNEDSKRLIWLYQNLIKHSSLFVKQLDGSERLTCLFQIKRLMSLCCRLLQNCNDDSLNVALPMRMLEVFSSENTYLPVLQDASYVVSVIEQILHYMIHNGYYRSLYLLINSKLPSSIEYSDLSRVPIAKILLENVLKPLHFTYNSCPEGARQQVFTAFTEEFLAAPFTDQIFHFIIPALADAQTVFPYEPFLNALLLIESRCSRKSGGAPWLFYFVLTVGENYLGALSEEGLLVYLRVLQTFLSQLPVSPASASCHDSASDSEEESEEADKPSSPEDGRLSVSYITEECLKKLDTKQQTNTLLNLVWRDSASEEVFTTMASVCHTLMVQHRMMVPKVRLLYSLAFNARFLRHLWFLISSMSTRMITGSMVPLLQVISRGSPMSFEDSSRIIPLFYLFSSLFSHSLISIHDNEFFGDPIEVVGQRQSSMMPFTLEELIMLSRCLRDACLGIIKLAYPETKPEVREEYITAFQSIGVTTSSEMQQCIQMEQKRWIQLFKVITNLVKMLKSRDTRRNFCPPNHWLSEQEDIKADKVTQLYVPASRHVWRFRRMGRIGPLQSTLDVGLESPPLSVSEERQLAVLTELPFVVPFEERVKIFQRLIYADKQEVQGDGPFLDGINVTIRRNYIYEDAYDKLSPENEPDLKKRIRVHLLNAHGLDEAGIDGGGIFREFLNELLKSGFNPNQGFFKTTNEGLLYPNPAAQMLVGDSFARHYYFLARMLGKALYENMLVELPFAGFFLSKLLGTSADVDIHHLASLDPEVYKNLLFLKSYEDDVEELGLNFTVVNNDLGEAQVVELKFGGKDIPVTSANRIAYIHLVADYRLNRQIRQHCLAFRQGLANVVSLEWLRMFDQQEIQVLISGAQVPISLEDLKSFTNYSGGYSADHPVIKVFWRVVEGFTDEEKRKLLKFVTSCSRPPLLGFKELYPAFCIHNGGSDLERLPTASTCMNLLKLPEFYDETLLRSKLLYAIECAAGFELS

SEQ ID NO: 357 - DNA, 2808 bp, Homo sapiens
ggcccccaaagccggtctagcgcgccgggcgtcttccttacttccgctgccgccgccgccacatcccgggacccgacgggccgcggcgcggaggcctcggggcaaggtggggcgggcctcccgagctcccaggaccccgcgcgcttcgcccacaggcccggcgaagcccgacccgcgcggcgcccccagggccaggggaggagcctaaggacccggacgagcgccgctccagtaggtgacaagaggaaacaagaacctcagttcaggggaaacacagcaaggaaatgtgagccccaggctgcagaaggaagagtcagtgaatggctgcggtgtgacaacatgcaccaccagtggcttctgctggccgcatgcttttgggtgattttcatgttcatggtggctagcaagttcatcacgttgacctttaaagacccagatgtgtacagtgccaaacaggagtttctgttcctgacaaccatgccggaagtgaggaagttgccagaagagaagcacattcctgaggaactgaagccaactgggaaggagcttccagacagccagctcgttcagcccctggtctacatggagcgcctggaactcatcagaaacgtctgcagggatgatgccctgaagaatctctcgcacactcctgtctccaagtttgtcctggaccgaatatttgtctgtgacaagcacaagattcttttctgccagactcccaaagtgggcaacacccagtggaagaaagtgctgattgttctaaatggagcattttcttccattgaggagatccccgaaaacgtggtgcacgaccacgagaagaacggccttcctcggctctcttccttcagtgatgcagaaattcagaagcgattgaaaacatacttcaagttttttattgtaagagatcccttcgaaagacttatttctgcatttaaggataaatttgttcacaatccccggtttgagccttggtacaggcatgagattgctcctggcatcatcagaaaatacaggaggaaccggacagagacgcgggggatccagtttgaagatttcgtgcgctacctcggcgatccgaaccacagatggctagaccttcagtttggggaccacatcattcactgggtgacgtatgtagagctctgtgctccctgtgagataatgtacagtgtgattggacaccacgagaccctggaggacgatgccccatacatcttaaaagaggctggcattgaccacctggtgtcatacccgactatccctccgggcattaccgtgtataacagaaccaaggtggagcactatttcctgggcatcagcaaacgagacatccgacgcctgtatgcccgtttcgaaggggactttaagctctttgggtaccagaaaccagactttttgctaaactaatgcataagacctatgaattcaaatatctttattagacctggggctaaccaggtgaagatctgagcccagaaatgacccttcctccaccacacccctcctttgaggatgcccggggtctcccacaggcctgtgagttgcctcggcatatgacgcagaaccccaactgttacaacttagtttggatgtaagatgctctgaggaccctgcccacacccctgcgtgcattaggatgtcgctggcctttgctcacctcagaggggagaaaaggctaaagatttgcagtttgacagcccagcagggaggaagcatcacacagcgttaggagccgtttccttcaggtgttaaggaaggggatgcccctgaggttctcctggctagtcggggtggcttcacccatcactggtgggttgcaggaacagcacccaggactctgaggagggacagagaagcaagggggctgctgaaatcgcagagacttttgcagcatcagatctgaggagtaaaacggcacctctggccttcatcttggtgctgcgacaattgtggaggcaaagcattctttctgtgactattttgttcctgtagacagtcagcgatggccagagggtggtgtggtgtccaggggtccatctttccagaatccatgcctgtgtaatgctggtccatgcttctgaacctgtgtctgccaagcgcctatttcattcagcacaagacatacgattttagaaggtgaggggaggggaggctttttctacctgagaaggggagtgtctttgagggccttaaaaggaccatggcccaggaatgggggcgctggttgggcttggagctcaggctgctgtggatcccggcgcatcagttctgacttgccttacctgggtggacagcagtgaatctccacctgtcttctccagggagctcccatgttggggctgaagacgagcaggggcaacctgccagcatcacagaattcagtgtagtttatacatttcgattcctttcatctcagcaaaatgggcactgccagagccatttctgatcacaccaccatcctggaccatgtgactggaaggtgggtaaccaagttcaccagcaataaaacccagcgcccaggtagcctccagcagtgcggcttcctggcaacaaggtaggccctggtgcagggcaagccgcagcgaccatttcagataccgtccacagccaggaccgctgagaactgggacagtttcctgggatgagtgccagcctgagcctgcatggtgccgccgagcccggggtggaggagggagccaggcttcgcttcaaggcggcctctaccttttctcagaatggtttcctgattgtgtcaatgtgaaagttaaataaaatttatgtgccaaacctgaaaaaaaaaaaaaa

SEQ ID NO: 358 - protein, 356 aa, Homo sapiens
MHHQWLLLAACFWVIFMFMVASKFITLTFKDPDVYSAKQEFLFLTTMPEVRKLPEEKHIPEELKPTGKELPDSQLVQPLVYMERLELIRNVCRDDALKNLSHTPVSKFVLDRIFVCDKHKILFCQTPKVGNTQWKKVLIVLNGAFSSIEEIPENVVHDHEKNGLPRLSSFSDAEIQKRLKTYFKFFIVRDPFERLISAFKDKFVHNPRFEPWYRHEIAPGIIRKYRRNRTETRGIQFEDFVRYLGDPNHRWLDLQFGDHIIHWVTYVELCAPCEIMYSVIGHHETLEDDAPYILKEAGIDHLVSYPTIPPGITVYNRTKVEHYFLGISKRDIRRLYARFEGDFKLFGYQKPDFLLN

SEQ ID NO: 359 - DNA, 2382 bp, Homo sapiens
agtaccgctgcggccgggggattgggccggggtctccaccgccgaccgaggggagcggcgtccgctcggccctgctttttgcgacctgccgtcagccccacgtcgccggcctggaggggcgaagaggacgaggggcgcaaggcttcctccggggacattggctccctggattatcaagcagtttgtagttgacattgaatccaggctgaggatggaaggtgtggaacttaaagaagaatggcaagatgaagattttccgatacctttaccagaagatgatagtattgaagcagatatactagctataactggaccagaggaccagcctggctcactagaagttaatggaaataaagtgagaaagaaactaatggctccagacattagcctgacactggatcctagtgatggctctgtattgtcagatgatttggatgaaagtggggagattgacttagatggcttagacacaccgtcagagaatagtaatgagtttgagtgggaagatgatcttccaaaacccaagactactgaagtaattaggaaaggctcaattactgaatacacagcagcagaggaaaaagaagatggacgacgctggcgtatgttcaggattggagaacaggaccacagggttgatatgaaggcaattgaaccctataaaaaagttatcagccatgggggatattatggggatggattaaatgccattgttgtatttgctgtctgtttcatgcctgaaagtagtcagcctaactatagatacctgatggacaatctttttaaatatgttattggcactttggagctattagtagcagaaaactacatgatagtttatttaaatggtgcaacaactcgaagaaaaatgcccagtctgggatggctcaggaaatgttatcagcaaattgatagaaggttacggaaaaatctaaaatccctaatcattgtacatccttcttggtttatcagaacacttctggctgttacaagaccatttattagctcgaaattcagccaaaaaattagatacgtgtttaatttggcagaactagcagaacttgtccccatggaatacgttggcataccagaatgcataaaacaagttgatcaagaacttaatggaaaacaagatgaaccgaaaaatgaacagtaagtttggcatctagtccaaacaagactgaagaatgtgctgatggagcagtgctgtttctgcattcataatgcatttattggcccatatttttatgtaacctgttacaaaatagacttgactttttcataatggacttttgtattatacaagggactgttcactgctgtactggtttgcaaatttcttgaatttagctctttaatagctaactgtattattatcgttttatattttatattgctaaatagagaaccacactttatataaagtagtttttgcatttgtttattgaatgatgcatcttcttcggtgaaatatttatatgcataaatggcaaaggaaagaaataatatatatttttatgtcattgagcaatattttttcaatgtgtacctgtcttatggaagaaatatgcaggtatataagaccacgattttctaagctgccatataagaatttttgtttttgtaaatggttaaatacatttcctgggtaacttaggaaattaagctttttcataaggcaacagatggtaaactgattgtcatgaatacccaaagatcatgtatataatcgaagtgtattagtaccatcccaaggtttttttctcatttaacatatttgtttcataattcagcaagtacagatgcaagcgcattgcacactttttcctttctaaacttaaagacaagtcaaaaagccattcttagaactagaggatttaagcagggtcggaattacgggtttgtatatatgtatatactcgtttgtatatatgtatatactgggacattttatcttctggcccaaagtcagaactttataaaaatcttgagtttgttcacttaatgtgaaataagctatgtgtccagggtattgctcccctgagtgtatatgagtgctgagtagtattgcagagaatgtgatgagttatcactgtcacaactttttctatagaaaacaggggctgcttttaaactctcactatgggacactttaccaaaatacttccatatcaattatttgaacccggtagtttgtttgacctagttagattgtggtgtttattcaagtttgaaatcatgtttgacaatactgtaaattaggttaattttgaagtcttagcatcatcatattgtgctgttttggataacacgtttgttcaagaacatttaaactgtttctttggtgtcctttacattgaaataaattgtgtttgtgcctcc

SEQ ID NO: 360 - protein, 314 aa, Homo sapiens
MEGVELKEEWQDEDFPIPLPEDDSIEADILAITGPEDQPGSLEVNGNKVRKKLMAPDISLTLDPSDGSVLSDDLDESGEIDLDGLDTPSENSNEFEWEDDLPKPKTTEVIRKGSITEYTAAEEKEDGRRWRMFRIGEQDHRVDMKAIEPYKKVISHGGYYGDGLNAIVVFAVCFMPESSQPNYRYLMDNLFKYVIGTLELLVAENYMIVYLNGATTRRKMPSLGWLRKCYQQIDRRLRKNLKSLIIVHPSWFIRTLLAVTRPFISSKFSQKIRYVFNLAELAELVPMEYVGIPECIKQVDQELNGKQDEPKNEQ

SEQ ID NO: 361 - DNA, 7326 bp, Homo sapiens
caaggccagcccttcctcagctaataagcggaaaaacaaacccctttcagacatggagctgaattctagctcagaggactccaaagggagcaagcgtgtccgtactaattccatgggctcagccactggcccccttcctgggacaaaggtagaacccactgttctggacagaaactgcccctcccccgtcctaattgactgtccccacccaaactgcaacaagaagtacaagcacatcaatggacttaagtaccaccaagctcatgcccatacagatgatgacagcaagccggaagcggatggggacagtgagtacggagaggaacctattctccatgcagatcttgggagctgcaacggtgcatctgtctcacaaaaaggttccttgtcccctgcccgctcagctacccccaaagttcgacttgtagagccccatagcccttctccttcaagcaaattcagcacaaaaggcctctgtaagaaaaagttgagtggggaaggggacacagaccttggggccttatccaatgatggctctgatgatggaccctcagtgatggatgaaacaagcaatgatgcctttgattctttagaaaggaagtgtatggaaaaagaaaaatgtaaaaaaccctctagtttaaaacctgaaaagattccttccaagagcctaaagtcagcccgtcccattgcccctgccatccccccacagcaaatctacaccttccagacagccaccttcacagcagcgagcccaggctcttcctcaggcttgaccgccacagtggcacaagccatgcccaacagtccccaactcaagcccattcagcccaagcccactgttatgggagaacctttcacagtcaaccctgccttgactccagccaaggacaagaaaaagaaagacaaaaaaaagaaggaatcttcaaaggaacttgaaagtcctctgacccctgggaaggtgtgtcgagcagaggaaggcaaaagcccattcagggaatcttcaggaaatgggatgaaaatggaggggctcctaaatggctcatcagacccccaccaaagccgactggctagcatcaaggctgaagccgacaagatctacagtttcacggacaatgcccccagcccttccattggaggcagtagccgccttgaaaacactacccctactcagcccctgactcccttacatgtggtgacccagaatggagctgaagccagctcagtcaaaaccaacagccctgcatactctgacatctctgatgctggggaggatggggagggcaaggtagacagtgtcaaatcaaaggacgccgaacagttggttaaagaaggggctaagaaaactctttttccccctcagcctcagagcaaagactcaccatattaccaaggctttgagagttactattctccaagttatgcacagtccagccctggggctctgaaccccagcagccaggcaggagtggagagccaggccctgaagacaaaaagggatgaggaacctgagagcatagaagggaaagtgaagaacgatatctgtgaagaaaagaagcccgagctgagcagttccagtcagcagccctcggtcatccagcagcgtcccaatatgtacatgcagtccctgtactacaaccagtatgcctatgtacccccctatggctacagcgaccagagttaccacacccaccttctgagcactaacacggcttaccggcagcagtacgaagaacagcagaaacgccagagcttagagcagcagcagcggggagtggacaagaaggcagagatgggcctgaaggagcgggaggcagcactcaaggaagagtggaagcaaaagccgtcaattccaccaactctcaccaaggcccccagcctgacagacctggtgaaatcaggacctggcaaggccaaggagccaggggctgacccagccaaatcagtcatcattcccaagttagatgactcttcaaaactcccgggccaggcccctgaaggccttaaagtgaagctgagtgatgccagccacctaagcaaggaggcctctgaggccaagacaggtgctgagtgtggtcgacaggcagagatggatccaatactctggtaccgacaggaggcagagccccggatgtggacatatgtttatcctgccaagtactcagacatcaagtcagaggatgagcggtggaaggaggagcgggaccgcaaattgaaggaggaaaggagtcggagtaaggactctgtccccaaggaagatgggaaggaaagcacaagtagtgactgcaagctgcccacgtcagaggagtctcgccttgggagcaaggagccccggccaagtgtccatgtgcctgtgtcctccccacttacccagcaccagtcctacatcccctacatgcacggctattcctacagtcagtcctacgaccccaaccaccccagctaccggagcatgcctgctgtgatgatgcagaactacccaggttcctacctgccttccagctactctttttccccatatggcagcaaggtctcaggtggtgaagatgctgacaaggcacgagccagccccagtgtgacttgtaaatccagctcagagtccaaagccctggacatcttgcagcagcatgccagtcactacaagagcaagtctcccacgataagtgataaaacttctcaggagagagatcgaggaggctgtggggtggttgggggtggtggcagctgtagcagcgtcgggggagcaagtgggggtgaacggagtgttgaccggccccgcacctctccttcccagcgcctgatgtccacacaccaccaccaccaccacttggggtactcattgctcccagcacagtacaacttaccctatgcagcagggctttcttctacagccattgttgccagccaacaaggctcaactccctcactctacccaccccccaggaggtgagaatgacaccaagtgcccggataaagtcagcttcacgggcccggactggcttacccaaggaggtgctgaaggtgccgtttagacatcagttaaatggtgttgatcatcctgtttgccgtttccaccatgactgaaggcagacccttggctatctcacctccaccagacctccggactacctgaccctacctcttcctcaggagctggagagctggtacttagcaaaaatatttattctctcagccacagttatgactattgtggcctctgtggagatgaaggcacgggaagcaaccaggggaacatggcctcagcccagagaagccactgctctgttccccaagcccttggtctgctgctggagcagtaccagcccccccgcccaccagggagggacccccacccccaagcactgggtaaggtctgaagacagcacagcagccatacccctcaccatcattaccaccatcaccagattctgcatctccctagtgctttgcaccctgggaattggcagcatgtggaggaactagaatctcaggaaagaaattgggggttgttttctacataattgtgaaaacaaggtcttcaaatgtggagacttctccccatttacatgagcacatataaacgctcacaacctagcctggaaaggaagaccaaggcatctgccccaacatggccttgagctgcctgtgaggcagggggcaggggttccaacaccagcacagggctccccagggacactgggagtaagctggtgctggagcatgaatgacgtctgtgaagtagaacctgcgtccccactaagtcctgctgcttcttattccccaactccttgcccttttcccttccctcctaaccccttggtgcctttcccagggggatccccacactggtcttgcctcttcttttccactgcttggctcttaagcctcaggcagataaactagtattccccccagcttggggaaccttggagtctgccaggtcaccttagggcaaggcccagaaggcagcccctgggagcacccagcagttcttggagatgtcctgtcatctagccatctgatatcttcctcatttgaggccacagatatatacagcccaattcctctgtctacaagtacatgattttatatagctcagtctataacctccatgtgggccaatataagctgtgtttcttggtaacacatattttgtttgaggggccactggccatgggaggttatttgttccttagaccctggaataacacatccaagccattacttattagagtctcagaatgtactcagtggagctgtgctttgaggcagccaacatttctctgctctccttagaaatgcagtctcccaatggaagctttatactctttgtactgggaaagtgaggatgatttggtagctttattggggtcatgtcttccccaaggtgtggggagcttagcttacttggcttttgaggtatcatccctctgttctcccctcctatctttccatgaccctctggattgagagagagagataaagactgacagacaccagtgtaggctggaaaagggagtgtgtgaccagagtgccaaaagtgactaggagcaggaacttggctccgactcagtttggaaaatgggaaataggggacagtaagcacaatgcccagtagtagttgatttccaaggaccctggaaccctacacttgagaggcttagggtcaccatctgctcaagaggatcccctctgatctacaggccttttccctaggtttctgcctcctcgtttttgttcaagttgggttctgagtcctccccaaaaaccattgttttagacctcttggcagggccccaaaacagcctccctcatacccatcattccgtctgccttctgctgccctcatgggcagtgctctgagcagtgacctccctttcctccgtggaagtagctagtgcagacaccgtcatcccaccccacctgagtcaccccaaccaagagggtgactgaatttcagcctgattatgccctcctggggctcctgtgaggtggagccaaggttccctctctgttcctgtttgtctttaaatattgttgtgtgttttgtatctgtggcactggcctgcagcatactctgtatatattgtaaagaaaccgttaggagtaattttcttttgcattgggcaggcatggccctgcattcctgccctttccactcattctgtaacacagaggacgaacttctgtattagctgggcagccttgggttctccagaagagaacaggtttttcttttcctttttaatttttcttcttaaacatttggctctttgatcctcatatccaagtctcccctgaagagtaggagctgctcagaagagcaggtgaaagccaccatggcagatcctgatgcctgccgggcctagtcttccctctgaaataacatgaagcagcagctgtggagattcttgacaagtgctgagtgaaagatttgctgcccacctctacatggggaggagaaacacaggtgggagctacctgtggcatccatgacctagtcagagggatgagatgctcagcaggggtccccatcctatcccaccccacaaacaaaggctggaaaaatttgctaccaagggccaagaccaccagaccaagcctgtttatgagccacccctgcccaggccctcacagacattgctcacggggcttcccatagaggagaagctaaagagggagggggcctcatccccagatagatcaggcaaggcttggagagctgctctttaggatccacatcaactacttcctcattttaaggtatggcagttcccttcatccccttttcctgccttgtacatgtacatgtatgaaatttccttctcttaccgaactctctccacacatcacaaggtcaaagaaccacacgcttagaagggtaagagggcaccctatgaaatgaaatggtgatttcttgagtctcttttttccacgtttaaggggccatggcaggacttagagttgcgagttaagactgcagagggctagagaattatttcatacaggctttgaggccacccatgtcacttatcccgtataccctctcaccatccccttgtctactctgatgcccccaagatgcaactgggcagctagttggccccataattctgggcctttgttgtttgttttaattacttgggcatcccaggaagctttccagtgatctcctaccatgggcccccctcctgggatcaagcccctcccaggccctgtccccagcccctcctgccccagcccacccgcttgccttggtgctcagccctcccattgggagcaggttggggcgagctggaggcccgggctggaggggcagtgttgctgttcatagattttgttccattggcgttgctctgttgaatttaatttcagtcttcctgattcttcccttctgtaaagtgtacattaccaagttccttgtttttttatatatatatataaatatatatatatacaaactgtactctttttgcctttgtacattcaggcaagaagagaaaataaatctttttaagagacaatcacaaatctgtgagggctgctggttatttctcctggagtttgctgctgagctgcctcttccttcctcccaattttcctgttctccctcagctctcctgatcttcctggccctgctccatatgcatcctcagcttcactttccctggctgatggcaagctgttgaatccagtgtccagactacctgccttgtaacccttttctgcccagcattgttttctggcttggccactggcttagcccaggagctttactctgtgccctggcctcccctctcttcacctttagatttccattcaccgaagtggctttggacccctgggtactctgggacctgtttcctggaggccctggcttgggacactcacctgtgaaactatgcagctgggagctctctgcctaagagtttgcactatttaaacctgcctgggagttaggacggatggttttaggaatgaccggaaaactacccctaaaactcccccgacattccagcctctagaatgctctgatccagagctcagtggatgattcccagctggtggactcctgtggctaccccatcagaacaagggctaagggtttatgggtcaagagtatttgatcagaattttaaagggtggtatactctgaaacacagcccaaccaaaccattgtttggccgctttctcttttcctctaccttcctcatccccacttttttccctttctctctacttcctcttcttaattggctttggaattgaaatatatttttaaattatttgttgtatttattgaataaagtttttaatgtccctgttctt

SEQ ID NO: 362 - protein, 981 aa, Homo sapiens
KASPSSANKRKNKPLSDMELNSSSEDSKGSKRVRTNSMGSATGPLPGTKVEPTVLDRNCPSPVLIDCPHPNCNKKYKHINGLKYHQAHAHTDDDSKPEADGDSEYGEEPILHADLGSCNGASVSQKGSLSPARSATPKVRLVEPHSPSPSSKFSTKGLCKKKLSGEGDTDLGALSNDGSDDGPSVMDETSNDAFDSLERKCMEKEKCKKPSSLKPEKIPSKSLKSARPIAPAIPPQQIYTFQTATFTAASPGSSSGLTATVAQAMPNSPQLKPIQPKPTVMGEPFTVNPALTPAKDKKKKDKKKKESSKELESPLTPGKVCRAEEGKSPFRESSGNGMKMEGLLNGSSDPHQSRLASIKAEADKIYSFTDNAPSPSIGGSSRLENTTPTQPLTPLHVVTQNGAEASSVKTNSPAYSDISDAGEDGEGKVDSVKSKDAEQLVKEGAKKTLFPPQPQSKDSPYYQGFESYYSPSYAQSSPGALNPSSQAGVESQALKTKRDEEPESIEGKVKNDICEEKKPELSSSSQQPSVIQQRPNMYMQSLYYNQYAYVPPYGYSDQSYHTHLLSTNTAYRQQYEEQQKRQSLEQQQRGVDKKAEMGLKEREAALKEEWKQKPSIPPTLTKAPSLTDLVKSGPGKAKEPGADPAKSVIIPKLDDSSKLPGQAPEGLKVKLSDASHLSKEASEAKTGAECGRQAEMDPILWYRQEAEPRMWTYVYPAKYSDIKSEDERWKEERDRKLKEERSRSKDSVPKEDGKESTSSDCKLPTSEESRLGSKEPRPSVHVPVSSPLTQHQSYIPYMHGYSYSQSYDPNHPSYRSMPAVMMQNYPGSYLPSSYSFSPYGSKVSGGEDADKARASPSVTCKSSSESKALDILQQHASHYKSKSPTISDKTSQERDRGGCGVVGGGGSCSSVGGASGGERSVDRPRTSPSQRLMSTHHHHHHLGYSLLPAQYNLPYAAGLSSTAIVASQQGSTPSLYPPPRR

SEQ ID NO: 363 - DNA, 5182 bp, Homo sapiens
accttcagttcctccaagtcctggaagactgagacaaggggaagaaagcaagataagtgcgatggatgcatctccacggaatatttctccaggacttcagaatggagaaaaagaggatcgcttcttaacaactttgtccagccagagctccaccagttctactcatctccaattgcctacgccacctgaagtcatgtctgaacagtcagtgggagggccccctgagctagatacagccagcagttccgaagatgtgtttgatgggcatttgctgggatccacagacagccaagtgaaggaaaagtcaaccatgaaagccatctttgcaaatttgcttccaggaaatagctataatcctattccatttccttttgatccagataaacactacttaatgtatgaacatgaacgagtgcccattgcagtctgcgagaaggaacccagctccatcattgcttttgctctcagttgtaaagaataccgaaatgccttagaggaattgtctaaagcgactcagtggaacagtgccgaagaagggcttccaacaaatagtacttcagatagcagaccaaagagtagcagccctatcagattacctgaaatgagtggaggacagacaaatcgtacaacagaaacagaaccacaaccaaccaaaaaggcttctggaatgttgtccttcttcagagggacagcagggaaaagccccgatctctcttcccagaagagagagaccttacgtggagcagatagtgcttactaccaggttgggcagacaggcaaggaggggaccgagaatcaaggcgttgagcctcaagatgaagtagatggaggagatacgcaaaagaagcaactcataaatcctcatgtggaacttcaattttcagatgctaatgccaagttttactgtcggctctactatgcgggagagtttcataagatgcgtgaagtgattctggacagcagtgaggaagatttcattcgttccctctcccactcatcaccctggcaggcccggggaggcaaatcaggagctgccttctatgcaactgaggatgatagatttattttgaagcaaatgcctcgtctggaagtccagtccttcctcgactttgcaccacattacttcaattatattacaaatgctgttcaacaaaagaggcccacggcgttggccaaaattcttggagtttacagaattggttataagaactctcagaacaacactgagaagaagttagatctccttgtcatggaaaatcttttctacgggagaaagatggcacaggtttttgatttgaagggctctcttaggaatcggaatgtaaaaactgacactggaaaagagagttgtgatgtggtcctgctagatgaaaatctcctaaagatggttcgagacaaccctctatatattcgttctcattccaaagctgtgctgagaacctcgatccatagtgactcccatttcctttctagccacctcattatagattattctttgctggttgggcgagatgatactagcaatgagctagtagttggaattatagattatattcgaacatttacatgggacaaaaagcttgagatggttgtgaaatcaacaggaattttaggtggacaaggtaaaatgccaacagtggtgtctccggagttgtacaggactaggttttgtgaggcaatggacaagtatttcctaatggtaccagaccactggacaggcttgggtctgaattgctgaaatcaagcacatattttgaaatggactgtgaaggaaaaggggacaggaacaaaggaccaaaaataagctacatgttttatttcttcatcgtgttcaccactgtatgccaaggcttttcagttctgtgtctgtttagactgtccgtaatggaatggtaaaactccatgaatttgcactttggtttttgatacctgtggagctgtctgtacgttgggaagtggcatgaaaattttcttaagctaaaatacagacatgtttcaaagggctaaagttggagatgagtagatagggtgaaaaatgggttaaatttgctagcttaattgttttaagaagaaaacagtgtctcataaattgactatcctggcatcacatttaacatgttatctacttagaaagcatttgtagagctgctgaatttgttttgtgtttttctgtaataatttaatgttacttattatcagaatttctgaaacctttacaaaaattctgatttattccattaatggccagttaaacacgtgggcatttattgttttattgaggaatttgacttaaactgggaatcctgtcatgttgtttatctttccagcttgcctgtttttgagtatgtttgatgtttttaaaattttgtcttctctgtggatgacaggaggctacagcaattaactttaagcctccttttagagatatttttaaagcttgtttaaaatttttgtgcaattcatatattaaattgcacttacttgcatacgctcatattctagggttttttctctatttttagggtatcatagtaaatcattagtaaatgagtctgtagttactaaaccctaatggaataattattaatgaaagatttttgaaatataaaaaataaattaggcccaatccaagaaattgagtgagaaggaaacacttgttttattcacagaggtaaagtgtcttttcaatataaccagcaatttaggtggcatctataaaataaaaaatttctactgtggacatccccttttccaactttctacataatggctagttctgactactaagaaatgttaagaaataggccaagtgcggtggctcacgcctataatcctatcactttgggaggcctaggcaggcagatcacctgaggtcaggagttcaagaccagcctggccaacatgaggaaaccccatctctactaaaaagacaaaaaattagctgggcatggtggcatatacctgtaaccccaactacttgggtggctgaggcaggagaattgtttgaacctgggaggcggaggctgcagtgagctgggattacaccattgcattccagcctgggcaacagagcaagactgtctcaaaaaacaaaacgaaacaaaaaaagaaagttattcttagtaaggaacttcttgtttaatagcatttttgtttattttaaaaagtgatcagaagtagtaaactatctttgaggaaatactgtaaccccagaatatttcctcttgacttctttttgtaacaaggataatttagggatttataaagttgtaaggatttcactgttttcggactgcctataataatagcacattaaccttcacataataagaaatctggacaagttcagttacacagtatgatgaatacttgaattaggaacattgtggaaaatttgctttagagaatcaaggcagtagtttggtatttggtgcttattaaaaatgtggtttgttttgaactggaagcaagttgaccaaggacttatgactaatgtgatgctaagttccacttggccccttttaaaaacgtgtatgtgccttttgaagatacacaaaacactgaggattttagttttgaaatcaaagactattaaaggagctgtacagaggtaaaaaaataaatgtggaacattattaacttattttgtgtctaggaacaatggattttgtatctgatttaaaatgccaacactgttttgtctctgttcattttttctgtgaggatacttaaggttattattcctgtctgtttcctgtactcccctagtcatgagcacttgaagtacaaggtgtctccccctaggtgcaattaggttgtttctttgtttttagtttcaattctatgtgcatagcaggaatgctccacaggaatggcttctgacaataatctgtcctgttgattttgttttccttgcccatgacttgaacaactgtgttttaaagtactgtagtctagtaggtaactttgtggcaaaaattttcaatataatacattctgaaacaatagttgctgccttgcaaaggtaatctctcattttaaaattggacagtattaatgaaggggaaatatacaatttatttctattgagtggtagaactatatgtctggtcccttgctgctcttgtttaggccactatcatagatatatttcaaatattgtactactcagtgttaagtattgaatgactgtttccctttccttcaaggcctagagtatattctgaaaatttaggaatgaggaagaaatcttaatacttccttccttaacatacaacatgagtcccgagaataattgatagtagcaagagaaaactatgtcagtaacatgttgctttgtataaaaatcttatttataaatgtgaagctttttgatgccatcaaaacttattaaaaaataggatttacttttttctaattctgacctaagaaaaataatgagaacaagctgttgcaagctcttttgtagtctattgaatattttatagatattcaaaatttcctacaaactataattttttccatgatttagcagtgagtgattttctagctttggctcttattaggtattgtaaatagtagggttatatcgatatcagcttttgtgatggcattgtggtcatcagcttcatgacattttacccatttgcagtgatcctgtgtaaaactgccaaggaaagtaattacctgtaggagtttgctgagcttgaagagtgaaaactgttgtgaatgagcctgatcataaaacggaccaggccattcattattcctcaagtgttaatatactgacttatgcagtattcaaaccatctagtgcaatgtttttgtttttgttttttttttttttggtaacacaggtgcagtgtattatagaaaaaataaaaactacaatcattagcagttttaatactgctgtgtcagttttgtaaaaaatgtacattatgtcttttgacatgttgaattttaaactagggaaatgacattgtaaatcatagtagcctcttttaatttaatatgaaaaatgccactatattgaaagtacttaatgtattgtatatatttctctactttggttctagctattttatatgattgacatgttatttaaaagataactgccttgaacttttggagacttgtactgtaaataaagaaatcttaacaataaactcagaatctactt

SEQ ID NO: 364 - protein, 578 aa, Homo sapiens
PSVPPSPGRLRQGEESKISAMDASPRNISPGLQNGEKEDRFLTTLSSQSSTSSTHLQLPTPPEVMSEQSVGGPPELDTASSSEDVFDGHLLGSTDSQVKEKSTMKAIFANLLPGNSYNPIPFPFDPDKHYLMYEHERVPIAVCEKEPSSIIAFALSCKEYRNALEELSKATQWNSAEEGLPTNSTSDSRPKSSSPIRLPEMSGGQTNRTTETEPQPTKKASGMLSFFRGTAGKSPDLSSQKRETLRGADSAYYQVGQTGKEGTENQGVEPQDEVDGGDTQKKQLINPHVELQFSDANAKFYCRLYYAGEFHKMREVILDSSEEDFIRSLSHSSPWQARGGKSGAAFYATEDDRFILKQMPRLEVQSFLDFAPHYFNYITNAVQQKRPTALAKILGVYRIGYKNSQNNTEKKLDLLVMENLFYGRKMAQVFDLKGSLRNRNVKTDTGKESCDVVLLDENLLKMVRDNPLYIRSHSKAVLRTSIHSDSHFLSSHLIIDYSLLVGRDDTSNELVVGIIDYIRTFTWDKKLEMVVKSTGILGGQGKMPTVVSPELYRTRFCEAMDKYFLMVPDHWTGLGLNC

SEQ ID NO: 365 - DNA, 6949 bp, Homo sapiens
aaacaagaagaatgggattgatatttccgcagaagtttggaagttatgtaacagagcaggttgagatcctaccttttaggagcagcctgccccttttgaaggggtaaagggagtgggtgcagtgccctctcttctgttgtagtggcttatccctctaaggcatgacccttggataggggttacctgcctcggaaagtccccacttccttgtgggagtttaaaatagattggcatatgtgagagatggagacaaggtgggaaatcggatcctgtcttaggatttctcatcaggagatgctgatacttggtgtttcagcttgataaattgagaaggtgccatgaaaccaggtcctggaacagaatccctggttgctctgtcttttagctgctctgaccctctgccctgcagagcatgcattttgcatgtgcctggcaggaggccctcctgcttgagccctgctgtatttgtctgtgttgacaacgtgactgccagccattaagcttggtcagtccacagacacactaggaaagcagaggcagctcttggtttctctggaacagagctgcaagaagtctctgggcatctgcatggccaggagcttatgcttaactgttgagtgacctgcagccataagggcattaattctgccttccagaggtgggaatgacttggctttaaacagtgatttgtgtgagaattcttcaaatcccataaggtagaaggcatggtggagtggaggagaaatcttggctcatatctgcctcttccattgaccagctgtgtgaccttgggcctgttacttttaacctacctgaccctccatttcctcatttatcagaagtgtctaactgtacacaagttaaactgtaaggattacatgaggtagtagtcaatcctggtgtttctctgtatcttctcacttctcactggtgttggaaatatgatcttgcgaccctagatggcagccactctggggcagaagagacagtgaccaccttttgaagagctcaaaggagaatattgccccacagggcttagtgggtcccccaggctgaggctggggaggagggccacctttgcctacagcaagtggcatatcattgttctaggggttctcttgacggcagaactttgcctctagctcattttccacagcctagattttccaatcttgccaatccagttgacttctgtcttctcatttccaagccattgttctctctctttcactatctacatggattatccttcattcaaactgctttgtcccggccgggtgcggtggctcatgcctgtagtcctagcactttgggaggccgaggcgggtggatcacgaggtcaggagatcgagaccatcctggctaacatggtgaaaccccgtctctactaaaattaaaaaaattagccgggcgtggtggcaggcgcctgtggtcccggctacttgggaggctgaggcgggagaatggcatgaacccgggaggtggagcttgcagtgggtggagatcgcgccactgcactccagcctgggcgacagagcgagactccgtctgaaaaaaaaaacaaaaaaactgctttgtcctgtaggaatcctgtgcgggttatgtgcacctccctcaatccttaccttgaagctgaggtttcccctcagctctcaagtactcagtttgcactgcaggtagtccctattttaacgaaagttatacggtccagctcagggaatcctgaaaagctgcccttgcttccatggtaatcaaaaggcagttctcatggaataaaagctacctgaagcctgagttgggacctttggctggggaaggtggttgaggacgttctctgattagatgcttggcatgaggtttgctactggaactgctagtgtagaatgtttcagccccctagagttgtccctgtgatgtggctacctcctttctctgggatttctcttaaagtctggggagcccctgcttctcatttcctggaatttatcttcccagtctccctttctggctgaaaatttctagtatcttacagaacagcggtgggatacactggagcacatcatattaccactaagtatgtctaataaatgatgtcctctgatttgacatttcctaaatgtgaagctcctgattttatacaattttgaaattagtaagcttgttagttttgtttgaaattctaggcattggatacacttaacatgagggctacatgtgcatcaacatactctggtttccttccctctgtatcttttttttttttgagatggagtctcactgtctcctaggctggagtgcagtggtgtgatcatggctcactgcagccccaaccttcagggctcaggtgatcctcccgcctcagccacccaagtggctgggaccgcaggtgcatgccaccatgcctggctaacttatttttatatattgtagagacggagtctccctatgttgcctaggctgaccttgagctcttgggctcaggtgatcctcccgccttggcctcccaaagtgttgggattataggcgtgagccactgtgtccagccttttcctctgtatcttgtatccattccccagagcgatactgtgtatccttgaacagacggtttcttgaagtcagagtctatctcctctgtcacttctcccccttcattatctaagactgaggttgtggtttatatgcttagagttgaaagcatggggtccaacgtgttctgtactctgtagttccccagactctccagggaaactacttagctctcaggtggttcttttctgtttttctcagagcaagttatctaataactgaagaggactctgccctttggcctgttcctgactttctaactccttttgctggaggaaggggaggttgaggggggtgccctgtggtgtgaaagccccacttgccctctcctctatactttcttccaatgcagacgggagaaagtatcataaatgtagtgactgtgggtcaggggagctctgagaggccagcacaggaaaccagaaacaaaatgagtcagttcgtaggtggcgatcagaggcaccctgctgagggtgcaaggccacaggtgatgcctcctcagtaggcccaggagcatcaaaacgggaacagtccctttcagccttcaggagcctcccaaatgtcacttagtgatgtcccattcacctgcttaaaggccctgcatcctgccaggtagttggtttgtccatagcatcctgagctctgcttgggtgagccagacaaaaagaatgattcctggccagagtagtgataccagggcccagacagaggcagagagtccggatagaagatcctgtaagctggggtagggagccgaggaggccatggagccaggggaatcattgaagtgagggacaatttctggaggagggaaactgagtaaggaaggcctggccaaggaccaagaaggggacagtatcctgatctatgaaagaagactcaagtggggattgacagagccagattgggtggagtccaagctttgggcaggtgagtgtccaggagatgagggctgagaatgggccttcagagcccagccagaaggggaaagcacaaagctccaccctccttcttcacatccctccatgctgctcaaatcccaggtcttcaggcaccatggaggacaaacgcaacatccagatcatcgagtgggaacacctggacaagaagaagttctacgtgtttggtgtggcaatgacaatgatgatccgtgtcagtgtctacccattcaccctcatccgcacccggttgcaagttcagaaggggaagagcctctaccatgggaccttcgatgccttcatcaagatcctgcgagcagatggtatcactggcctctaccgagggttcctggtcaataccttcaccctcatctctggccagtgttatgtcaccacttatgagctcacccggaagtttgtagctgactacagccagagtaacacagtcaaatcactggtggctggtggctcagcctcccttgtggcccagagcatcacagtgcccattgatgtagtctcccagcacctgatgatgcaacgcaagggtgagaaaatgggccgctttcaggtgcgggggaacccagagggacaaggggtagttgcctttggccaaaccaaggacatcatcaggcagatcctgcaggctgatggacttcgcggcttctatcgaggctatgtggcttcactgcttacctatatcccaaacagtgctgtctggtggcccttctatcacttctatgcagagcagctctcctacctgtgtcctaaggagtgccctcacattgtctttcaagctgtctcggggcccctggctgcagccactgcctccatcctcaccaatcccatggatgtcatacgaacccgtgtgcaggttgagggcaagaactccatcatcctgaccttcagacagctgatggcagaagaagggccttggggcctcatgaagggcctctcggccagaatcatctcagccacaccttccaccattgtcattgtggtgggctatgagagcctcaagaaactcagcctccgacctgagctggtggactcgagacactggtaaccagtggtggggagagaagcctgctgttttccacactaccgtgggtcaggggcagagtggagaggacagcaccctctccaggtgctcccaccacacacccagccctgccctgggccaagtggcctatctgggatagggatagagactttgaactgctcttgctgaagaggctccacgcctggatcccttgcccccactatttaaaattctcttctgagccgggctccctcactcagtccctgtatttgatactggcctaaagaccccaccccccaccctgccagcccttcttctggcttccccttccatctgtgtccctgagaccctgagaagagctgtacatagagcttgcttactaccactggttcttcctcttgggctttcagcccagactccaagcagctgctatcaaccctctctcccttcatctcttagccttgcttatttttattttgggaccgagctgcccactagatgactctgcttttccctgcatttggggctaaggtgccaggtacttatttgcacagggagcaggagcagcaaaaaatctctggttctccagagcactcgtcctctctttggaggggttattaggttgggagaaatgttgatacttttgttttgtgtgtgtgtgtgtgtgtgtgtgtgtgtgtgtgtgtgtgtgtgttttaacatctgtgaaccaggctattagtcctgctaaagcgccaatcctgctgtcagagctcacccccttcctaagacaggtagaaaaatgtaatgtagctttttccacaagccagttccctgtcccttcagtctcaggagccctaggagagtctaagctggggcatcccctggcccagaggactcccgtggtgggcacagttctaagtggatcaggctgtcttgggtgcactggacttggagcactaccttgagaagtcaggttgagaaagtagttgatctagaaggcaacaagtgggcatgtgttccccagcacattacccaggccagcagagccaaacctaggagagggcagtgggtagattctctgccccaggcagccatgacatacacataaataccccaatcactcagacttacggcaacaagtgttgtctcactatggtgatctctaagatccacatcactggatgcgtagtcatcccagtcatggtaccctgtggaggaatgctggaagaacataaagagcagttcagaaagtcacccaataccaggaccactgcatttaccagcctgatactgccaagattatctgatgctctcctcaggagctaggagaggagtgctccttcctccctaccgctactctccccaagcctgtgttgcaggtagagaggtgcagcaaatagagaaggcatgtcaaaccctgcatttctacctgagagtgtgacctggatgatcctccaaaccctattggtcccaccccctgggaaaggccatggtgccagtttgaaaggtgctagctacctgaagccttgatatttcttcatggctgccgcacattcttccaccttggccagaacaggttctgaaaaccgcttctctaccttcaccaccaccactgcccatcttgatctctttgagggttttcccatttcacttgatcttatttttgtttatcccttcctgcactttgtcaagagagtcctccagtttctatccaggaatgttcacatccaaagggttggacccacggatcattctgaatcttcctgcccctcctcactgcttaaccctgagaaccacaaatataatggaagcagttccccccaccctcaccccatctctttaagctcatcctagcaagacctctagagaccctagagactcgactttagccttccccgccatggcacagtggggaaggtgtcaatggggagtgtcacggacaggaggtaggatcctgccgctcgcgtcttagtgtttctccctcaagactttccttctgttttgttgtcttgtgcagtattttacagcccctcttgtgtttttctttatttctcgtacacacacgcagttttaagggtgatgtgtgtataattaaaaggacccttggcccatactttcctaattctttagggactgggattgggtttgactgaaatatgttttggtggggatgggacggtggacttccattctccctaaactggagttttggtcggtaatcaaaactaaaagaaacctctgggagactggaaacctgattggagcactgaggaacaagggaatgaaaaggcagactctctgaacgtttgatgaaatggactcttgtgaaaattaacagtgaatattcactgttgcactgtacgaagtctctgaaatgtaattaaaagtttttattgagcccccg

SEQ ID NO: 366 - protein, 368 aa, Homo sapiens
QSQIGWSPSFGQVSVQEMRAENGPSEPSQKGKAQSSTLLLHIPPCCSNPRSSGTMEDKRNIQIIEWEHLDKKKFYVFGVAMTMMIRVSVYPFTLIRTRLQVQKGKSLYHGTFDAFIKILRADGITGLYRGFLVNTFTLISGQCYVTTYELTRKFVADYSQSNTVKSLVAGGSASLVAQSITVPIDVVSQHLMMQRKGEKMGRFQVRGNPEGQGVVAFGQTKDIIRQILQADGLRGFYRGYVASLLTYIPNSAVWWPFYHFYAEQLSYLCPKECPHIVFQAVSGPLAAATASILTNPMDVIRTRVQVEGKNSIILTFRQLMAEEGPWGLMKGLSARIISATPSTIVIVVGYESLKKLSLRPELVDSRHW

SEQ ID NO: 367 - DNA, 6961 bp, Homo sapiens
gacgccttggacgcggttcaggaatccgccgccgctagccggctcgggcctgagcggggagggcgccaggcaggacctctcgcaggctcgctgcgcaggacggcgcccgcctggcgccgcttcccttccagcgtgccgaccggccccgcagcgcctccatccctccggcccgccccggagaagacgcacagctcgggccgcgcgggcgccggggccgcggaaccgcttctgccgggatcttccaggaggaaagcgaagttgcgagcggatgctgcccgcgccggaccccagccgcggagggtcggggccgccggtggagtctcggcggccggggacaagggtgtcccccacctgaagacggcaagctgggtcctgagtgatgcccctcagctgagtgtccaaggctggcccgaggagcccccacggccccacctttccccatggagaaaggactcactttgccccaggactgccgggactttgtgcacagcctgaagatgagaagcaaatacgcccttttcttggtttttgtggtgatagtttttgtcttcatcgaaaaggaaaataaaatcatatcaagggtctcagacaagctgaagcagattccccaagctctagcagatgccaacagcaccgacccagccctgatcttagctgagaacgcatctctcttgtccctgagcgagctcgattcagccttctcccagcttcagagccgtctccgcaacctcagcttgcagctgggcgtggagccagccatggaggccgcaggggaggaagaggaagagcagagaaaggaggaggagccgcccagaccggccgtggcggggccccggcgccacgtgctgctcatggccaccacgcgcaccggctcctcgttcgtgggcgagttcttcaaccagcagggcaacatcttctacctcttcgagccgctgtggcacatcgagcgcacagtgtccttcgagccggggggcgccaacgccgcgggctcggccctggtgtaccgcgacgtgctcaagcagctcttcctgtgcgacctgtacgtgctggagcacttcatcacgccgctgcccgaggaccacctgactcagttcatgttccgccggggctccagccgctccctgtgcgaggaccccgtctgtacgcccttcgtcaagaaggtcttcgagaagtaccactgcaagaaccgccgctgcggccccctcaacgtgacgctggccgcagaggcctgccgccgcaaggagcacatggccctcaaggcggtgcgcatccggcagctggagttcctgcagccgctggccgaggacccccgcctggacctgcgcgtcatccagctggtgcgcgacccccgggccgtgctggcctcgcgcatggtggccttcgccggcaagtataagacctggaagaagtggctggacgacgagggccaggacggcctgagggaagaggaggtgcagcggctgcggggcaactgcgagagcatccgcctgtccgcggagctggggctgcggcagcccgcctggctgcggggccgctacatgctggtgcgctacgaggacgtggcacgcgggccgctgcagaaggcccgcgagatgtaccgcttcgccggcatccccctgaccccgcaggtggaagactggatccaaaagaacacgcaggcggcccacgacggcagcggcatctactccacgcagaagaactcctcggagcagttcgagaagtggcgcttcagcatgcccttcaagctggcccaggtggtgcaggccgcctgcggccctgccatgcgcctcttcggctacaaactggcgcgggacgccgccgccctcaccaaccgctcagtcagcctgctggaggagaggggcaccttctgggtcacgtaggggggccggggccccgtatgcccctcctcgtgaaaggcctgccccgtctttctgccgcagccctcgcagagggcgggtgcacagcgccatgagcgggcagcgcctcctgtagcagtagggcccccagccagcgctccagccaaagcggcggccccagggttaattgcggagaacaggacagtgcccggtccccttgagggccatcacacccagacccaacgggttgcagcctcctgagcaggcctaggcaggcccgggcctgttggcaagcttcgatctcacacacacagaaacatacattcgtgcctggagaccctgcaggccagagtccaaatatttaacaatcagaaggggcaaggctctgaccagtgacagtcagacctcctgctttatttggtgttaacgtttcttgtctggatggtgaagtctggaatctgggtgggtccttggaggaggggctaggacagccgtgggtgtcaaaggtggcatttgaggctcgtttgaggtgacagtggctgtttaccaactagtacagagcgattcagcgttttcatgaatgggttggctgtgctggttactgatgaatatgggccccttatagagctgcaaaacacacacatgcgtatagacatacatacatgtacaccatacatagacaagcatcataaaggcacaagtgcacacacatctatgcagacaagcttcctcgctgcttatgcccacagggtttttctgtatgacacacctcagaggagcctgtgcttaacatttgtaggattatttcgagggcagggcaggggaaagaaacgcgttaaagggccatgacatgacacagttccctggccgggtttggactgaacagtggattcagaactgcagcgttcaaagcccctgcccgccttagattctcatggctacctcctctgacccatccacatccttgcggctggcaggcaggatgttttgaaatggtgcagccaaaggccccgtctagcttggctggctcccgaacatgtccatatttgaaggctgcctcaggcctggcaggcagaagcagctgtggtccctggaggcaaaaggcagctcacggggccttccatttccagccaggcctcatctggggtagggccaagaggaaagtacagagtgcccgtgggggagaagtcccaccaggatgccccccctcccctgagaagcccgccttcttccctcgtggacaggagtcagccagttggttgctgtggttacagccagtgcctgaattcctccttagggccctgggaagagtattgcttaacgcaggatgtgctgggtgttttgtttcgggcttttatttatggcttggtgtctttcttgtttcatggctgtgtttttgcttttgtttctgtaggagcgcctcttccaagcagtggaggcctgagggcttgagggaggctggggaaaaccagcagggagcacttggctcctggcagagggagaggacaggaggaggagccttccccaggaggaacgaggagaggtggccacgtggcaggccacagtgccctatgggcttttctgtttgaaccccatgtgggatgaatctcaaagccaccagcgttcttgcctagtgtccagagcagcagagatttgcagccctcgcccctccctgagaagaagctggatttgaaaatccctcacaggccctaacatgtttcctgggtgggcaggggcctcatgacaagcgacaagtgtacccagagtagaaggccttccccactcccacctcaaacccaggagcagaactcagtatccagagcttacaaggagctgcaagggtttgccgagggctgcccagctctgcttctggtttcctggacaatttctctgtcagatacggcccattgtaaacccagagggctgcattttgggttgagtaatatggacaccatggaagtacaggatctgagtccaacattgccatgggggagggaagatgtgtcctggcaggaagccaccattggagaaggtgaggccagtaaccatctcatgggattcgctataatcagcctatttgagctgctgggtctctgtcactgtggactccagtcattcaaggaggtctccactcttgggttttttttattttcttttcttttgctattttgcctgaacaccccaacactcttggttttagagtccaagaataagttgtgcagaaacatggttctaatttggagttcaaaggaacaccagctctgaaaacatgaccgtggggccaggatgtttctggcaggcccagaagtgctggccgttcttccccagcctccccactgctccctcctctgttccccatgtggaggtcgggggggctgggactggggagggggcagccacctccatccaaggctcttcctaggggccctgctaatgtggacagcagactttatccctccttcttactctgggccaagacctcccactccgccctctgaggatggtaccaagaatgggcctttgggacttctcaggacattgacaatgtgcacactgcaggttgacttaatttatttattttttgaaaagaagagacagaaaataccttattatctgcagggactcaaagctgtacccaaatcaagaaagacaaaataacaatagaaaccattcacacactccgttcatgcatggacaccagaagacgattcagaacacaagaggagaatgagctggagcgccagcaccacgatggccccaggacgttgtttaagatctgagatcccttggtttctctcttgttgatctgagatgctacatcagggcccttgctgctgtattacctctgcccgggtgtttgagacaggtcacaagcgcgtggatgtttcctggaagtgtattcccctggggctcagcgatgctctgggaacccttggggtttggggaaggacagtgtggtgtgactattggcttgaaacgttatggatatggttggagtcacccatgtggatatgattttcagcttggagctgggatggagaagatggaagcactggtggccgggcctctttttccagcgaggccagccctggcttctcctctgttccagcttgtctgccagaagccttcccctgcaaggtgcccacctgcccggagacagagggagcagctgaggcctctctccactggccgccagcctccctagcacaaggggaccattcagcaatgagtgtttactcatgttctttcttgttgatgagttctgcggcccagcatatagaaatggctcagaacgttccaggccttggtgagacacagcagcgtccaatgctcacaggctgtccccactctgcctgttcccatcttcccctcgggacctgtttataaattgaggaatggatgagggccctggagggtccttgggagtagttagtggagggcaggattctcaggtccccatagagagggaaagagaagaccagatgtgcatagaagccaatctctgtcacatacaccgcaggtggtcaccgagttattttccaaaagctgaggaacataaagcaaatttaggcttttgtccttctgcaatacatgcacttgaaaataaacagaaaagagatgtttaataacaagtttacttccggtctgctagcaccctcagcctgggagctactgccagaggctggcgtagtggggcagctgctgaccaaaccccacagaacagagggcaccaggcatcacacgacatctttccctcccatctctgccatctgtctgtctggcaatggaaggagcttcagcaggagatccttcccagaaggttgattcttggcctgggtggtagaggagatatcctgaccctaaagtcttccagccccgggtcatcctctcctatactagggcctattgaccgtagaggccaggtgcggtggctcatacctgtaatcccagcatttggggaggccaaggtgggaggattgcttgagcccaagagttggagaccagcctgggcaacatggtgagaccaattgactgtagggcttgtcccttgctaagacaggagcagaagactggatggctgtgtcctcaaggcagtcccctcccatccccattcccaaagtcagaaagcgaagccagatctcaagggctgatacctgaggcaaggagagctaaggggagagaaattggggctgagtggaagcagatgcctgcacaagccaagtgtgtcttattgatctgtacaagctgatagaaggaccatctgctgaaatccagggctcctgagttggtgggtttgcttgtgaagcttctaggacaaggcgcagccagatggaagggagagggtccagggcttcctaaatgcagccgcatcacctgtcaactcgctgcagtttcagagacagtggaagctgctctttacctcaaaagcacaaagcagaattggcaacttcacatgtctcgagagctccaagatcctttggtctcgtgtccttcggcaccccgtaactggactggggacaaatttgttacgtgtttccaaggctacagacatggtgccatcctcacaggcctagctcatgtcatggatcaggtgctttgctggggggatacaatgacccatgtggtctgcgtcttctgccattggcttgaactgggcaccccctgaagtctccatctcagctgtatattctagtccaaattttcctggctcccctgctccctcccaggtcctgcacactgtctttttgccaacacctcagccctgtttgctatttcatgtctgcatggtacgagacaccccttcacagcatacactgccatggtatgtacatatgcatccacgtgtgtgtatgtgtagcatgtagctcattctgctcagcctctggcgccgttccacattgctcccagccccattgctgtcactgtcgtcccagatgtccttgccatggccacagacaatctgccgtctcctggaaacgctggggctgcccttcagagagctggcagccccagcagtcagggcctgctttgcagaatagaatgtgaacccaactcctgatggcctacttgacttatttaattaaagatgaaatcatgcaatgagc

SEQ ID NO: 368 - protein, 479 aa, Homo sapiens
MEKGLTLPQDCRDFVHSLKMRSKYALFLVFVVIVFVFIEKENKIISRVSDKLKQIPQALADANSTDPALILAENASLLSLSELDSAFSQLQSRLRNLSLQLGVEPAMEAAGEEEEEQRKEEEPPRPAVAGPRRHVLLMATTRTGSSFVGEFFNQQGNIFYLFEPLWHIERTVSFEPGGANAAGSALVYRDVLKQLFLCDLYVLEHFITPLPEDHLTQFMFRRGSSRSLCEDPVCTPFVKKVFEKYHCKNRRCGPLNVTLAAEACRRKEHMALKAVRIRQLEFLQPLAEDPRLDLRVIQLVRDPRAVLASRMVAFAGKYKTWKKWLDDEGQDGLREEEVQRLRGNCESIRLSAELGLRQPAWLRGRYMLVRYEDVARGPLQKAREMYPFAGIPLTPQVEDWIQKNTQAAHDGSGIYSTQKNSSEQFEKWRFSMPFKLAQVVQAPCGPAMRLFGYKLARDAAALTNRSVSLLEERGTFWVT

SEQ ID NO: 369 - DNA, 12793 bp, Homo sapiens
atgatttacaggaagaccatgtactcagctgcagcttctaaatccagaacgatttgcacgtcttatcaaggaagtaatgaatacattctggcctggcagagaattgattgttcaatggtatccatttgatgaaaacagaaatcacccatctgtttcatggcttaagatggtttggaaaaatctttatatacatttttcagaggatttgactttatttgatgagatgccacttatccccagaactatactagaggaaggtcagacatgtgtggaactcattagactcaggattccatcgttagtcattttagacgatgaatctgaagcacagcttccagaatttttagcagacattgtacaaaaacttggagggtttgtccttaaaaaattagatgcatctatacaacatccgcttattaaaaaatatattcattcaccattaccaagtgctgttttgcagataatggagaagatgccattgcagaaattgtgtaatcaaataacttcgctacttccaacacacaaagatgccctgaggaagttcttggctagtttaaccgatagcagtgagaaagagaaaagaattattcaagaattggcaatattcaagcgcattaaccattcttctgatcagggaatttcctcttatacaaaattgaaaggttgtaaagtcttacaccatactgccaaactcccagcagatctgcgactttctatttcagtaatagacagtagtgatgaagctactattcgtctggcaaacatgttgaaaatagaacagttaaagaccactagctgcttaaagcttgttttaaaagatattgaaaatgcattttattcacatgaagaggtaacacagcttatgttatgggtccttgagaatctatcttctcttaaaaatgagaatccaaatgtgcttgagtggttaacaccattaaaattcatccagatatcacaggaacagatggtatcagctggtgaactctttgaccctgatatagaagtactaaaggatctcttttgtaatgaagaaggaacctatttcccaccctcagtttttacctcaccagatattcttcactccttaagacagattggtttaaaaaacgaagccagtctcaaagaaaaggatgttgtgcaagtggcaaaaaaaattgaagccttacaggtcggtgcttgtcctgatcaagatgttcttctgaagaaagccaaaaccctcttactggttttaaataagaatcacacactgttgcaatcatctgaaggaaagatgacattgaagaaaataaaatgggttccagcctgcaaggaaaggcctccaaattatccaggctctttggtctggaaaggagatctctgtaatctctgtgcaccaccagatatgtgtgatgtaggccatgcaattctcattggctcctcacttcctcttgttgaaagtatccatgtaaacctggaaaaagcattagggatcttcacaaaacctagccttagtgctgtcttaaaacactttaaaattgttgttgattggtattcttcaaaaacctttagtgatgaagactactatcaattccagcatattttgcttgagatttacggattcatgcatgatcatctaaatgaagggaaagattcttttagagccttaaaatttccatgggtttggactggcaaaaagttttgtccacttgcccaggctgtgattaaaccaatccatgatcttgaccttcagccttatttgcataatgtacctaaaaccatggcaaaattccaccaactatttaaggtctgtggttcaatagaggagttgacatcagatcatatttccatggttattcagaagatatatctcaaaagtgaccaagatctcagtgaacaagaaagcaaacaaaatcttcatcttatgttgaatattatcagatggctgtatagcaatcagattccagcaagccccaacacaccagttcctatacatcatagcaaaaatccttctaaacttatcatgaagccaattcacgaatgctgttattgtgacattaaagttgatgaccttaatgacttacttgaagattctgtggaaccaatcattttggtgcatgaggacatacccatgaaaactgcagaatggctaaaagttccatgccttagtacaagactgataaatcctgaaaacatgggatttgagcagtcaggacaaagagagccacttactgtaagaattaaaaatattctggaagaatacccttcagtgtcagatatttttaaagaactacttcaaaacgctgatgatgcaaatgcaacagaatgcagtttcttgattgatatgagaagaaatatggacataagagagaatctcctagacccagggatggcagcttgtcatggacctgctttgtggtcattcaacaattctcaattctcagattcagattttgtgaacataactaggttaggagaatctttaaaaaggggagaagttgacaaagttggaaaatttggtcttggatttaattctgtgtaccatatcactgacattcccatcattatgagtcgggaattcatgataatgttcgatccaaacataaatcatatcagtaaacacattaaagacaaatccaatcctgggatcaaaattaattggagtaaacaacagaaaagacttagaaaatttcctaatcagttcaaaccatttatagatgtatttggctgtcagttacctttgactgtagaagcaccttacagctataatggaacccttttccgactgtcctttagaactcaacaggaagcaaaagtgagtgaagttagtagtacgtgctacaatacagcagatatttattctcttgtggatgaatttagtctctgtggacacaggcttatcattttcactcagagtgtaaagtcaatgtatttgaagtacttgaaaattgaggaaaccaaccccagtttagcacaagatacagtaataattaaaaaaaaatcctgctcttccaaagcattgaacacacctgtcttaagtgttttaaaagaggctgctaagctcatgaagacttgcagcagcagtaataaaaagcttcccagtgatgaaccaaagtcatcttgcattcttcagatcacagtggaagaatttcaccatgtgttcagaaggattgctgatttacagtcgccactttttagaggtccagatgatgacccagctgctctctttgaaatggctaagtctggccaatcaaaaaagccatcagatgagttgtcacagaaaacagtagagtgtaccacgtggcttctgtgtacttgcatggacacaggagaggctctgaagttttccctgagtgagagtggaagaagactaggactggttccatgtggggcagtaggagttcagctgtcagaaatccaggaccagaagtggacagtgaaaccacacattggagaggtgttttgctatttacctttacgaataaaaacaggcttgccagttcatatcaatgggtgctttgctgttacatcaaataggaaagaaatctggaaaacagatacaaaaggacgatggaataccacgttcatgagacatgttattgtgaaagcttacttacaggtactgagtgtcttacgggacctggccactagtggggagctaatggattatacttactatgcagtatggcccgatcctgatttagttcatgatgatttttctgtaatttgccaaggattttatgaagatatagctcatggaaaagggaaagaactgaccaaagtcttctctgatggatctacttgggtttccatgaagaacgtaagatttctagatgactctatacttaaaagaagagatgttggttcagcagccttcaagatatttttgaaatacctcaagaagactgggtccaaaaacctttgtgctgttgaacttccttcttcggtaaaattaggatttgaagaagctggctgcaaacagatactacttgaaaacacattttcagagaaacagtttttttctgaagtgttttttccaaatattcaagaaattgaagcagaacttagagatcctttaatgatctttgttctaaatgaaaaagttgatgagttctcgggagttcttcgtgttactccatgtattccttgttccttggaggggcatcctttggttttgccatcaagattgatccaccccgaaggacgagttgcaaagttatttgatattaaagatgggagattcccttatggttctactcaggattatctcaatcctattattttgattaaactagttcagttaggtatggcaaaagatgatattttatgggatgatatgctagaacgtgcagtgtcagtagctgaaattaataaaagtgatcatgttgctgcatgcctaagaagtagtatcttattgagtcttatcgatgagaaactaaaaataagggatcctagagcaaaggattttgctgcaaaatatcaaacaatccgcttccttccatttctgacaaaaccagcaggtttttctttggactggaaaggcaacagttttaagcctgaaaccatgtttgcagcaactgacctttatacagctgaacatcaagatatagtttgtcttttgcaaccaattctaaatgaaaattcccattcttttagaggttgtggttcagtgtcattggctgttaaagagtttttgggattactcaagaagccaacagttgatctggttataaaccaattgaaagaagtagcaaaatcagttgatgatggaattacactgtaccaggagaatatcaccaatgcttgctacaaataccttcatgaagccttgatgcaaaatgaaatcactaagatgtcaattattgataagttaaaaccctttagcttcattctagttgagaatgcatatgttgactcagaaaaggtttcttttcatttaaattttgaggcggcaccatacctttatcagttgcctaataagtataaaaataatttccgcgaactttttgaaaccgtgggtgtgaggcagtcatgcactgttgaagattttgctcttgttttggaatctattgatcaagaaagaggaacaaagcaaataacagaagagaattttcagctttgccgacgaataatcagtgaaggaatatggagtctcattagagaaaagaaacaagaattttgtgagaaaaattatggcaagatattattgccagatactaatcttatgcttctccctgctaaatcgttatgctacaatgattgcccttggataaaagtaaaggataccactgtaaaatattgtcatgctgacatacccagggaagtagcagtaaaactaggagcagtcccaaagcgacacaaagccttagaaagatatgcatccaatgtctgttttacaacacttggcacagaatttgggcagaaagaaaaattgaccagcagaattaagagcatccttaatgcatatccttctgaaaaggaaatgttgaaagagcttcttcaaaatgctgatgatgcaaaggcgacagaaatctgttttgtgtttgatcctagacagcatccagttgatagaatatttgatgataagtgggccccattgcaagggccagcactttgtgtgtacaacaaccagccatttacagaagatgatgttagaggaattcagaatcttggaaaaggcacgaaagagggaaatccttataaaactggacagtatggaataggattcaattctgtgtatcatatcacagactgcccatcttttatttctggcaatgacatcctgtgtatttttgatcctcatgccagatatgcaccaggggccacatccattagtcccggacgcatgtttagagatttggatgcagattttaggacacagttctcagatgttctggatctttatctgggaacccattttaaactggataattgcacaatgttcagatttcctcttcgtaatgcagaaatggcaaaagtttcggaaatttcgtctgttccagcatcagacagaatggtccagaatcttttggacaaactgcgctcagatggggcagaacttctaatgtttcttaatcacatggaaaaaatttctatttgtgaaatagataagagtactggagctctaaatgtgctgtattcagtaaagggcaaaatcacagatggagacagattgaaaaggaaacaatttcatgcatctgtaattgatagtgttactaaaaagaggcagctcaaagacataccagttcaacaaataacctatactatggatactgaggactctgaaggaaatcttactacgtggctaatttgtaatagatcaggcttttcaagtatggagaaagtatctaaaagtgtcatatcagctcacaagaaccaagatattactcttttcccacgtggtggagtagctgcctgcattactcacaactataaaaaaccccatagggccttctgttttttgcctctttctttggagactgggctgccatttcatgtgaatggccactttgcactggattcagccagaaggaacctgtggcgtgatgataatggagttggtgttcgaagtgactggaataacagtttaatgacagcattaatagctcctgcatatgttgaattgctaatacagttaaaaaaacggtatttccctggttctgatccaacattatcagtgttacagaacacccctattcatgttgtaaaggacactttaaagaagtttttatcgtttttcccagttaaccgtcttgatctacagccagatttatattgtctagtgaaagcactttacaattgcattcacgaagacatgaaacgtcttttacctgttgtgcgggctccaaatattgatggctctgacttgcactctgcagttataattacttggatcaatatgtctacttctaataaaactagaccattttttgacaatttactacaggatgaattacaacaccttaaaaatgcagattataatatcaccacacgcaaaacagtagcagagaatgtctataggctgaaacatctccttttagaaattggtttcaacttggtttataactgtgatgaaactgctaatctttaccactgtcttatagatgcagatattcctgttagttatgtgacccctgctgatatcagatcttttttaatgacattttcctctcctgacactaattgccatattgggaagctgccttgtcgtctgcagcagactaatctaaaactttttcatagtttaaaacttttagttgattattgttttaaagatgcagaagaaaatgagattgaagttgagggattgccccttctcatcacactggacagtgttttgcaaacttttgatgcaaaacgacccaagtttctaacaacatatcatgaattgattccatcccgcaaagacttgtttatgaatacattatatttgaaatatagtaatattttattgaactgtaaagttgcaaaagtgtttgacatttccagctttgctgatttgttatcctctgtgttgcctcgagaatataagaccaaaagttgcacaaagtggaaagacaattttgcaagtgagtcttggcttaagaatgcatggcattttattagtgaatctgtaagtgtgaaagaagatcaggaagaaacaaaaccaacatttgacattgttgttgatactctaaaagactgggcattgcttccaggaacaaagtttactgtttcagccaaccagcttgtggttcctgaaggagatgttctgcttcctctcagccttatgcacattgcagtttttccaaatgcccagagtgataaagtttttcatgctctaatgaaagccggctgtattcagcttgctttgaacaaaatctgttccaaagacagtgcatttgttcctttgttgtcatgtcacacagcaaatatagagagccccacaagcatcttgaaggctctacattatatggtccaaacttcaacatttagagcagaaaaattagtagaaaatgattttgaggcacttttgatgtatttcaactgcaatttgaatcatttgatgtcccaagatgatataaaaattctaaagtcacttccgtgctataaatccatcagtggccgctatgtaagcattggaaaatttggaacatgctacgtacttacaaaaagtatcccttcagctgaagtggagaaatggacacaatcatcatcatctgcatttcttgaagaaaaaatacacttaaaagaactatatgaggtgattggttgtgtacctgtagatgatcttgaggtatatttgaaacacctcttaccaaaaattgaaaatctctcttatgatgcaaaattagagcacttgatctaccttaagaatagattatcaagtgctgaggaattatcagagattaaggaacaactttttgaaaaactggaaagtttattgataatccatgatgctaacagtagactaaagcaagcaaagcatttctatgatagaactgtgagagtttttgaagttatgcttcctgaaaaattgtttattcctaatgatttctttaagaaattggaacaacttataaaacccaaaaatcatgttacatttatgacatcctgggtggaattcttaagaaatattggactaaaatacatactttctcagcagcagttgttacagtttgctaaggaaatcagtgtgagggctaatacagaaaactggtccaaagaaacattgcaaaatacagttgatatccttctgcatcatatattccaagaacgaatggatttgttatctggaaattttctgaaagaactatctttaataccattcttatgtcctgagcgggcccccgcggaattcattagatttcatcctcaatatcaagaggtaaatggaacacttcctcttataaagttcaatggagcacaggtaaatccaaaattcaagcaatgtgatgtactccagctgttatggacatcctgccctattcttccagagaaagctacacccttaagcattaaagaacaagaaggtagtgaccttggtccacaagaacagcttgaacaagttttaaatatgcttaatgttaacctggatcctcctcttgataaggtaatcaataactgcagaaacatatgcaacataacgacgttggatgaagaaatggtaaaaactagagcaaaagtcttaaggagcatatatgaattcctcagtgcagaaaaaagggaatttcgttttcagttgcgaggggttgcttttgtgatggtagaagatggttggaaacttctgaagcctgaggaggtagtcataaacctagaatatgaatctgattttaaaccttatttgtacaagctacctttagaacttggcacatttcaccagttgttcaaacacttaggtactgaagatattatttcaactaagcaatatgttgaagtgttgagccgcatatttaaaaattctgagggcaaacaattagatcctaatgaaatgcgtacagttaagagagtagtttctggtctgttcaggagtctacagaatgattcagtcaaggtgaggagtgatctcgagaatgtacgagaccttgcgctttacctcccaagccaggatggtagattggtaaagtcaagcatcttagtgtttgacgatgcgccacattataaaagtagaatccaggggaatattggtgtgcaaatgttagttgatctcagccagtgctacttagggaaagaccatggatttcacactaagttgataatgctctttcctcaaaaacttagacctcgattattgagcagtatacttgaagaacaattagatgaagagactcccaaagtttgtcagtttggagcgttgtgttctcttcaaggaagattgcagttactcttgtcttctgaacagttcattacaggactgattagaattatgaagcatgaaaatgataatgcttttctggccaatgaagaaaaagccataagactttgcaaagccctaagagaaggattgaaagtatcctgctttgaaaagcttcaaacaacattaagagttaaaggttttaatcctattccccacagcagaagtgaaacttttgcttttttgaagcgatttggtaatgcagtcatcttgctctacattcaacattcagacagtaaagacattaatttcctgttagcactggcaatgactcttaaatcagcaactgacaatttgatttctgacacttcatatttaattgctatgctaggatgcaatgatatttacaggattggtgagaaacttgacagtttaggagtgaaatatgactcttcggagccatcaaaactggaacttccaatgcctggcacaccaattcctgctgaaattcattacactctgcttatggacccaatgaatgttttttacccgggagaatatgttgggtaccttgttgatgctgaaggtggtgatatctatggatcataccagccaacatacacatatgcaattattgtacaagaagttgaaagagaagatgctgacaattctagttttctaggaaagatatatcagatagatattggttatagtgaatataaaatagttagctctcttgatctgtataagttttcaagacctgaggaaagctctcaaagcagggacagtgctccttctacaccaaccagccccactgagttcctcacccctggcctgagaagcattcctcctcttttctctggtagagagagccacaagacttcttccaaacatcagtcccccaaaaagcttaaggttaattctttaccagaaatcttaaaagaagtgacatctgtggtggagcaagcatggaagcttccagaatcggaacgaaaaaagattattaggcggttgtatttgaaatggcatcctgacaaaaatccagagaaccatgacattgccaatgaagtttttaaacatttgcagaatgaaatcaacagattagaaaaacaggcttttctagatcaaaatgcagacagggcctccagacgaacattttcaacctcagcatcccgatttcagtcagacaaatactcatttcagagattctatacttcatggaatcaagaagcaacgagccataaatctgaaagacagcaacagaacaaagaaaaatgccccccttcagccggacagacttactctcaaaggttctttgttcctcccactttcaagtcggttggcaatccagtggaagcacgcagatggctaagacaagccagagcaaacttctcagctgccaggaatgaccttcataaaaatgccaatgagtgggtgtgctttaaatgttacctttctaccaagttagctttgattgcagctgactatgctgtgaggggaaagtctgataaagatgtaaaaccaactgcacttgctcagaaaatagaggaatatagtcagcaacttgaaggactgacaaatgatgttcacacattggaagcttatggtgtagacagtttaaaaacaagataccctgatttgcttccctttcctcagatcccaaatgacaggttcacttctgaggttgctatgagggtgatggaatgtactgcctgtatcataataaaacttgaaaattttatgcaacaaaaagtgtgaagatatttaacgaaaaaaaaggtagatcttgaatgtgttgtagcacgaataaattgctgtacttcattaagcttcattgccaattagctaggaattgttaagcacattgcagattgttcttggagaattctggagttgttatgaacatgaataccaacggaaaaccttaactgaatctaaaagaaaactattttgaagatggtggtgagctgcaaaatagctggatggatttgaatgattgggatgatacatcattgaactgcactttatataaccaaagcttagcagtttgttagataagagtctatgtatgtctctggttaggatgaagttaattttatgtttttaacatggtatttttgaaggagctaatgaaacactggacatataattggtttaaacataaggggaattaagtctttgtagtctgtcatttttttaagtggatcctcttggatgcgttattttctcatcagctggctctgatcatgaatttgttgtaattttatgttgtactcagtgcatttaagaaatggtagagtattttaatcctattacttgactaagagtgtgaaggtagtactttttagagtgcactgagtgcactttacatctttatttaaatttttttttaacatcttatgtttacaggcttcctgtttgatgaagatagcaacggaaaactcaaaatggtggcagttcttattaccagttgttagtattgtttctggaaactgcttgccaagacaacatttattaactgttagaacacttgctttatgtttgtgtgtacatattttccacaaatgttataatttatatagtgtggttgaacaggatgcaatcttttgttgtctaaaggtgctgcagttaaaaaaaaaacaaccttttctttcaatatggcatgtagtggagtttttttaactttaaaaacatcaaaaattgttaaaatcattgtgttatctagtagtttataattatcggcttatatttccccatgaatgatcagaactgacatttaattcatgtttgtctcgccatgcttctttactttaacatatttcttttgcagaatgtaaaaggtaatgataattagtttatataagtgtactggctgtaaatgatgctaaatatactttatgcaattaagggcttacagaacatgttgaaactttttttacttttattgggaataaggaatgtttgcacctccacattttattgctt

SEQ ID NO: 370 - protein, 3829 aa, Homo sapiens
MNTFWPGRELIVQWYPFDENRNHPSVSWLKMVWKNLYIHFSEDLTLFDEMPLIPRTILEEGQTCVELIRLRIPSLVILDDESEAQLPEFLADIVQKLGGFVLKKLDASIQHPLIKKYIHSPLPSAVLQIMEKMPLQKLCNQITSLLPTHKDALRKFLASLTDSSEKEKRIIQELAIFKRINHSSDQGISSYTKLKGCKVLHHTAKLPADLRLSISVIDSSDEATIRLANMLKIEQLKTTSCLKLVLKDIENAFYSHEEVTQLMLWVLENLSSLKNENPNVLEWLTPLKFIQISQEQMVSAGELFDPDIEVLKDLFCNEEGTYFPPSVFTSPDILHSLRQIGLKNEASLKEKDVVQVAKKIEALQVGACPDQDVLLKKAKTLLLVLNKNHTLLQSSEGKMTLKKIKWVPACKERPPNYPGSLVWKGDLCNLCAPPDMCDVGHAILIGSSLPLVESIHVNLEKALGIFTKPSLSAVLKHFKIVVDWYSSKTFSDEDYYQFQHILLEIYGFMHDHLNEGKDSFRALKFPWVWTGKKFCPLAQAVIKPIHDLDLQPYLHNVPKTMAKFHQLFKVCGSIEELTSDHISMVIQKIYLKSDQDLSEQESKQNLHLMLNIIRWLYSNQIPASPNTPVPIHHSKNPSKLIMKPIHECCYCDIKVDDLNDLLEDSVEPIILVHEDIPMKTAEWLKVPCLSTRLINPENMGFEQSGQREPLTVRIKNILEEYPSVSDIFKELLQNADDANATECSFLIDMRRNMDIRENLLDPGMAACHGPALWSFNNSQFSDSDFVNITRLGESLKRGEVDKVGKFGLGFNSVYHITDIPIIMSREFMIMFDPNINHISKHIKDKSNPGIKINWSKQQKRLRKFPNQFKPFIDVFGCQLPLTVEAPYSYNGTLFRLSFRTQQEAKVSEVSSTCYNTADIYSLVDEFSLCGHRLIIFTQSVKSMYLKYLKIEETNPSLAQDTVIIKKKSCSSKALNTPVLSVLKEAAKLMKTCSSSNKKLPSDEPKSSCILQITVEEFHHVFRRIADLQSPLFRGPDDDPAALFEMAKSGQSKKPSDELSQKTVECTTWLLCTCMDTGEALKFSLSESGRRLGLVPCGAVGVQLSEIQDQKWTVKPHIGEVFCYLPLRIKTGLPVHINGCFAVTSNRKEIWKTDTKGRWNTTFMRHVIVKAYLQVLSVLRDLATSGELMDYTYYAVWPDPDLVHDDFSVICQGFYEDIAHGKGKELTKVFSDGSTWVSMKNVRFLDDSILKRRDVGSAAFKIFLKYLKKTGSKNLCAVELPSSVKLGFEEAGCKQILLENTFSEKQFFSEVFFPNIQEIEAELRDPLMIFVLNEKVDEFSGVLRVTPCIPCSLEGHPLVLPSRLIHPEGRVAKLFDIKDGRFPYGSTQDYLNPIILIKLVQLGMAKDDILWDDMLERAVSVAEINKSDHVAACLRSSILLSLIDEKLKIRDPRAKDFAAKYQTIRFLPFLTKPAGFSLDWKGNSFKPETMFAATDLYTAEHQDIVCLLQPILNENSHSFRGCGSVSLAVKEFLGLLKKPTVDLVINQLKEVAKSVDDGITLYQENITNACYKYLHEALMQNEITKMSIIDKLKPFSFILVENAYVDSEKVSFHLNFEAAPYLYQLPNKYKNNFRELFETVGVRQSCTVEDFALVLESIDQERGTKQITEENFQLCRRIISEGIWSLIREKKQEFCEKNYGKILLPDTNLMLLPAKSLCYNDCPWIKVKDTTVKYCHADIPREVAVKLGAVPKRHKALERYASNVCFTTLGTEFGQKEKLTSRIKSILNAYPSEKEMLKELLQNADDAKATEICFVFDPRQHPVDRIFDDKWAPLQGPALCVYNNQPFTEDDVRGIQNLGKGTKEGNPYKTGQYGIGFNSVYHITDCPSFISGNDILCIFDPHARYAPGATSISPGRMFRDLDADFRTQFSDVLDLYLGTHFKLDNCTMFRFPLRNAEMAKVSEISSVPASDRMVQNLLDKLRSDGAELLMFLNHMEKISICEIDKSTGALNVLYSVKGKITDGDRLKRKQFHASVIDSVTKKRQLKDIPVQQITYTMDTEDSEGNLTTWLICNRSGFSSMEKVSKSVISAHKNQDITLFPRGGVAACITHNYKKPHRAFCFLPLSLETGLPFHVNGHFALDSARRNLWRDDNGVGVRSDWNNSLMTALIAPAYVELLIQLKKRYFPGSDPTLSVLQNTPIHVVKDTLKKFLSFFPVNRLDLQPDLYCLVKALYNCIHEDMKRLLPVVRAPNIDGSDLHSAVIITWINMSTSNKTRPFFDNLLQDELQHLKNADYNITTRKTVAENVYRLKHLLLEIGFNLVYNCDETANLYHCLIDADIPVSYVTPADIRSFLMTFSSPDTNCHIGKLPCRLQQTNLKLFHSLKLLVDYCFKDAEENEIEVEGLPLLITLDSVLQTFDAKRPKFLTTYHELIPSRKDLFMNTLYLKYSNILLNCKVAKVFDISSFADLLSSVLPREYKTKSCTKWKDNFASESWLKNAWHFISESVSVKEDQEETKPTFDIVVDTLKDWALLPGTKFTVSANQLVVPEGDVLLPLSLMHIAVFPNAQSDKVFHALMKAGCIQLALNKICSKDSAFVPLLSCHTANIESPTSILKALHYMVQTSTFRAEKLVENDFEALLMYFNCNLNHLMSQDDIKILKSLPCYKSISGRYVSIGKFGTCYVLTKSIPSAEVEKWTQSSSSAFLEEKIHLKELYEVIGCVPVDDLEVYLKHLLPKIENLSYDAKLEHLIYLKNRLSSAEELSEIKEQLFEKLESLLIIHDANSRLKQAKHFYDRTVRVFEVMLPEKLFIPNDFFKKLEQLIKPKNHVTFMTSWVEFLRNIGLKYILSQQQLLQFAKEISVRANTENWSKETLQNTVDILLHHIFQERMDLLSGNFLKELSLIPFLCPERAPAEFIRFHPQYQEVNGTLPLIKFNGAQVNPKFKQCDVLQLLWTSCPILPEKATPLSIKEQEGSDLGPQEQLEQVLNMLNVNLDPPLDKVINNCRNICNITTLDEEMVKTRAKVLRSIYEFLSAEKREFRFQLRGVAFVMVEDGWKLLKPEEVVINLEYESDFKPYLYKLPLELGTFHQLFKHLGTEDIISTKQYVEVLSRIFKNSEGKQLDPNEMRTVKRVVSGLFRSLQNDSVKVRSDLENVRDLALYLPSQDGRLVKSSILVFDDAPHYKSRIQGNIGVQMLVDLSQCYLGKDHGFHTKLIMLFPQKLRPRLLSSILEEQLDEETPKVCQFGALCSLQGRLQLLLSSEQFITGLIRIMKHENDNAFLANEEKAIRLCKALREGLKVSCFEKLQTTLRVKGFNPIPHSRSETFAFLKRFGNAVILLYIQHSDSKDINFLLALAMTLKSATDNLISDTSYLIAMLGCNDIYRIGEKLDSLGVKYDSSEPSKLELPMPGTPIPAEIHYTLLMDPMNVFYPGEYVGYLVDAEGGDIYGSYQPTYTYAIIVQEVEREDADNSSFLGKIYQIDIGYSEYKIVSSLDLYKFSRPEESSQSRDSAPSTPTSPTEFLTPGLRSIPPLFSGRESHKTSSKHQSPKKLKVNSLPEILKEVTSVVEQAWKLPESERKKIIRRLYLKWHPDKNPENHDIANEVFKHLQNEINRLEKQAFLDQNADRASRRTFSTSASRFQSDKYSFQRFYTSWNQEATSHKSERQQQNKEKCPPSAGQTYSQRFFVPPTFKSVGNPVEARRWLRQARANFSAARNDLHKNANEWVCFKCYLSTKLALIAADYAVRGKSDKDVKPTALAQKIEEYSQQLEGLTNDVHTLEAYGVDSLKTRYPDLLPFPQIPNDRFTSEVAMRVMECTACIIIKLENFMQQKV

SEQ ID NO: 371 - DNA, 9272 bp, Homo sapiens
gggctggaggggcgctgggctcggacctgccaaggccaccgcaggggggagcaagggacagaggcgggggtcctagctgacggcttttactgcctaggatgacgctgcggcttctggtggccgcgctctgcgccgggatcctggcagaggcgccccgagtgcgagcccagcacagggagagagtgacctgcacgcgcctttacgccgctgacattgtgttcttactggatggctcctcatccattggccgcagcaatttccgcgaggtccgcagctttctcgaagggctggtgctgcctttctctggagcagccagtgcacagggtgtgcgctttgccacagtgcagtacagcgatgacccacggacagagttcggcctggatgcacttggctctgggggtgatgtgatccgcgccatccgtgagcttagctacaaggggggcaacactcgcacaggggctgcaattctccatgtggctgaccatgtcttcctgccccagctggcccgacctggtgtccccaaggtctgcatcctgatcacagacgggaagtcccaggacctggtggacacagctgcccaaaggctgaaggggcagggggtcaagctatttgctgtggggatcaagaatgctgaccctgaggagctgaagcgagttgcctcacagccaacctccgacttcttcttcttcgtcaatgacttcagcatcttgaggacactactgcccctcgtttcccggagagtgtgcacgactgctggtggcgtgcctgtgacccgacctccggatgactcgacctctgctccacgagacctggtgctgtctgagccaagcagccaatccttgagagtacagtggacagcggccagtggccctgtgactggctacaaggtccagtacactcctctgacggggctgggacagccactgccgagtgagcggcaggaggtgaacgtcccagctggtgagaccagtgtgcggctgcggggtctccggccactgaccgagtaccaagtgactgtgattgccctctacgccaacagcatcggggaggctgtgagcgggacagctcggaccactgccctagaagggccggaactgaccatccagaataccacagcccacagcctcctggtggcctggcggagtgtgccaggtgccactggctaccgtgtgacatggcgggtcctcagtggtgggcccacacagcagcaggagctgggccctgggcagggttcagtgttgctgcgtgacttggagcctggcacggactatgaggtgaccgtgagcaccctatttggccgcagtgtggggcccgccacttccctgatggctcgcactgacgcttctgttgagcagaccctgcgcccggtcatcctgggccccacatccatcctcctttcctggaacttggtgcctgaggcccgtggctaccggttggaatggcggcgtgagactggcttggagccaccgcagaaggtggtactgccctctgatgtgacccgctaccagttggatgggctgcagccgggcactgagtaccgcctcacactctacactctgctggagggccacgaggtggccacccctgcaaccgtggttcccactggaccagagctgcctgtgagccctgtaacagacctgcaagccaccgagctgcccgggcagcgggtgcgagtgtcctggagcccagtccctggtgccacccagtaccgcatcattgtgcgcagcacccagggggttgagcggaccctggtgcttcctgggagtcagacagcattcgacttggatgacgttcaggctgggcttagctacactgtgcgggtgtctgctcgagtgggtccccgtgagggcagtgccagtgtcctcactgtccgccgggagccggaaactccacttgctgttccagggctgcgggttgtggtgtcagatgcaacgcgagtgagggtggcctggggacccgtccctggagccagtggatttcggattagctggagcacaggcagtggtccggagtccagccagacactgcccccagactctactgccacagacatcacagggctgcagcctggaaccacctaccaggtggctgtgtcggtactgcgaggcagagaggagggccctgctgcagtcatcgtggctcgaacggacccactgggcccagtgaggacggtccatgtgactcaggccagcagctcatctgtcaccattacctggaccagggttcctggcgccacaggatacagggtttcctggcactcagcccacggcccagagaaatcccagttggtttctggggaggccacggtggctgagctggatggactggagccagatactgagtatacggtgcatgtgagggcccatgtggctggcgtggatgggccccctgcctctgtggttgtgaggactgcccctgagcctgtgggtcgtgtgtcgaggctgcagatcctcaatgcttccagcgacgttctacggatcacctgggtaggggtcactggagccacagcttacagactggcctggggccggagtgaaggcggccccatgaggcaccagatactcccaggaaacacagactctgcagagatccggggtctcgaaggtggagtcagctactcagtgcgagtgactgcacttgtcggggaccgcgagggcacacctgtctccattgttgtcactacgccgcctgaggctccgccagccctggggacgcttcacgtggtgcagcgcggggagcactcgctgaggctgcgctgggagccggtgcccagagcgcagggcttccttctgcactggcaacctgagggtggccaggaacagtcccgggtcctggggcccgagctcagcagctatcacctggacgggctggagccagcgacacagtaccgcgtgaggctgagtgtcctagggccggctggagaagggccctctgcagaggtgactgcgcgcactgagtcacctcgtgttccaagcattgaactacgtgtggtggacacctcgatcgactcggtgactttggcctggactccagtgtccagggcatccagctacatcctatcctggcggccactcagaggccctggccaggaagtgcctgggtccccgcagacacttccagggatctcaagctcccagcgggtgacagggctagagcctggcgtctcttacatcttctccctgacgcctgtcctggatggtgtgcggggtcctgaggcatctgtcacacagacgccagtgtgcccccgtggcctggcggatgtggtgttcctaccacatgccactcaagacaatgctcaccgtgcggaggctacgaggagggtcctggagcgtctggtgttggcacttgggcctcttgggccacaggcagttcaggttggcctgctgtcttacagtcatcggccctccccactgttcccactgaatggctcccatgaccttggcattatcttgcaaaggatccgtgacatgccctacatggacccaagtgggaacaacctgggcacagccgtggtcacagctcacagatacatgttggcaccagatgctcctgggcgccgccagcacgtaccaggggtgatggttctgctagtggatgaacccttgagaggtgacatattcagccccatccgtgaggcccaggcttctgggcttaatgtggtgatgttgggaatggctggagcggacccagagcagctgcgtcgcttggcgccgggtatggactctgtccagaccttcttcgccgtggatgatgggccaagcctggaccaggcagtcagtggtctggccacagccctgtgtcaggcatccttcactactcagccccggccagagccctgcccagtgtattgtccaaagggccagaagggggaacctggagagatgggcctgagaggacaagttgggcctcctggcgaccctggcctcccgggcaggaccggtgctcccggcccccaggggccccctggaagtgccactgccaagggcgagaggggcttccctggagcagatgggcgtccaggcagccctggccgcgccgggaatcctgggacccctggagcccctggcctaaagggctctccagggttgcctggccctcgtggggacccgggagagcgaggacctcgaggcccaaagggggagccgggggctcccggacaagtcatcggaggtgaaggacctgggcttcctgggcggaaaggggaccctggaccatcgggcccccctggacctcgtggaccactgggggacccaggaccccgtggccccccagggcttcctggaacagccatgaagggtgacaaaggcgatcgtggggagcggggtccccctggaccaggtgaaggtggcattgctcctggggagcctgggctgccgggtcttcccggaagccctggaccccaaggccccgttggcccccctggaaagaaaggagaaaaaggtgactctgaggatggagctccaggcctcccaggacaacctgggtctccgggtgagcagggcccacggggacctcctggagctattggccccaaaggtgaccggggctttccagggcccctgggtgaggctggagagaagggcgaacgtggacccccaggcccagcgggatcccgggggctgccaggggttgctggacgtcctggagccaagggtcctgaagggccaccaggacccactggccgccaaggagagaagggggagcctggtcgccctggggaccctgcagtggtgggacctgctgttgctggacccaaaggagaaaagggagatgtggggcccgctgggcccagaggagctaccggagtccaaggggaacggggcccacccggcttggttcttcctggagaccctggccccaagggagaccctggagaccggggtcccattggccttactggcagagcaggacccccaggtgactcagggcctcctggagagaagggagaccctgggcggcctggccccccaggacctgttggcccccgaggacgagatggtgaagttggagagaaaggtgacgagggtcctccgggtgacccgggtttgcctggaaaagcaggcgagcgtggccttcggggggcacctggagttcgggggcctgtgggtgaaaagggagaccagggagatcctggagaggatggacgaaatggcagccctggatcatctggacccaagggtgaccgtggggagccgggtcccccaggacccccgggacggctggtagacacaggacctggagccagagagaagggagagcctggggaccgcggacaagagggtcctcgagggcccaagggtgatcctggcctccctggagcccctggggaaaggggcattgaagggtttcggggacccccaggcccacagggggacccaggtgtccgaggcccagcaggagaaaagggtgaccggggtccccctgggctggatggccggagcggactggatgggaaaccaggagccgctgggccctctgggccgaatggtgctgcaggcaaagctggggacccagggagagacgggcttccaggcctccgtggagaacaaggcctccctggcccctctggtccccctggattaccgggaaagccaggcgaggatgggaaacctggcctgaatggaaaaaacggagaacctggggaccctggagaagacgggaggaagggagagaaaggagattcaggcgcctctgggagagaaggtcgtgatggccccaagggtgagcgtggagctcctggtatccttggaccccaggggcctccaggcctcccagggccagtgggccctcctggccagggttttcctggtgtcccaggaggcacgggccccaagggtgaccgtggggagactggatccaaaggggagcagggcctccctggagagcgtggcctgcgaggagagcctggaagtgtgccgaatgtggatcggttgctggaaactgctggcatcaaggcatctgccctgcgggagatcgtggagacctgggatgagagctctggtagcttcctgcctgtgcccgaacggcgtcgaggccccaagggggactcaggcgaacagggccccccaggcaaggagggccccatcggctttcctggagaacgcgggctgaagggcgaccgtggagaccctggccctcaggggccacctggtctggcccttggggagaggggcccccccgggccttccggccttgccggggagcctggaaagcctggtattcccgggctcccaggcagggctgggggtgtgggagaggcaggaaggccaggagagaggggagaacggggagagaaaggagaacgtggagaacagggcagagatggccctcctggactccctggaacccctgggccccccggaccccctggccccaaggtgtctgtggatgagccaggtcctggactctctggagaacagggaccccctggactcaagggtgctaagggggagccgggcagcaatggtgaccaaggtcccaaaggagacaggggtgtgccaggcatcaaaggagaccggggagagcctggaccgaggggtcaggacggcaacccgggtctaccaggagagcgtggtatggctgggcctgaagggaagccgggtctgcagggtccaagaggcccccctggcccagtgggtggtcatggagaccctggaccacctggtgccccgggtcttgctggccctgcaggaccccaaggaccttctggcctgaagggggagcctggagagacaggacctccaggacggggcctgactggacctactggagctgtgggacttcctggaccccccggcccttcaggccttgtgggtccacaggggtctccaggtttgcctggacaagtgggggagacagggaagccgggagccccaggtcgagatggtgccagtggaaaagatggagacagagggagccctggtgtgccagggtcaccaggtctgcctggccctgtcggacctaaaggagaacctggccccacgggggcccctggacaggctgtggtcgggctccctggagcaaagggagagaagggagcccctggaggccttgctggagacctggtgggtgagccgggagccaaaggtgaccgaggactgccagggccgcgaggcgagaagggtgaagctggccgtgcaggggagcccggagaccctggggaagatggtcagaaaggggctccaggacccaaaggtttcaagggtgacccaggagtcggggtcccgggctcccctgggcctcctggccctccaggtgtgaagggagatctgggcctccctggcctgcccggtgctcctggtgttgttgggttcccgggtcagacaggccctcgaggagagatgggtcagccaggccctagtggagagcggggtctggcaggccccccagggagagaaggaatcccaggacccctggggccacctggaccaccggggtcagtgggaccacctggggcctctggactcaaaggagacaagggagaccctggagtagggctgcctgggccccgaggcgagcgtggggagccaggcatccggggtgaagatggccgccccggccaggagggaccccgaggactcacggggccccctggcagcaggggagagcgtggggagaagggtgatgttgggagtgcaggactaaagggtgacaagggagactcagctgtgatcctggggcctccaggcccacggggtgccaagggggacatgggtgaacgagggcctcggggcttggatggtgacaaaggacctcggggagacaatggggaccctggtgacaagggcagcaagggagagcctggtgacaagggctcagccgggttgccaggactgcgtggactcctgggaccccagggtcaacctggtgcagcagggatccctggtgacccgggatccccaggaaaggatggagtgcctggtatccgaggagaaaaaggagatgttggcttcatgggtccccggggcctcaagggtgaacggggagtgaagggagcctgtggccttgatggagagaagggagacaagggagaagctggtcccccaggccgccccgggctggcaggacacaaaggagagatgggggagcctggtgtgccgggccagtcgggggcccctggcaaggagggcctgatcggtcccaagggtgaccgaggctttgacgggcagccaggccccaagggtgaccagggcgagaaaggggagcggggaaccccaggaattgggggcttcccaggccccagtggaaatgatggctctgctggtcccccagggccacctggcagtgttggtcccagaggccccgaaggacttcagggccagaagggtgagcgaggtccccccggagagagagtggtgggggctcctggggtccctggagctcctggcgagagaggggagcaggggcggccagggcctgccggtcctcgaggcgagaagggagaagctgcactgacggaggatgacatccggggctttgtgcgccaagagatgagtcagcactgtgcctgccagggccagttcatcgcatctggatcacgacccctccctagttatgctgcagacactgccggctcccagctccatgctgtgcctgtgctccgcgtctctcatgcagaggaggaagagcgggtaccccctgaggatgatgagtactctgaatactccgagtattctgtggaggagtaccaggaccctgaagctccttgggatagtgatgacccctgttccctgccactggatgagggctcctgcactgcctacaccctgcgctggtaccatcgggctgtgacaggcagcacagaggcctgtcacccttttgtctatggtggctgtggagggaatgccaaccgttttgggacccgtgaggcctgcgagcgccgctgcccaccccgggtggtccagagccaggggacaggtactgcccaggactgaggcccagataatgagctgagattcagcatcccctggaggagtcggggtctcagcagaaccccactgtccctccccttggtgctagaggcttgtgtgcacgtgagcgtgcgagtgcacgtccgttatttcagtgacttggtcccgtgggtctagccttcccccctgtggacaaacccccattgtggctcctgccaccctggcagatgactcactgtgggggggtggctgtgggcagtgagcggatgtgactggcgtctgacccgccccttgacccaagcctgtgatgacatggtgctgattctggggggcattaaagctgctgttttaaaaggcaaaaaa

SEQ ID NO: 372 - protein, 2944 aa, Homo sapiens
MTLRLLVAALCAGILAEAPRVRAQHRERVTCTRLYAADIVFLLDGSSSIGRSNFREVRSFLEGLVLPFSGAASAQGVRFATVQYSDDPRTEFGLDALGSGGDVIRAIRELSYKGGNTRTGAAILHVADHVFLPQLARPGVPKVCILITDGKSQDLVDTAAQRLKGQGVKLFAVGIKNADPEELKRVASQPTSDFFFFVNDFSILRTLLPLVSRRVCTTAGGVPVTRPPDDSTSAPRDLVLSEPSSQSLRVQWTAASGPVTGYKVQYTPLTGLGQPLPSERQEVNVPAGETSVRLRGLRPLTEYQVTVIALYANSIGEAVSGTARTTALEGPELTIQNTTAHSLLVAWRSVPGATGYRVTWRVLSGGPTQQQELGPGQGSVLLRDLEPGTDYEVTVSTLFGRSVGPATSLMARTDASVEQTLRPVILGPTSILLSWNLVPEARGYRLEWRRETGLEPPQKVVLPSDVTRYQLDGLQPGTEYRLTLYTLLEGHEVATPATVVPTGPELPVSPVTDLQATELPGQRVRVSWSPVPGATQYRIIVRSTQGVERTLVLPGSQTAFDLDDVQAGLSYTVRVSARVGPREGSASVLTVRREPETPLAVPGLRVVVSDATRVRVAWGPVPGASGFRISWSTGSGPESSQTLPPDSTATDITGLQPGTTYQVAVSVLRGREEGPAAVIVARTDPLGPVRTVHVTQASSSSVTITWTRVPGATGYRVSWHSAHGPEKSQLVSGEATVAELDGLEPDTEYTVHVRAHVAGVDGPPASVVVRTAPEPVGRVSRLQILNASSDVLRITWVGVTGATAYRLAWGRSEGGPMRHQILPGNTDSAEIRGLEGGVSYSVRVTALVGDREGTPVSIVVTTPPEAPPALGTLHVVQRGEHSLRLRWEPVPRAQGFLLHWQPEGGQEQSRVLGPELSSYHLDGLEPATQYRVRLSVLGPAGEGPSAEVTARTESPRVPSIELRVVDTSIDSVTLAWTPVSRASSYILSWRPLRGPGQEVPGSPQTLPGISSSQRVTGLEPGVSYIFSLTPVLDGVRGPEASVTQTPVCPRGLADVVFLPHATQDNAHRAEATRRVLERLVLALGPLGPQAVQVGLLSYSHRPSPLFPLNGSHDLGIILQRIRDMPYMDPSGNNLGTAVVTAHRYMLAPDAPGRRQHVPGVMVLLVDEPLRGDIFSPIREAQASGLNVVMLGMAGADPEQLRRLAPGMDSVQTFFAVDDGPSLDQAVSGLATALCQASFTTQPRPEPCPVYCPKGQKGEPGEMGLRGQVGPPGDPGLPGRTGAPGPQGPPGSATAKGERGFPGADGRPGSPGRAGNPGTPGAPGLKGSPGLPGPRGDPGERGPRGPKGEPGAPGQVIGGEGPGLPGRKGDPGPSGPPGPRGPLGDPGPRGPPGLPGTAMKGDKGDRGERGPPGPGEGGIAPGEPGLPGLPGSPGPQGPVGPPGKKGEKGDSEDGAPGLPGQPGSPGEQGPRGPPGAIGPKGDRGFPGPLGEAGEKGERGPPGPAGSRGLPGVAGRPGAKGPEGPPGPTGRQGEKGEPGRPGDPAVVGPAVAGPKGEKGDVGPAGPRGATGVQGERGPPGLVLPGDPGPKGDPGDRGPIGLTGRAGPPGDSGPPGEKGDPGRPGPPGPVGPRGRDGEVGEKGDEGPPGDPGLPGKAGERGLRGAPGVRGPVGEKGDQGDPGEDGRNGSPGSSGPKGDRGEPGPPGPPGRLVDTGPGAREKGEPGDRGQEGPRGPKGDPGLPGAPGERGIEGFRGPPGPQGDPGVRGPAGEKGDRGPPGLDGRSGLDGKPGAAGPSGPNGAAGKAGDPGRDGLPGLRGEQGLPGPSGPPGLPGKPGEDGKPGLNGKNGEPGDPGEDGRKGEKGDSGASGREGRDGPKGERGAPGILGPQGPPGLPGPVGPPGQGFPGVPGGTGPKGDRGETGSKGEQGLPGERGLRGEPGSVPNVDRLLETAGIKASALREIVETWDESSGSFLPVPERRRGPKGDSGEQGPPGKEGPIGFPGERGLKGDRGDPGPQGPPGLALGERGPPGPSGLAGEPGKPGIPGLPGRAGGVGEAGRPGERGERGEKGERGEQGRDGPPGLPGTPGPPGPPGPKVSVDEPGPGLSGEQGPPGLKGAKGEPGSNGDQGPKGDRGVPGIKGDRGEPGPRGQDGNPGLPGERGMAGPEGKPGLQGPRGPPGPVGGHGDPGPPGAPGLAGPAGPQGPSGLKGEPGETGPPGRGLTGPTGAVGLPGPPGPSGLVGPQGSPGLPGQVGETGKPGAPGRDGASGKDGDRGSPGVPGSPGLPGPVGPKGEPGPTGAPGQAVVGLPGAKGEKGAPGGLAGDLVGEPGAKGDRGLPGPRGEKGEAGRAGEPGDPGEDGQKGAPGPKGFKGDPGVGVPGSPGPPGPPGVKGDLGLPGLPGAPGVVGFPGQTGPRGEMGQPGPSGERGLAGPPGREGIPGPLGPPGPPGSVGPPGASGLKGDKGDPGVGLPGPRGERGEPGIRGEDGRPGQEGPRGLTGPPGSRGERGEKGDVGSAGLKGDKGDSAVILGPPGPRGAKGDMGERGPRGLDGDKGPRGDNGDPGDKGSKGEPGDKGSAGLPGLRGLLGPQGQPGAAGIPGDPGSPGKDGVPGIRGEKGDVGFMGPRGLKGERGVKGACGLDGEKGDKGEAGPPGRPGLAGHKGEMGEPGVPGQSGAPGKEGLIGPKGDRGFDGQPGPKGDQGEKGERGTPGIGGFPGPSGNDGSAGPPGPPGSVGPRGPEGLQGQKGERGPPGERVVGAPGVPGAPGERGEQGRPGPAGPRGEKGEAALTEDDIRGFVRQEMSQHCACQGQFIASGSRPLPSYAADTAGSQLHAVPVLRVSHAEEEERVPPEDDEYSEYSEYSVEEYQDPEAPWDSDDPCSLPLDEGSCTAYTLRWYHRAVTGSTEACHPFVYGGCGGNANRFGTREACERRCPPRVVQSQGTGTAQD

SEQ ID NO: 373 - DNA, 474 bp, Homo sapiens
taatatttcttgattgggaggaaatataattttttattcacagttaacagatcttcaagagtaaaaaaaaaaaagccatcttagtaccgggcttagtttatagtgaaattataatctttaagaaacctgggcgttctataaaaaccttcaagaacttattacaaattggtattttttaattctctagaaccacatagtagaatgaataacttgctaattttattcttaaaaacctcatgtttatgttttttgatttgtgtttgtatatttaaacactttgtgcgactttcagctactctgggcagttgaaaagtagaaagtcatacatgatacctgaaaatgagtttcatcacaaagacccccctccgaggaatgcagttgccagtgtgcaaaatgggcctggtggtgggccttcttcatcatcaataggaagtgcatctaaatcggatgaaagcagtactgaggagactgata

SEQ ID NO: 374 - DNA, 1161 bp, Homo sapiens
gagctttggggccatttggatcacacgatgttttttcaagattttagaccctttctaagtagcagtccactggaccaagataatagagccaatgaaaggggtcaccagactcacactgacttctggggagcaagacctccacggttgccattgggtcggagatacagatctcgaggaagttctcgtcctgacagatctccagctattgaaggaatactacaacacatctttgcaggattctttgcaaattctgccattcctggatctccacaccctttttcctggagcgggatgctgcactccaaccctggggactatgcctggggtcagacagggcttgatgccattgtaacccagcttttaggacaactggaaaacacaggccctcccccagctgacaaggaaaagatcacatctcttccaacagtgacagtaactcaggaacaagttgatatgggtttagagtgtccagtatgcaaagaagattacacagttgaagaggaagtccggcagttaccttgcaatcacttctttcacagcagttgtattgtgccgtggctagaactgcatgacacatgtcctgtatgtaggaagagcttaaatggtgaggactctactcggcaaagccagagcactgaggcctctgcaagcaacagatttagcaatgacagtcagctaaatgaccgatggactttctgaagctaaagaccacacctgaatcagggctgtggtaatcatcttaccatagctgtaaattgtatcaaaacaaaaaattagtagatggatttaggaatatgtaagaaactcaacacataatataaatgcaatgaatgtttttcttctttaaatttaaagttagtatctacagatggaattgtatctacaaccaaatgcctcttatccctgaattcagagtgataattttataagtgtgaaacttaattatgtagggctccccccgtctgaatagaattaattccttaaagtctagttagggtcctgctgtctgtcatgttgccttgtaacggatgtttccacctccttctccaacctctaccccaccattagtgtattttactataaaaacagtggaaccacagccctaaagtcctgctgatataaagtccttttgtcttaattgtatttaaaaaaaaaaaaaaa

SEQ ID NO: 375 - protein, 232 aa, Homo sapiens
ELWGHLDHTMFFQDFRPFLSSSPLDQDNRANERGHQTHTDFWGARPPRLPLGRRYRSRGSSRPDRSPAIEGILQHIFAGFFANSAIPGSPHPFSWSGMLHSNPGDYAWGQTGLDAIVTQLLGQLENTGPPPADKEKITSLPTVTVTQEQVDMGLECPVCKEDYTVEEEVRQLPCNHFFHSSCIVPWLELHDTCPVCRKSLNGEDSTRQSQSTEASASNRFSNDSQLNDRWTF

SEQ ID NO: 376 - DNA, 2766 bp, Homo sapiens
ggccgcaggcccgctgcggcggactgggcggcggaagttcgacggcgccgggcgagtggctgttgagcggcgccgcgggagttccgcaggtttcccgtgttcgcagcggagccggaggccagctgaacccggccgtgggatcccggataggaggaggaggggacccataggacgcgttaacatggacctggaaaacaaagtgaagaagatgggcttaggtcacgagcaaggatttggagccccttgtttaaaatgcaaagaaaaatgtgaaggattcgaactgcacttctggagaaaaatatgtcgtaactgcaagtgtggccaagaagagcatgatgtcctcttgagcaatgaagaggatcgaaaagtgggaaaactttttgaagacaccaagtataccactctgattgcaaaactaaagtcagatggaattcccatgtataaacgcaatgttatgatattgacgaatccagttgctgccaagaagaatgtctccatcaatacagttacctatgagtgggctcctcctgtccagaatcaagcattggccaggcagtacatgcagatgctacccaaggaaaagcagccagtagcaggctcagagggggcacagtaccggaagaagcagctggcaaagcagctccctgcacatgaccaggacccttcaaagtgccatgagttgtctcccagagaggtgaaggagatggagcagtttgtgaagaaatataagagcgaagctctgggagtaggagatgtcaaacttccctgtgagatggatgcccaaggccccaaacaaatgaacattcctggaggggatagaagcaccccagcagcagtgggggccatggaggacaaatctgctgagcacaaaagaactcaatattcctgctattgctgcaaactgagtatgaaagaaggtgacccagccatctatgccgaaagggctggctatgataaactgtggcacccagcttgttttgtctgcagcacctgccatgaactcctggttgacatgatttatttttggaagaatgagaagctatactgtggcagacattactgtgacagcgagaaaccccgatgtgctggctgtgacgagctgatattcagcaatgagtatacccaggcagaaaaccagaattggcacctgaaacacttctgctgctttgactgtgatagcattctagctggggagatatacgtgatggtcaatgacaagcccgtgtgcaagccctgctatgtgaagaatcacgctgtggtgtgtcaaggatgccacaatgccatcgacccagaagtgcagcgggtgacctataacaatttcagctggcatgcatccacagagtgctttctgtgctcttgctgcagcaaatgcctcattgggcagaagttcatgccagtagaagggatggttttctgttcagtggaatgtaagaagaggatgtcttaggaggagggcacccagaagtatcgagccatagctatccaaagtggtctgcatttctactgtaaaatgcaatttgaaaaaaataaaacgcaaaaaaagaaactgtaaaggaaaccaagagattttgtttaatttttttggccattttttcttcatcaattttttttcggtctcaacttttaaacttggtttaagcatttgatttgtaaaacagtaaataattgtatctttccatagcttttcaaatgtgaaatcatttttggaagcttggatctcattaaacttcatgtctctattccatttgtgccacacacttaaaagttagtgtactgaatggaaagatgagcattcctagttctacacttcttttttccccctcatgtgtaaaatgaaaagaaaactaaatttgccctaataccaaggcgctacgtttattgcctcgtcttattcactgacctttgtaatgatacacagtgaattctttttgacaaagagaaatgcagtgtagtatgcagagctgctgttttaatgcctatgcatttactctttcctgatttaggcagaggtggcattttctttattgcatttctctatttttttaatgtaccctaccttcagtattctctttgtaagttggtgacttgcatctgtggccttgaatattttattatcacatgtggcataacagtatccacactttttagttctttatttttttttttttattttgagcaattctcctgcctcagcctcccaaatagctgggattacaggtgcatgccaccacacccagctaatttttgtatttttagtagagacaggttttcaccatgttagccaggctggtctcaaactcctgacctcagatgatccgcctgccttggcctcccaaagtgctgggattacaggtgtgggagccaccatgcctgacccacacactttttacttgtatagatgatttttggcttggacataaaagccaagccacccatttgcttttaatccaaagaacatgtatagtttttgtacccagagactatgatttatattgattgcacttgcctgccatgatttagataagattttttttgcatggtttttattctttcctaatggatcctgttttataatacttccaagcctgtccatggatatatcaaatgtcttcacttgtatattttcatggctaggtatttctaatgtttattcttccctgtgtacttctacacatagctatgcactatgaaaattaaatggaatgaatgatatgtatattactcaaaataaagtttctttcactttaaaaaaaaaaaaaaaaaaaa

SEQ ID NO: 377 - protein, 421 aa, Homo sapiens
MDLENKVKKMGLGHEQGFGAPCLKCKEKCEGFELHFWRKICRNCKCGQEEHDVLLSNEEDRKVGKLFEDTKYTTLIAKLKSDGIPMYKRNVMILTNPVAAKKNVSINTVTYEWAPPVQNQALARQYMQMLPKEKQPVAGSEGAQYRKKQLAKQLPAHDQDPSKCHELSPREVKEMEQFVKKYKSEALGVGDVKLPCEMDAQGPKQMNIPGGDRSTPAAVGAMEDKSAEHKRTQYSCYCCKLSMKEGDPAIYAERAGYDKLWHPACFVCSTCHELLVDMIYFWKNEKLYCGRHYCDSEKPRCAGCDELIFSNEYTQAENQNWHLKHFCCFDCDSILAGEIYVMVNDKPVCKPCYVKNHAVVCQGCHNAIDPEVQRVTYNNFSWHASTECFLCSCCSKCLIGQKFMPVEGMVFCSVECKKRMS

SEQ ID NO: 378 - DNA, 2603 bp, Homo sapiens
gaggagtccttttctgagtagagtccacagaagaggtattctattgatgggcttaggtcacgagcaaggatttggagccccttgtttaaaatgcaaagaaaaatgtgaaggattcgaactgcacttctggagaaaaatatgtcgtaactgcaagtgtggccaagaagagcatgatgtcctcttgagcaatgaagaggatcgaaaagtgggaaaactttttgaagacaccaagtataccactctgattgcaaaactaaagtcagatggaattcccatgtataaacgcaatgttatgatattgacgaatccagttgctgccaagaagaatgtctccatcaatacagttacctatgagtgggctcctcctgtccagaatcaagcattggccaggcagtacatgcagatgctacccaaggaaaagcagccagtagcaggctcagagggggcacagtaccggaagaagcagctggcaaagcagctccctgcacatgaccaggacccttcaaagtgccatgagttgtctcccagagaggtgaaggagatggagcagtttgtgaagaaatataagagcgaagctctgggagtaggagatgtcaaacttccctgtgagatggatgcccaaggccccaaacaaatgaacattcctggaggggatagaagcaccccagcagcagtgggggccatggaggacaaatctgctgagcacaaaagaactcaatattcctgctattgctgcaaactgagtatgaaagaaggtgacccagccatctatgccgaaagggctggctatgataaactgtggcacccagcttgttttgtctgcagcacctgccatgaactcctggttgacatgatttatttttggaagaatgagaagctatactgtggcagacattactgtgacagcgagaaaccccgatgtgctggctgtgacgagctgatattcagcaatgagtatacccaggcagaaaaccagaattggcacctgaaacacttctgctgctttgactgtgatagcattctagctggggagatatacgtgatggtcaatgacaagcccgtgtgcaagccctgctatgtgaagaatcacgctgtggtgtgtcaaggatgccacaatgccatcgacccagaagtgcagcgggtgacctataacaatttcagctggcatgcatccacagagtgctttctgtgctcttgctgcagcaaatgcctcattgggcagaagttcatgccagtagaagggatggttttctgttcagtggaatgtaagaagaggatgtcttaggaggagggcacccagaagtatcgagccatagctatccaaagtggtctgcatttctactgtaaaatgcaatttgaaaaaaataaaacgcaaaaaaagaaactgtaaaggaaaccaagagattttgtttaatttttttggccattttttcttcatcaattttttttcggtctcaacttttaaacttggtttaagcatttgatttgtaaaacagtaaataattgtatctttccatagcttttcaaatgtgaaatcatttttggaagcttggatctcattaaacttcatgtctctattccatttgtgccacacacttaaaagttagtgtactgaatggaaagatgagcattcctagttctacacttcttttttccccctcatgtgtaaaatgaaaagaaaactaaatttgccctaataccaaggcgctacgtttattgcctcgtcttattcactgacctttgtaatgatacacagtgaattctttttgacaaagagaaatgcagtgtagtatgcagagctgctgttttaatgcctatgcatttactctttcctgatttaggcagaggtggcattttctttattgcatttctctatttttttaatgtaccctaccttcagtattctctttgtaagttggtgacttgcatctgtggccttgaatattttattatcacatgtggcataacagtatccacactttttagttctttatttttttttttttattttgagcaattctcctgcctcagcctcccaaatagctgggattacaggtgcatgccaccacacccagctaatttttgtatttttagtagagacaggttttcaccatgttagccaggctggtctcaaactcctgacctcagatgatccgcctgccttggcctcccaaagtgctgggattacaggtgtgggagccaccatgcctgacccacacactttttacttgtatagatgatttttggcttggacataaaagccaagccacccatttgcttttaatccaaagaacatgtatagtttttgtacccagagactatgatttatattgattgcacttgcctgccatgatttagataagattttttttgcatggtttttattctttcctaatggatcctgttttataatacttccaagcctgtccatggatatatcaaatgtcttcacttgtatattttcatggctaggtatttctaatgtttattcttccctgtgtacttctacacatagctatgcactatgaaaattaaatggaatgaatgatatgtatattactcaaaataaagtttctttcactttaaaaaaaaaaaaaaaaaaa

SEQ ID NO: 379 - protein, 412 aa, Homo sapiens
MGLGHEQGFGAPCLKCKEKCEGFELHFWRKICRNCKCGQEEHDVLLSNEEDRKVGKLFEDTKYTTLIAKLKSDGIPMYKRNVMILTNPVAAKKNVSINTVTYEWAPPVQNQALARQYMQMLPKEKQPVAGSEGAQYRKKQLAKQLPAHDQDPSKCHELSPREVKEMEQFVKKYKSEALGVGDVKLPCEMDAQGPKQMNIPGGDRSTPAAVGAMEDKSAEHKRTQYSCYCCKLSMKEGDPAIYAERAGYDKLWHPACFVCSTCHELLVDMIYFWKNEKLYCGRHYCDSEKPRCAGCDELIFSNEYTQAENQNWHLKHFCCFDCDSILAGEIYVMVNDKPVCKPCYVKNHAVVCQGCHNAIDPEVQRVTYNNFSWHASTECFLCSCCSKCLIGQKFMPVEGMVFCSVECKKRMS

SEQ ID NO: 380 - DNA, 1928 bp, Homo sapiens
gagcagaacagggaggctagagcgcagcgggaaccggcccggagccggagccggagccccacaggcacctactaaaccgcccagccgatcggcccccacagagtggcccgcgggcctccggccgggcccagtcccctcccgggccctccatggcccgggccgctgccctcctgccgtcgagatcgccgccgacgccgctgctgtggccgctgctgctgctgctgctcctggaaaccggagcccaggatgtgcgagttcaagtgctacccgaggtgcgaggccagctcgggggcaccgtggagctgccgtgccacctgctgccacctgttcctggactgtacatctccctggtgacctggcagcgcccagatgcacctgcgaaccaccagaatgtggccgccttccaccctaagatgggtcccagcttccccagcccgaagcctggcagcgagcggctgtccttcgtctctgccaagcagagcactgggcaagacacagaggcagagctccaggacgccacgctggccctccacgggctcacggtggaggacgagggcaactacacttgcgagtttgccaccttccccaaggggtccgtccgagggatgacctggctcagagtcatagccaagcccaagaaccaagctgaggcccagaaggtcacgttcagccaggaccctacgacagtggccctctgcatctccaaagagggccgcccacctgcccggatctcctggctctcatccctggactgggaagccaaagagactcaggtgtcagggaccctggccggaactgtcactgtcaccagccgcttcaccttggtgccctcgggccgagcagatggtgtcacggtcacctgcaaagtggagcatgagagcttcgaggaaccagccctgatacctgtgaccctctctgtacgctaccctcctgaagtgtccatctccggctatgatgacaactggtacctcggccgtactgatgccaccctgagctgtgacgtccgcagcaacccagagcccacgggctatgactggagcacgacctcaggcaccttcccgacctccgcagtggcccagggctcccagctggtcatccacgcagtggacagtctgttcaataccaccttcgtctgcacagtcaccaatgccgtgggcatgggccgcgctgagcaggtcatctttgtccgagaaacccccagggcctcgccccgagatgtgggcccgctggtgtggggggccgtgggggggacactgctggtgctgctgcttctggctggggggtccttggccttcatcctgctgagggtgaggaggaggaggaagagccctggaggagcaggaggaggagccagtggcgacgggggattctacgatccgaaagctcaggtgttgggaaatggggaccccgtcttctggacaccagtagtccctggtcccatggaaccagatggcaaggatgaggaggaggaggaggaggaagagaaggcagagaaaggcctcatgttgcctccacccccagcactcgaggatgacatggagtcccagctggacggctccctcatctcacggcgggcagtttatgtgtgacctggacacagacagagacagagccaggcccggccctcccgcccccgacctgaccacgccggcctagggttccagactggttggacttgttcgtctggacgacactggagtggaacactgcctcccactttcttgggacttggagggaggtggaacagcacactggacttctcccgtctctagggctgcatggggagcccggggagctgagtagtggggatccagagaggacccccgcccccagagacttggttttggctccagccttcccctggccccgtgacactcaggagttaataaatgccttggaggaaaacaaaaaaaaaaaaaaaaaaaaaa

SEQ ID NO: 381 - protein, 479 aa, Homo sapiens
MARAAALLPSRSPPTPLLWPLLLLLLLETGAQDVRVQVLPEVRGQLGGTVELPCHLLPPVPGLYISLVTWQRPDAPANHQNVAAFHPKMGPSFPSPKPGSERLSFVSAKQSTGQDTEAELQDATLALHGLTVEDEGNYTCEFATFPKGSVRGMTWLRVIAKPKNQAEAQKVTFSQDPTTVALCISKEGRPPARISWLSSLDWEAKETQVSGTLAGTVTVTSRFTLVPSGRADGVTVTCKVEHESFEEPALIPVTLSVRYPPEVSISGYDDNWYLGRTDATLSCDVRSNPEPTGYDWSTTSGTFPTSAVAQGSQLVIHAVDSLFNTTFVCTVTNAVGMGRAEQVIFVRETPRASPRDVGPLVWGAVGGTLLVLLLLAGGSLAFILLRVRRRRKSPGGAGGGASGDGGFYDPKAQVLGNGDPVFWTPVVPGPMEPDGKDEEEEEEEEKAEKGLMLPPPPALEDDMESQLDGSLISRRAVYV

SEQ ID NO: 382 - DNA, 570 bp, Homo sapiens
  misc_feature (481)..(481): n is a, c, g, or t
agcggccgctcgcgatctagaggctgactattcctaggctacagccacacctcattgctgccttttctcccagttcaaagcctccttcacatcctccccttatatctccccaccttaacccacaagtataagacacctctactccctccttagtgaccgatcatgcaccccttaccatcccattaaaacctaatcactcttaccccgctcaatcccaatatcccatcccacagcatgctttgaaaagattaaagcctgttatcacttacctgttacagcatggccttttaaagcctataaactcttcttgccattcccccattttacctgtcctaaaaccagacaaggcttacaggttagttcagaatctgtgccttatcaaccaaattgttttgcctatcaaccccatggtgccaaacccatatactctcctatcctcaatacctgcctctataaccaattattctcttctagatctcanacatgctctctttactattcctttgcacccttaataccagcctctcttcactgtcacttggactgaccctgacacccatcaagctcagc

SEQ ID NO: 383 - DNA, 4180 bp, Homo sapiens
gtacgcggacaagatggcggcggcagcagtcgacagcgcgatggaggtggtgccggcgctggcggaggaggccgcgccggaggtagcgggcctcagctgcctcgtcaacctgccgggtgaggtgctggagtacatcctgtgctgcggctcgctgacggccgccgacatcggccgtgtctccagcacctgccggcggctgcgcgagctgtgccagagcagcgggaaggtgtggaaggagcagttccgggtgaggtggccttcccttatgaaacactacagccccaccgactacgtcaattggttggaagagtataaagttcggcaaaaagctgggttagaagcgcggaagattgtagcctcgttctcaaagaggttcttttcagagcacgttccttgtaatggcttcagtgacattgagaaccttgaaggaccagagattttttttgaggatgaactggtgtgtatcctaaatatggaaggaagaaaagctttgacctggaaatactacgcaaaaaaaattctttactacctgcggcaacagaagatcttaaataatcttaaggcctttcttcagcagccagatgactatgagtcgtatcttgaaggtgctgtatatattgaccagtactgcaatcctctctccgacatcagcctcaaagacatccaggcccaaattgacagcatcgtggagcttgtttgcaaaacccttcggggcataaacagtcgccaccccagcttggccttcaaggcaggtgaatcatccatgataatggaaatagaactccagagccaggtgctggatgccatgaactatgtcctttacgaccaactgaagttcaaggggaatcgaatggattactataatgccctcaacttatatatgcatcaggttttgattcgcagaacaggaatcccaatcagcatgtctctgctctatttgacaattgctcggcagttgggagtcccactggagcctgtcaacttcccaagtcacttcttattaaggtggtgccaaggcgcagaaggggcgaccctggacatctttgactacatctacatagatgcttttgggaaaggcaagcagctgacagtgaaagaatgcgagtacttgatcggccagcacgtgactgcagcactgtatggggtggtcaatgtcaagaaggtgttacagagaatggtgggaaacctgttaagcctggggaagcgggaaggcatcgaccagtcataccagctcctgagagactcgctggatctctatctggcaatgtacccggaccaggtgcagcttctcctcctccaagccaggctttacttccacctgggaatctggccagagaaggtgcttgacatcctccagcacatccaaaccctagacccggggcagcacggggcggtgggctacctggtgcagcacactctagagcacattgagcgcaaaaaggaggaggtgggcgtagaggtgaagctgcgctccgatgagaagcacagagatgtctgctactccatcgggctcattatgaagcataagaggtatggctataactgtgtgatctacggctgggaccccacctgcatgatgggacacgagtggatccggaacatgaacgtccacagcctgccgcacggccaccaccagcctttctataacgtgctggtggaggacggctcctgtcgatacgcagcccaagaaaacttggaatataacgtggagcctcaagaaatctcacaccctgacgtgggacgctatttctcagagtttactggcactcactacatcccaaacgcagagctggagatccggtatccagaagatctggagtttgtctatgaaacggtgcagaatatttacagtgcaaagaaagagaacatagatgagtaaagtctagagaggacattgcacctttgctgctgctgctatcttccaagagaacgggactccggaagaagacgtctccacggagccctcgggacctgctgcaccaggaaagccactccaccagtagtgctggttgcctcctactaagtttaaataccgtgtgctcttccccagctgcaaagacaatgttgctctccgcctacactagtgaattaatctgaaaggcactgtgtcagtggcatggcttgtatgcttgtcctgtggtgacagtttgtgacattctgtcttcatgaggtctcacagtcgacgctcctgtaatcattctttgtattcactccattcccctgtctgtctgcatttgtctcagaacatttccttggctggacagatggggttatgcatttgcaataatttccttctgatttctctgtggaacgtgttcggtcccgagtgaggactgtgtgtctttttaccctgaagttagttgcatattcagaggtaaagttgtgtgctatcttggcagcatcttagagatggagacattaacaagctaatggtaattagaatcatttgaatttatttttttctaatatgtgaaacacagatttcaagtgttttatcttttttttttaaatttaaatgggaatataacacagttttcccttccatattcctctcttgagtttatgcacatctctataaatcattagttttctattttattacataaaattcttttagaaaatgcaaatagtgaactttgtgaatggatttttccatactcatctacaattcctccattttaaatgactacttttattttttaatttaaaaaatctacttcagtatcatgagtaggtcttacatcagtgatgggttctttttgtagtgagacatacaaatctgatgttaatgtttgctcttagaagtcatactccatggtcttcaaagaccaaaaaatgaggttttgcctttgtaatcaggaaaaaaaaaaattaatgaaccttaaaaaaaaaaaaaaaggttttgaagggaaaaaaagtggtttcacacctcttgttattccttagagtcacttcaaggcctgtttgaatgtggcaggttagaaagagagagaatgtctttcatttgaagagtgttggacttgtgtgaaaggagatgtgcgtgttggaatctgcttttccaagccgccagggtcctgacggcagcaggacgaagcctgttgtggcgtcttctgggaaagcctgaccgtgtgttcggacggcactggctcctttccgaagttctcagtaactgagcccagagtaactgcacgcctttgtgcagctctggagctccaccaactctcggcctgccagttctcaagcgagctaatcttgtcattaatcgatagaagctaacttccgaagttaggacctagttactttgctctcaacatttaaaataatgcagttgctctagtgaatggggcgttaggggcctgtctctgcacctgtctgtccatctgcatgcagtattctcacccatgttgaatgcctgctgcttgtttaccctttggaaaccctggggtgaccaaggtttggaaagccacctgagaccacttcatagcaagggaaggctttaagcagttactagaaagagatggggatttggcccctggctcctccagcctgaatgagctatttaatccactgtccatgttcctcatcagtcaaatccaaagtcaaaggatttgaacctgcatctggaaacgtaaccactcacagcacctggcccgccaaggttgggaggattgtacactactttcatttaaaggggaaagtttgataatacggaattaattaatatgaatgagatgcattaataagaacctgagcatgctgagagttgcaattgttggttttctggtttgattgatttccttttttcttagacacatcaaagtcaagaaagatggttttacctttactgacccagctgtacatatgtatctagactgtttttaaatgtctttcttcatgaatgcttcatggggctccaggaagcctgtatcacctgtgtaagttggtatttgggcactttatatttttctaaaaacgtgttttggatcctgtactctaataaatcataagtttctttttaaaaattttccaaaacttttctccattttaaaaagccctgttataaacgttgaactttcacaatgttaaaatgttaaatatttggatatagcaacttcttttctcttcaaatgaatgccaagatttttttgtacaatgattaataaatggaacttatccagag

SEQ ID NO: 384 - protein, 621 aa, Homo sapiens
MAAAAVDSAMEVVPALAEEAAPEVAGLSCLVNLPGEVLEYILCCGSLTAADIGRVSSTCRRLRELCQSSGKVWKEQFRVRWPSLMKHYSPTDYVNWLEEYKVRQKAGLEARKIVASFSKRFFSEHVPCNGFSDIENLEGPEIFFEDELVCILNMEGRKALTWKYYAKKILYYLRQQKILNNLKAFLQQPDDYESYLEGAVYIDQYCNPLSDISLKDIQAQIDSIVELVCKTLRGINSRHPSLAFKAGESSMIMEIELQSQVLDAMNYVLYDQLKFKGNRMDYYNALNLYMHQVLIRRTGIPISMSLLYLTIARQLGVPLEPVNFPSHFLLRWCQGAEGATLDIFDYIYIDAFGKGKQLTVKECEYLIGQHVTAALYGVVNVKKVLQRMVGNLLSLGKREGIDQSYQLLRDSLDLYLAMYPDQVQLLLLQARLYFHLGIWPEKVLDILQHIQTLDPGQHGAVGYLVQHTLEHIERKKEEVGVEVKLRSDEKHRDVCYSIGLIMKHKRYGYNCVIYGWDPTCMMGHEWIRNMNVHSLPHGHHQPFYNVLVEDGSCRYAAQENLEYNVEPQEISHPDVGRYFSEFTGTHYIPNAELEIRYPEDLEFVYETVQNIYSAKKENIDE

SEQ ID NO: 385 - DNA, 4201 bp, Homo sapiens
gtacgcggacaagatggcggcggcagcagtcgacagcgcgatggaggtggtgccggcgctggcggaggaggccgcgccggaggtagcgggcctcagctgcctcgtcaacctgccgggtgaggtgctggagtacatcctgtgctgcggctcgctgacggccgccgacatcggccgtgtctccagcacctgccggcggctgcgcgagctgtgccagagcagcgggaaggtgtggaaggagcagttccgggtgaggtggccttcccttatgaaacactacagccccaccgactacgtcaattggttggaagagtataaagttcggcaaaaagctgggttagaagcgcggaagattgtagcctcgttctcaaagaggttcttttcagagcacgttccttgtaatggcttcagtgacattgagaaccttgaaggaccagagattttttttgaggatgaactggtgtgtatcctaaatatggaaggaagaaaagctttgacctggaaatactacgcaaaaaaaattctttactacctgcggcaacagaagatcttaaataatcttaaggcctttcttcagcagccagatgactatgagtcgtatcttgaaggtgctgtatatattgaccagtactgcaatcctctctccgacatcagcctcaaagacatccaggcccaaattgacagcatcgtggagcttgtttgcaaaacccttcggggcataaacagtcgccaccccagcttggccttcaaggcaggtgaatcatccatgataatggaaatagaactccagagccaggtgctggatgccatgaactatgtcctttacgaccaactgaagttcaaggggaatcgaatggattactataatgccctcaacttatatatgcatcaggttttgattcgcagaacaggaatcccaatcagcatgtctctgctctatttgacaattgctcggcagttgggagtcccactggagcctgtcaacttcccaagtcacttcttattaaggtggtgccaaggcgcagaaggggcgaccctggacatctttgactacatctacatagatgcttttgggaaaggcaagcagctgacagtgaaagaatgcgagtacttgatcggccagcacgtgactgcagcactgtatggggtggtcaatgtcaagaaggtgttacagagaatggtgggaaacctgttaagcctggggaagcgggaaggcatcgaccagtcataccagctcctgagagactcgctggatctctatctggcaatgtacccggaccaggtgcagcttctcctcctccaagccaggctttacttccacctgggaatctggccagagaagtctttctgtcttgttttgaaggtgcttgacatcctccagcacatccaaaccctagacccggggcagcacggggcggtgggctacctggtgcagcacactctagagcacattgagcgcaaaaaggaggaggtgggcgtagaggtgaagctgcgctccgatgagaagcacagagatgtctgctactccatcgggctcattatgaagcataagaggtatggctataactgtgtgatctacggctgggaccccacctgcatgatgggacacgagtggatccggaacatgaacgtccacagcctgccgcacggccaccaccagcctttctataacgtgctggtggaggacggctcctgtcgatacgcagcccaagaaaacttggaatataacgtggagcctcaagaaatctcacaccctgacgtgggacgctatttctcagagtttactggcactcactacatcccaaacgcagagctggagatccggtatccagaagatctggagtttgtctatgaaacggtgcagaatatttacagtgcaaagaaagagaacatagatgagtaaagtctagagaggacattgcacctttgctgctgctgctatcttccaagagaacgggactccggaagaagacgtctccacggagccctcgggacctgctgcaccaggaaagccactccaccagtagtgctggttgcctcctactaagtttaaataccgtgtgctcttccccagctgcaaagacaatgttgctctccgcctacactagtgaattaatctgaaaggcactgtgtcagtggcatggcttgtatgcttgtcctgtggtgacagtttgtgacattctgtcttcatgaggtctcacagtcgacgctcctgtaatcattctttgtattcactccattcccctgtctgtctgcatttgtctcagaacatttccttggctggacagatggggttatgcatttgcaataatttccttctgatttctctgtggaacgtgttcggtcccgagtgaggactgtgtgtctttttaccctgaagttagttgcatattcagaggtaaagttgtgtgctatcttggcagcatcttagagatggagacattaacaagctaatggtaattagaatcatttgaatttatttttttctaatatgtgaaacacagatttcaagtgttttatcttttttttttaaatttaaatgggaatataacacagttttcccttccatattcctctcttgagtttatgcacatctctataaatcattagttttctattttattacataaaattcttttagaaaatgcaaatagtgaactttgtgaatggatttttccatactcatctacaattcctccattttaaatgactacttttattttttaatttaaaaaatctacttcagtatcatgagtaggtcttacatcagtgatgggttctttttgtagtgagacatacaaatctgatgttaatgtttgctcttagaagtcatactccatggtcttcaaagaccaaaaaatgaggttttgcttttgtaatcaggaaaaaaaaaaattaatgaaccttaaaaaaaaaaaaaaaggttttgaagggaaaaaaagtggtttcacacctcttgttattccttagagtcacttcaaggcctgtttgaatgtggcaggttagaaagagagagaatgtctttcatttgaagagtgttggacttgtgtgaaaggagatgtgcgtgttggaatctgcttttccaagccgccagggtcctgacggcagcaggacgaagcctgttgtggcgtcttctgggaaagcctgaccgtgtgttcggacggcactggctcctttccgaagttctcagtaactgagcccagagtaactgcacgcctttgtgcagctctggagctccaccaactctcggcctgccagttctcaagcgagctaatcttgtcattaatcgatagaagctaacttccgaagttaggacctagttactttgctctcaacatttaaaataatgcagttgctctagtgaatggggcgttaggggcctgtctctgcacctgtctgtccatctgcatgcagtattctcacccatgttgaatgcctgctgcttgtttaccctttggaaaccctggggtgaccaaggtttggaaagccacctgagaccacttcatagcaagggaaggctttaagcagttactagaaagagatggggatttggcccctggctcctccagcctgaatgagctatttaatccactgtccatgttcctcatcagtcaaatccaaagtcaaaggatttgaacctgcatctggaaacgtaaccactcacagcacctggcccgccaaggttgggaggattgtacactactttcatttaaaggggaaagtttgataatacggaattaattaatatgaatgagatgcattaataagaacctgagcatgctgagagttgcaattgttggttttctggtttgattgatttccttttttcttagacacatcaaagtcaagaaagatggttttacctttactgacccagctgtacatatgtatctagactgtttttaaatgtctttcttcatgaatgcttcatggggctccaggaagcctgtatcacctgtgtaagttggtatttgggcactttatatttttctaaaaacgtgttttggatcctgtactctaataaatcataagtttctttttaaaaattttccaaaacttttctccattttaaaaagccctgttataaacgttgaactttcacaatgttaaaatgttaaatatttggatatagcaacttcttttctcttcaaatgaatgccaagatttttttgtacaatgattaataaatggaacttatccagag

SEQ ID NO: 386 - protein, 628 aa, Homo sapiens
MAAAAVDSAMEVVPALAEEAAPEVAGLSCLVNLPGEVLEYILCCGSLTAADIGRVSSTCRRLRELCQSSGKVWKEQFRVRWPSLMKHYSPTDYVNWLEEYKVRQKAGLEARKIVASFSKRFFSEHVPCNGFSDIENLEGPEIFFEDELVCILNMEGRKALTWKYYAKKILYYLRQQKILNNLKAFLQQPDDYESYLEGAVYIDQYCNPLSDISLKDIQAQIDSIVELVCKTLRGINSRHPSLAFKAGESSMIMEIELQSQVLDAMNYVLYDQLKFKGNRMDYYNALNLYMHQVLIRRTGIPISMSLLYLTIARQLGVPLEPVNFPSHFLLRWCQGAEGATLDIFDYIYIDAFGKGKQLTVKECEYLIGQHVTAALYGVVNVKKVLQRMVGNLLSLGKREGIDQSYQLLRDSLDLYLAMYPDQVQLLLLQARLYFHLGIWPEKSFCLVLKVLDILQHIQTLDPGQHGAVGYLVQHTLEHIERKKEEVGVEVKLRSDEKHRDVCYSIGLIMKHKRYGYNCVIYGWDPTCMMGHEWIRNMNVHSLPHGHHQPFYNVLVEDGSCRYAAQENLEYNVEPQEISHPDVGRYFSEFTGTHYIPNAELEIRYPEDLEFVYETVQNIYSAKKENIDE

SEQ ID NO: 387 - DNA, 2319 bp, Homo sapiens
agtgcgagatccgctgctgctgaggagaggagcgtcaacagcagcaccatggtagctcaacagaagaaccttgaaggctatgtgggatttgccaatctcccaaatcaagtatacagaaaatcggtgaagagaggttttgaattcacgcttatggtagtgggtgaatctggattgggaaagtcgacattaatcaactcattattcctcacagatttgtattctccagagtatccaggtccttctcatagaattaaaaagactgtacaggtggaacaatccaaagttttaatcaaagaaggtggtgttcagttgctgctcacaatagttgataccccaggatttggagatgcagtggataatagtaattgctggcagcctgttatcgactacattgatagtaaatttgaggactacctaaatgcagaatcacgagtgaacagacgtcagatgcctgataacagggtgcagtgttgtttatacttcattgctccttcaggacatggacttaaaccattggatattgagtttatgaagcgtttgcatgaaaaagtgaatatcatcccacttattgccaaagcagacacactcacaccagaggaatgccaacagtttaaaaaacagataatgaaagaaatccaagaacataaaattaaaatatacgaatttccagaaacagatgatgaagaagaaaataaacttgttaaaaagataaaggaccgtttacctcttgctgtggtaggtagtaatactatcattgaagttaatggcaaaagggtcagaggaaggcagtatccttggggtattgctgaagttgaaaatggtgaacattgtgattttacaatcctaagaaatatgaagataagaacacacatgcaggacttgaaagatgttactaataatgtccactatgagaactacagaagcagaaaacttgcagctgtgacttataatggagttgataacaacaagaataaagggcagctgactaagagccctctggcacaaatggaagaagaaagaagggagcatgtagctaaaatgaagaagatggagatggagatggagcaggtgtttgagatgaaggtcaaagaaaaagttcaaaaactgaaggactctgaagctgagctccagcggcgccatgagcaaatgaaaaagaatttggaagcacagcacaaagaattggaggaaaaacgtcgtcagttcgaggatgagaaagcaaactgggaagctcaacaacgtattttagaacaacagaactcttcaagaaccttggaaaagaacaagaagaaagggaagatcttttaaactctctattgaccaccagttaacgtattagttgccaatatgccagcttggacatcagtgtttgttggatccgtttgaccaatttgcaccagttttatccataatgatggatttaacagcatgacaaaaattatttttttttttgttcttgatggagattaagatgccttgaattgtctagggtgttctgtacttagaaagtaagagctctaagtacctttcctacattttctttttttattaaacagatatcttcagtttaatgcaagagaacattttactgttgtacaatcatgttctggtggtttgattgtttacaggatattccaaaataaaaggactctggaagattttcattgaggataaattgccataatatgatgcaaactgtgcttctctatgataattacaatacaaaggttccattcagtgcagcatatacaataatgtaatttagtctaacacagttgaccctattttttgacacttccattgtttaaaaatacacatggaaaaaaaaaaaccctatatgcttactgtgcacctagagcttttttataacaacgtctttttgtttgtttgttttggattctttaaatatatattattctcatttagtgccctctttagccagaatctcattactgcttcatttttgtaataacatttaatttagatattttccatcatattggcactgctaaaatagaatatagcatctttcatatggtaggaaccaacaaggaaactttcctttaactccctttttacactttatggtaagtagcagggggggaaatgcatttatagatcatttctaggcaaaattgtgaagctaatgaccaacctgtttctacctatatgcagtctctttattttactagaaatgggaatcatggcctcttgaagagaaaaaagtcaccattctgcatttagctgtattcatatattgctatttctgtattttttgtttgtattgtaaaaaattcacataataaacgatggttgtgatgt

SEQ ID NO: 388 - protein, 418 aa, Homo sapiens
MVAQQKNLEGYVGFANLPNQVYRKSVKRGFEFTLMVVGESGLGKSTLINSLFLTDLYSPEYPGPSHRIKKTVQVEQSKVLIKEGGVQLLLTIVDTPGFGDAVDNSNCWQPVIDYIDSKFEDYLNAESRVNRRQMPDNRVQCCLYFIAPSGHGLKPLDIEFMKRLHEKVNIIPLIAKADTLTPEECQQFKKQIMKEIQEHKIKIYEFPETDDEEENKLVKKIKDRLPLAVVGSNTIIEVNGKRVRGRQYPWGIAEVENGEHCDFTILRNMKIRTHMQDLKDVTNNVHYENYRSRKLAAVTYNGVDNNKNKGQLTKSPLAQMEEERREHVAKMKKMEMEMEQVFEMKVKEKVQKLKDSEAELQRRHEQMKKNLEAQHKELEEKRRQFEDEKANWEAQQRILEQQNSSRTLEKNKKKGKIF

SEQ ID NO: 389 - DNA, 5579 bp, Homo sapiens
ggaccccggtgtctggcttcccccgagccgggaccccgcgatggccaagcgcagctcgctgtacatccgcatcgtggaggggaagaaccttcccgccaaggacatcactggcagcagcgacccctactgcatcgtgaaggtggacaatgagcccatcatcaggacagccacagtgtggaagaccctgtgccccttctggggtgaggagtaccaagtgcacctgccgcccaccttccacgctgtggctttctatgtcatggatgaggatgccctcagccgggacgacgttatcggaaaggtctgccttacaagggacaccatagcctctcaccctaagggtttcagcgggtgggcccacctgacggaggtcgaccccgacgaggaggtgcagggcgagatccacctgcggctggaagtgtggccaggggcccgggcctgccggctacgctgctctgtgctggaggccagggatctggccccaaaggaccgcaatggcacatctgaccccttcgtccgagtgcgctacaagggccggacacgggagacctcgatcgtgaagaagtcatgctacccacgctggaatgagacgtttgaatttgagctgcaggagggggccatggaggcactgtgcgtggaggcctgggactgggaccttgtcagccgaaacgacttcctgggcaaagtggtgattgatgtccagagactgcgggtggtgcagcaggaggagggctggttccggctgcagcccgaccagtccaagagccggcggcatgacgagggcaacctgggctccttgcagctggaggtgcggctgcgggacgagacggtgctgccctccagctactaccagccactggtgcacctgctgtgccacgaggtcaagctgggcatgcagggcccagggcagctgatcccactcatcgaggagacaaccagcaccgagtgtcgccaggacgtggccacgaacctgctcaagctcttcctggggcaggggctggccaaggacttcctggacctgctcttccagctggagctgagtcgcaccagtgagaccaacaccctgttccggagcaactctctggcctcaaagtccatggagtcttttctgaaggtggccgggatgcagtacctgcacggcgtcctgggccccatcatcaacaaggtgtttgaggagaagaagtacgtggagctggaccccagcaaagtggaagttaaggatgtagggtgctccgggctgcaccgcccgcagaccgaggccgaggtgctggagcagagcgcgcagacgctgcgcgcccacctgggggccctgctgagcgcgctcagccgctcggttcgcgcgtgccccgccgtggtgcgcgccaccttccgccagctcttccggcgcgtgcgcgagcgcttccccggcgcccagcacgagaatgtaccgttcatcgccgtcaccagcttcctgtgcctgcgcttcttctctcccgccatcatgtcgcccaagctcttccacctgcgggagcgccacgcggacgcccgcaccagccgcaccctgctcctgttggccaaggcagtccagaacgtgggcaacatggacacgccggcttccagggccaaggaggcttggatggagccgctgcagcccaccgtgcgccagggcgtggcgcagctgaaggacttcatcaccaagctcgtggacatcgaggagaaggacgagctggacctgcagcggacgctgagtttgcaggcgccacctgtgaaggaggggccactcttcatccacaggaccaagggcaagggccccctcatgtcctcctccttcaagaagctctacttctccctcactaccgaggccctcagcttcgcgaagatgcccagctccaagaaaagcgccctcatcaagttagccaacatccgggcagcggaaaaggttgaggaaaagagctttggcggctcgcacgtcatgcaggtcatctacacggacgacgccggcaggccccagactgcctacctgcagtgcaagtgtgtgaatgagcttaaccagtggctgtctgcgctgcggaaggtgagcatcaacaacaccggactgctgggctcctaccaccctggcgtcttccgtggggacaagtggagctgctgccaccaaaaagagaagacaggtcagggctgcgataagacccggtcacgggtgaccctgcaggagtggaatgaccctcttgaccatgaccttgaggcccagctcatctaccggcacctgctgggcgtggaggccatgctgtgggagaggcaccgggagctgagcgggggcacagaggcaggcacggtgcccacgagccctggcaaagtccccgaggactcattggcccggctgctccgggtgctgcaggacctccgcgaggcccatagctccagcccggccggctccccaccctcagagcccaactgcctcctggagctgcagacgtgaggcccgccctacgctccccttgctgagtcccctgccaagcgctcggagcccccccaggacactctgcaccccctcaccccggtcctcctcattagggtgcagggcctaggtctcttccaggtgggggaggggggagagtcaggaataaggggatccccagaagtgcagagctgagcaggcttgggcctgtcatggctggccggaagtgtccccagctccctacagacgctgtagccatcactgcctctccagggaccctcctctcctgcccaggacagacccagccagaaccactgctaggatgggccgcacccaggggtctggcctccagggacctagagaatgggagggagaacggggccccaggagacccggccgccaccccacccgctacccttgggtgccacagggctgtgctgttgccaacagtaaacctgctcttactgtccaggctctggggtcttgtgatgagggtctggggagaaagtgggcccggggggaccccggaggctgtcggtggatgtgccgatgatggggctgacagtatgggctctgggcatccctgttcccccccctttcttccccccactcttctggggtcgggggttcctttcccttcccagttgctgtccctgggtcccctctttcatgtcccacaggccacagagcccagtgtgtccaaccagctgttctctcctcaaagcagcccccaagcaagtcccttctctagggtgtccctgaggacagcacagaggcgggactcagagaccccattcctcttcacgcagcccttaccccaagccctctagctgtgtggctggcagtgttggccacgtaggggctcccatccccccaccattgtgtcacatgggctgccaggctcagctcccagctgcgtccacagtgacctggatcagggtggggacaaggactggaccctccttctccagaaggccttcagctcttgccttgccatgcagtcacctccttccccctctgaccccagatcccaaaggtgcaccgttgccccagcccctttctggccccatggggtttctctgatgccttcatcatagaggcccggggctggtccgatggttggcaaaacttgactccggcccagtccccactcttggggacttagaacccctgctgtcctgggatctggcctgcctttctttggtcagtccctgtggtcccccaccagctccccctcccatagggctgcccaccaagccctgcccccagcccaagaggagcccccactgcctgcggggcagtgatgtctggccaccggctcacaccaatgacttggtcctggggtggcagaagcagcaggtgacaggagcagggcccctgtccctctcttctggccctgtggtacccaggccacacgttgtgcccgctcttggggctgaccggctgtagggaccaccagccgctgctactgtgggccgccccggggcagggtgggcagggcttttgtgggttatgaggacacagaagtccctgaggcccccagacctggctcagccaacctccttcctcccccggttgccccccactctaaagcctcctccctcccagcgtccactggctccaggctcctcacaacagcagctcatagacacggggcgtctccaggtggtcccagccctccagatgtttctagctctccaggtgggcgctgttttcacgtctgcctgcatccattcattccttcattcctcacctttatcctgttatctctatttttttaagctaccaggaaggaaagggaagaagagatcacgaaactgggacccccagaagggaggagtgggctttgaacttagacatctacctcagagctcaaataggttgtttaaaatcacattcaattttcagatgaaggggaactttatagttttttttttttttttttttttttttggggcggagtctcactgtgttgcccaggctggagtgcaaatggcttgatcttggttcactgcaacctctgcctcccaggttcaagcaattctcttgcctcggcctcccgagtagctgggactggaggcgtgtgccaccatgcccagctaattcttgtatttttagtagagacggagtttctccatgttggccagactggtctcgaactcctgacctcaggtgatctgaccgccttggcctccgaaagtgctgagattacagttgcgagccactgtgcgtggccagaactttataataagagacttgaagctgggtgtgacggtgcacgcctctggtcccagctgctcgggaggccgggacagaaggatcaccttgaggccaggagtttaaggccagcctgggcaacatagcaaaacctagtccctaaaattaaaaaaaaaaaaaaaaaaaaaggaaaataaaggagacttgaaatttttgaactaaatagtggtgatggctacacattgtgaatgtaattaacaccactgagttaaacacttaaaatggttaaaatggcaaattgtatgttatacctattttactacaataaaaagtataaaaaagagaagatatttaggtgacttacagcaaccaattgcaacaaaacaaaatgttaagaaatgatctttttatgaggcaattggaaatttgaacactgatcaactataggatgattggaattattaatttttaaaggtgtgataagatgctgcacttggctgggcacagtggcacatgcctgtaatcccagctacttggcaggctgaggtgggagaatcgcttgagctcaggagttcgagaccagcctgggcaacgtggcgaaatccccgtctttacaaaaacaaacaaacaaacaaaaaagatattgcagttgtgttgtaagcgtccttatctttcagagctacatagtggaatgtttatggaatatttaggataaatgatataggcatttgggatttgctgcaaaatgacccagaggcaggggtcagggggagaggtagagatgagacaagaggtagaggggagaggtagaggtagccacgagctgataattacagacaagagatgcggagtatgtgggggctcattatcctgcatagtctatctttgtatatctttgaacttttcaagaataaaaaagcttaaaaagtat

SEQ ID NO: 390 - protein, 826 aa, Homo sapiens
MAKRSSLYIRIVEGKNLPAKDITGSSDPYCIVKVDNEPIIRYRPHPQDRGALSLSSARALPAKGTATVWKTLCPFWGEEYQVHLPPTFHAVAFYVMDEDALSRDDVIGKVCLTRDTIASHPKGFSGWAHLTEVDPDEEVQGEIHLRLEVWPGARACRLRCSVLEARDLAPKDRNGTSDPFVRVRYKGRTRETSIVKKSCYPRWNETFEFELQEGAMEALCVEAWDWDLVSRNDFLGKVVIDVQRLRVVQQEEGWFRLQPDQSKSRRHDEGNLGSLQLEVRLRDETVLPSSYYQPLVHLLCHEVKLGMQGPGQLIPLIEETTSTECRQDVATNLLKLFLGQGLAKDFLDLLFQLELSRTSETNTLFRSNSLASKSMESFLKVAGMQYLHGVLGPIINKVFEEKKYVELDPSKVEVKDVGCSGLHRPQTEAEVLEQSAQTLRAHLGALLSALSRSVRACPAVVRATFRQLFRRVRERFPGAQHENVPFIAVTSFLCLRFFSPAIMSPKLFHLRERHADARTSRTLLLLAKAVQNVGNMDTPASRAKEAWMEPLQPTVRQGVAQLKDFITKLVDIEEKDELDLQRTLSLQAPPVKEGPLFIHRTKGKGPLMSSSFKKLYFSLTTEALSFAKTPSSKKSALIKLANIRAAEKVEEKSFGGSHVMQVIYTDDAGRPQTAYLQCKCVNELNQWLSALRKVSINNTGLLGSYHPGVFRGDKWSCCHQKEKTGQGCDKTRSRVTLQEWNDPLDHDLEAQLICRHLLGVEAMLWERHRELSGGAEAGTVPTSPGKVPEDSLARLLRVLQDLREAHSSSPAGSPPSEPNCLLELQT

SEQ ID NO: 391 - DNA, 4710 bp, Homo sapiens
cacaatgacatgcagacctgcatattggagctggacggagaaactgggctaatgtgacagacagcaacaagagtaaggcagttgcttcgctattgagagaaagaaccatatgaagaaatttcggcagaggcggaccgggaacctcagcagctgcagaactactggtcagaagtgcgctacacggtgcgctgcatctaccgccaggcaggaaccccgctggcagatgaccaggaccagtctctggtgcctgacaaggagggagtgaaggagctcgtggataggctctgcgagagggacccctaccagctgtaccagcgtctggaacagcaagctcgagagtatgtgctggagatgaaggtccgcctgctccggcagctgtcggctgcggccaaggtgaaggcaccatctggcctgcagggcccgccgcaagcgcaccagttcatctccctcctgcttgaggagtacggcgccctctgccaggccgcacgctccatcagcaccttccttggcactctggaaaatgaacacttgaaaaagttccaagtgacgtgggaactgcataataaacacctgtttgaaaatctggtcttttcggagccacttcttcagagcaacttgcccgcactggtgtcacagatcaggctaggaaccaccacacacgacacctgcagtgaggacacatacagtaccttgctgcagaggtaccagcgttccgaggaggagctgcgcagagtcgccgaggagtggctggagtgccagaagaggatcgacgcctatgtcgacgagcagatgacaatgaaaaccaagcagcgcatgttaacagaagactgggagctttttaaacaaagaagattcattgaagaacagttaaccaataagaaagcagttactggcgagaacaacttcacagacaccatgaggcacgtgttatcgtcccggctgagcatgcccgactgccccaactgcaactacaggagaagatgtgcttgcgatgactgcagtctctcacacatcctcacgtgtggtatcatggacccccccgtcactgatgacatccacattcaccagctcccacttcaagtggatcctgctcctgactatcttgctgagaggagcccgcccagtgtgtcatctgcaagctcggggtccggctccagctctcccatcacaattcagcagcaccccaggctcatcctcacagacagtggctcggcaccaactttttgtagtgatgatgaagatgttgcaccattgtcagccaaatttgctgatatttatccattgagtaattatgatgataccgaggtggtggccaacatgaatggaatccacagcgaattgaatggtggcggggaaaacatggccctgaaggatgagtctcctcagataagcagtaccagcagtagttcctcagaagctgatgatgaagaagcggacggcgagagtagtggggagcccccaggggccccgaaggaagatggagtgctgggaagcaggagccccaggacagaggagagcaaagcagacagtccacccccatcctacccaacacagcaggctgaacaagctccaaacacttgtgaatgtcatgtttgtaagcaagaagcttctggactgacaccatctgcaatgacagccggagcccttcctcctggccatcagttcttgagcccagagaagcccacacaccctgcactgcacctttaccctcacatccatggacatgtgcctttgcacactgttccacacctgccacgccctctcatccaccccaccttgtatgcaacgccccccttcacacacagtaaggctttaccgccagcacctgttcagaatcacacaaataagcatcaggtattcaatgcatctcttcaagaccatatttatccgagctgttttgggaatactccagagtggaatagttctaaatttataagtctttggggatcagaagtgatgaatgataagaactggaatcctggcactttcttgccagatacaatttctgggagtgaaatattagggccaacactctcagaaacaagaccggaagcccttccacctccatctagcaatgaaacacctgcagtctcggatagtaaagagaaaaagaatgctgcaaaaaagaaatgtttatacaatttccaagatgctttcatggaagcaaataaagttgtcatggccacgtcatcagccacgtcctctgtgtcctgcacagctaccacagtgcagtccagcaacagccagttcagagtgtcatccaagagacctccttcagtaggtgacgtgtttcatggcatcagcaaggaggaccacagacactcggccccagccgccccgaggaatagccccacgggcttggcccccctcccagcgctctcgcctgctgcgctgtcacctgctgcgctctcacctgcctccacacctcaccttgcaaatcttgcagccccatcattccccaaaacagcaaccacaactcctgggtttgtggacacacgcaagagtttctgtcctgcacccctacccccggccacagatggctccattagcgcccctccaagtgtctgcagtgaccctgactgcgaagggcaccgctgcgagaatggtgtctacgacccacagcaggatgatggggacgagagtgcagatgaggacagctgctctgagcacagctccagcacctcgacctccaccaaccagaaggagggcaagtactgcgactgctgctactgcgaattctttgggcacggcgggcctccagctgcaccaacaagtagaaattatgcagaaatgagggaaaagcttcgcttacggctgaccaagaggaaagaggagcaacctaaaaaaatggaccagatctcagaaagggaaagcgtcgttgaccatcggagggtggaggatttgttgcagtttataaatagctccgaaaccaaaccagtgagcagcacgcgtgcagcgaagcgagcaaggcataagcaaaggaagctggaggagaaagctcgcctagaagcagaggccagggcccgggagcacctgcacctccaggaggagcagaggcggcgggaggaggaggaggatgaggaagaagaggaggatcgtttcaaggaggaatttcagcggcttcaggagcttcagaagctaagagctgtaaaaaagaagaagaaggagaggccaagtaaagactgccccaagttggacatgctcactagaaatttccaggcagcaacagagtctgttcctaactctggaaacatccacaatggctcactagagcaaactgaagaaccagaaacctcttctcactccccatccaggcatatgaaccactcagagcccaggccagggctaggggctgatggggatgctgcagaccccgtcgacaccagagactccaaatttctcctccccaaggaggtgaatgggaagcagcatgagccactctcttttttcttcgacatcatgcagcaccataaagaaggaaatggcaagcagaagctgaggcagaccagcaaggccagcagcgagccagcgaggaggcccacagagccccccaaggccacagaggggcagtccaagccccgggcccagactgagtcaaaggctaaggtggtcgacctcatgtccatcacagagcagaaaagagaggagagaaaagtcaacagtaataacaataacaaaaagcagctgaaccacatcaaggacgaaaagtcaaacccaacccctatggagcccacctctcccggtgagcatcagcagaacagcaagctggtgctggcagagtcccctcagccaaagggcaagaacaagaaaaataagaagaagaaaggagacagagtcaacaattcaattgatgatgtctttctacctaaagatattgacctagacagtgtggatatggatgagacagagagggaagtggaatatttcaaaaggttctgcttggattctgctagacagacccgacaaagactgtctatcaactggtccaattttagcttgaaaaaagccacctttgctgcccactgaatgaggactccctggagagggacacgcgagaggcaggccaggctgcaccaccccaagagccacgcccctcgctggcgccccagagccgtggtgcttgccaagggctgtgcggagctggtgctgcctgaaaccccagaccgagaagttgatgctcggcccacgccgttagctcgtgtgcgtgtagtctgtgcgtgagactccttcgattgtagctctgtgctgtcggattggaacagtagttcccgccaagtcctcccaccaccgcggcctcggaggcctgggccgtggccagataggagtttgcatcatccacgtggctccgttgcctctgcattgcgccctgtcctgtcatgtgtcctcaccggggtatcggccgtcactcagctctcctgtgcccctgcgtctcaccctaggcgggctgggcggggcaggcctcctttgttctccacaatctactgtctccgagtgtacacgttgcgctgtttgtgtttgatccccctgacttgtagccagcttgtgtaagatcccttgcagaacgagaaagttaaaaacaagcccacccagtactcacaccatcaagtctgttatagagtgtacgactgtattaacacggaggcctgcctggctacttttttaacatattgttaagtaatattaaaatcatgtctttctttttgaaagatg

SEQ ID NO: 392 - protein, 1224 aa, Homo sapiens
MKVRLLRQLSAAAKVKAPSGLQGPPQAHQFISLLLEEYGALCQAARSISTFLGTLENEHLKKFQVTWELHNKHLFENLVFSEPLLQSNLPALVSQIRLGTTTHDTCSEDTYSTLLQRYQRSEEELRRVAEEWLECQKRIDAYVDEQMTMKTKQRMLTEDWELFKQRRFIEEQLTNKKAVTGENNFTDTMRHVLSSRLSMPDCPNCNYRRRCACDDCSLSHILTCGIMDPPVTDDIHIHQLPLQVDPAPDYLAERSPPSVSSASSGSGSSSPITIQQHPRLILTDSGSAPTFCSDDEDVAPLSAKFADIYPLSNYDDTEVVANMNGIHSELNGGGENMALKDESPQISSTSSSSSEADDEEADGESSGEPPGAPKEDGVLGSRSPRTEESKADSPPPSYPTQQAEQAPNTCECHVCKQEASGLTPSAMTAGALPPGHQFLSPEKPTHPALHLYPHIHGHVPLHTVPHLPRPLIHPTLYATPPFTHSKALPPAPVQNHTNKHQVFNASLQDHIYPSCFGNTPEWNSSKFISLWGSEVMNDKNWNPGTFLPDTISGSEILGPTLSETRPEALPPPSSNETPAVSDSKEKKNAAKKKCLYNFQDAFMEANKVVMATSSATSSVSCTATTVQSSNSQFRVSSKRPPSVGDVFHGISKEDHRHSAPAAPRNSPTGLAPLPALSPAALSPAALSPASTPHLANLAAPSFPKTATTTPGFVDTRKSFCPAPLPPATDGSISAPPSVCSDPDCEGHRCENGVYDPQQDDGDESADEDSCSEHSSSTSTSTNQKEGKYCDCCYCEFFGHGGPPAAPTSRNYAEMREKLRLRLTKRKEEQPKKMDQISERESVVDHRRVEDLLQFINSSETKPVSSTRAAKRARHKQRKLEEKARLEAEARAREHLHLQEEQRRREEEEDEEEEEDRFKEEFQRLQELQKLRAVKKKKKERPSKDCPKLDMLTRNFQAATESVPNSGNIHNGSLEQTEEPETSSHSPSRHMNHSEPRPGLGADGDAADPVDTRDSKFLLPKEVNGKQHEPLSFFFDIMQHHKEGNGKQKLRQTSKASSEPARRPTEPPKATEGQSKPRAQTESKAKVVDLMSITEQKREERKVNSNNNNKKQLNHIKDEKSNPTPMEPTSPGEHQQNSKLVLAESPQPKGKNKKNKKKKGDRVNNSIDDVFLPKDIDLDSVDMDETEREVEYFKRFCLDSARQTRQRLSINWSNFSLKKATFAAH

SEQ ID NO: 393 - DNA, 2227 bp, Homo sapiens
gagagcccgaacaggaagagggtacagctttgtgcaggtcacatgcccactgcagccctccagcctctggtccccagagcggactttggaagctgaactgcttttgttgctggaagacttatgttataatttaccctgggtggaccagggtcgtacaaaagggcaacgctccccagtccccccactcccgaccccggaatcatgcatcggactacacggatcaaaatcacagagctgaacccccacctcatgtgtgccctctgcggggggtacttcatcgacgccaccactatcgtggagtgcctgcattccttctgcaaaacctgcatcgtgcgctacctggagaccaacaaatactgccccatgtgtgacgtgcaggtccataaaacccggccgctgctgagcatcaggtctgacaaaacacttcaagacattgtctacaaattggtccctgggctttttaaagatgagatgaaacggcggcgggatttctatgcagcgtaccccctgacggaggtccccaacggctccaatgaggaccgcggcgaggtcttggagcaggagaagggggctctgagtgatgatgagattgtcagcctctccatcgaattctacgaaggtgccagggaccgggatgagaagaagggccccctggagaatggggatggggacaaagagaaaacaggggtgcgcttcctgcgatgcccagcagccatgaccgtcatgcatcttgccaagtttctccgcaacaagatggatgtgcccagcaagtacaaggtggaggttctgtacgaggacgagccactgaaggaatactacaccctcatggacatcgcctacatctacccctggcggcggaacgggcctctccccctcaagtaccgtgtccagccagcctgcaagcggctcaccctagccacggtgcccaccccctccgagggcaccaacaccagcggggcgtccgagtgtgagtcagtcagcgacaaggctcccagccctgccaccctgccagccacctcctcctccctgcccagcccagccaccccatcccatggctctcccagttcccatgggcctccagccacccaccctacctcccccactcccccttcgacagccagtggggccaccacagctgccaacgggggtagcttgaactgcctgcagacaccatcctccaccagcagggggcgcaagatgactgtcaacggcgctcccgtgccccccttaacttgaggccagggaccctctcccttcttccagccaagcctctccactccttccactttttctgggcccttttttccacttcttctactttccccagctcttcccaccttgggggtggggggcgggttttataaataaatatatatatatatgtacataggaaaaaccaaatatacatacttattttctatggaccaaccagattaatttaaatgccacaggaaacaaactttatgtgtgtgtgtatgtgtggaaaatggtgttcattttttttggggggggtcttgtgtaatttgctgtttttgggggtgcctggagatgaactggatgggccactggagtctcaataaagctctgcaccatcctcgctgtttcccaaggcaggtggtgtgttgggggccccttcagacccaaagctttaggcatgattccaactggctgcatataggagtcagttagaattgtttctttctctccccgtttctctccccatcttggctgctgtcctgcctctgaccagtggccgccccccgcgttgttgaatgtccagaaattgctaagaacagtgccttttacaaatgcagtttatccctggttctgaggagcaagtgcagggtggaggtggcacctgcatcacctcctcctcttgcagtggaaactttgtgcaaagaatagatagttctgcctcttttttttttttttcctgtgtgtgtggcctttgcatcatttatcttgtggaaaagaagattcaggccctgagaggtctcagctcttggaggagggctaaggctttagcattgtgaagcgctgcacccccaccaaccttaccctcaccggggaaccctcactagcaggactggtggtggagtctcacctggggcctagagtggaagtgggggtgggttaacctcacacaagcacagatcccagactttgccagaggcaaacagggaattccgccgatactgacgggctccaggagtcgtcgccacactcg

SEQ ID NO: 394 - protein, 344 aa, Homo sapiens
MHRTTRIKITELNPHLMCALCGGYFIDATTIVECLHSFCKTCIVRYLETNKYCPMCDVQVHKTRPLLSIRSDKTLQDIVYKLVPGLFKDEMKRRRDFYAAYPLTEVPNGSNEDRGEVLEQEKGALSDDEIVSLSIEFYEGARDRDEKKGPLENGDGDKEKTGVRFLRCPAAMTVMHLAKFLRNKMDVPSKYKVEVLYEDEPLKEYYTLMDIAYIYPWRRNGPLPLKYRVQPACKRLTLATVPTPSEGTNTSGASECESVSDKAPSPATLPATSSSLPSPATPSHGSPSSHGPPATHPTSPTPPSTASGATTAANGGSLNCLQTPSSTSRGRKMTVNGAPVPPLT

SEQ ID NO: 395 - DNA, 1433 bp, Homo sapiens
taggaagaagcgctcaacacagaacaccctaagtatccctactccctttcaaggactaaatcccttcagagatttcctttgcttcagtccttcaggagcctcccgaagatgctaggagtcgtttaagaaggctggaagatggccgttgggaaggaactgttggtagctggcaatacttcatcccaaggaggcggtggcaatagctccctgggcagcagacatcatggattttcctccctctgggaaccagaggtccctccgtttctggtttgaatcccttagagacaaagaacttcattctctcccatacccgcgtgggactgctggggaggagagggggtggaggggttagacttctacccccatttggaagtacagaaagaaagactcctgttaaaaagctggctcctgaattttcaaaagtcaaaacaaaaactcctaagcactctcctattaaagaggaaccctgtggttccttatctgaaactgtttgtaaacgtgaattgaggagccaagaaaccccagaaaagccccggtcttcagtggacaccccaccaagactctccactccccaaaagggacccagcacccatcccaaggagaaagccttctcaagtgagatagaagatttgccgtacctttccaccacagaaatgtatttgtgtcgttggcaccagcctcccccatcaccgttaccattacgggaatcctctccaaagaaggaggagactgtagcaagtaaggcatagagaacacttgctcttataccctagtggtggcggtcaagctaacaagtgtgaaaatgcctttggcatttttaaaaaagtgcaatcaataaagcagagttctgtcaagaatgagtaagttaacagccagagacagacactgtgcaggcattgcaaatagatggaattacagcaaaatgtgctcaatgtatttgcctgcttacaacactgggagatgtgtttgccagtaagttgctcatcacaagagcaccagacttgggggtgtaatctccggcaacttgcatgccctctgaaagaagggttttctgtgctgtgaaatgcatagaactatactttgccatgcacgactgttcctgcaattgatattgtgtgaaatctgggagggtggtctttgggtgttctcaggggccaatggtaatttttgggttggggagccagcttggggtggggaattttcacctgggcctccgctctttaactatataaacatttatctgtatatctatgtccctgtctggggggcaggaggaatctgccaaagaccaacagtcttactttatcttactatacttcacaaaggttctaaaatgtgaagagtttacttggattgcagtagcccattggttgttcatatatttaaataaaatggtctacaaactatttttcaaacaaaaaaaaaaaaaaaaa

SEQ ID NO: 396 - DNA, 6657 bp, Homo sapiens
agccggtccaaggcggtgcgctgggggccggggcgcgtcgcaggaaaggacttagaagccttacaaatacatctgtgcattcttgcttcagactttacaactgagggccagcccagtctggaagcatctcttattaatgttacaaggaaaccgctacctcagcaaacaaaaggaatggaggaggagacttacaacaaacgccatttaaaaaaaaaagaaaaacttgttttcaggaaacattagaggaaatttggagaatttcagcattgcatagaagcagccttacaggtaaacggatttgacgggcaggctctgtcaaaattctgcagaagtttgatcttccttcttaaggactttgtgtgaagtaattctttactgcttttaaattgctgttgatcagcttctgggtttttgggttctaacttttttgggtatattgaagacacagtgtattacattatattacatttttaaacgttaagttatttttctgccattgtaaatacaagtatcaaaatattcttgcaaagaagtaaacatttttctcagcaagcatatccttttagtaagagagtggaatgctaaacagttcttatccagcattttggacatcttttattttttgtcagagatcctgtctacactgaaaatattaattatataaacctgttgtctctcacctctacattggatcacatggtcacctgcctcatggaaatgccttttttaaaacttcgatttgcagaactccactatttttatacctagctacagttttgagaaagaagaatcagaaccctgacccacttacggttgctgggacaattccccctcccgcatgtattgctgcagtgcccaggacagtaaaatggactacaagcggcgcttcctgcttggcgggtccaagcagaaggtgcagcagcaccagcaatacccgatgcctgagctgggccgagcactgagtgctcccctggcatccacggccaccactgcccccctgggcagtctgaccgctgcaggcagctgccaccatgccatgccccacactactcctatcgccgacatccagcagggcatctccaagtatctggatgccctgaacgtcttctgccgtgccagtactttcctcacagatctcttcagcactgtgttcaggaactctcactactcaaaggcagccacacagctcaaagatgtgcaggagcatgtcatggaagtagccagtcggctgacctcggccataaagcctgagatcgccaagatgctaatggaacttagtgctggggctgcaaattttacggatcagaaggaattcagtctccaggacattgaggtgttggggcgatgtttcctgactgtggtgcaagtccatttccagtttttgactcatgcgttacagaaggtccagccggtggctcactcttgctttgctgaggtcatcgtgccagaaaaaaagaacagcggcagtggcggcggcttatctggcatgggccacacacctgaagtagaggaagctgtgcggtcctggcggggggctgctgaggcgacatctagactaagagaaagaggctgtgatggttgcctggcaggaattgaagttcaacaactcttttgttctcaaagtgcagcaattcctgagcaccagctaaaagaactgaacataaaaatcgacagtgctttgcaagcatataagatagctctggaaagcttaggacactgtgaatatgcaatgaaagccggcttccacctgaatccaaaggcgattgaagcaagtttgcagggctgctgcagcgaggcggaagcccagcagacggggcggaggcagacacccccgcagcccatgcagtgtgagctccccaccgtccctgtgcagataggatcgcacttcctgaagggcgtctcctttaatgagtcggccgccgacaatctgaaacttaagacgcatacaatgttacagctgatgaaggaggcaggctgctataatggaatcacatccagggatgattttcctgtgactgaagtgctgaaccaggtttgcccttccacatggcgaggtgcctgcaagacggcggtgcagctgctgtttggccaggctggactggtggtggttgacacagcacagattgagaataaagaagcctatgccccccagatcagtttagaaggctctagaatcgtggttcaagtcccatccacatggtgcctgaaagaagaccctgctaccatgtccctgctgcagagaagccttgatcctgagaagaccctgggtctagtggacgtgctctacacagctgtgctggacctaaaccgctggagggctggaagggagcaagctttaccctgcatacagatccagctgcaaagggagatctgtgattttggcaaccaggctgacctgccttctggaaatggaaacaaatcttcaggtggcctgcagaagacattctccaaactgacatcccggttcaccaagaaagcttcatgtaccagctccagcagcagcacaaattattccatccaaaataccccttccaaaaacatcttcatagctggatgttccgaagagaaggccaaaatgcctggcaatattgatacaaggttacaaagcattttgaacattggtaatttccccaggactacagacccttcacagtcagctcagaattccagtaatacagtggccaatggctttctcatggagaggcgtgagaacttcctgcatggagatgacggcaaggatgagaagggtatgaacttaccaactgatcaggaaatgcaagaggtgatagattttctctcgggctttaacatgggccagtcacatcagggctctccgttggtgacaaggcataattctgctgccacagccatggtgactgagcagaaggcaggagccatgcaaccacagcagccgtcactgcctgtgccccctccaccacgggcaccccaggctggggcacacacacctctgacaccccagccgggactggcacctcagcagcagtccccaaagcagcaacaacctcaagtccaatactaccaacacctactccagcccattggaccgcagcagcccccgccccagcctcgggcacctgggaaatgggtacatggctcatcccagcagccagcgcaggctgttggagcaggtctgtctcctcttggtcagtggcctggcatatctgatctcagttctgacttgtacagcttgggtctggtgagcagctatatggataatgtgatgtcagaggttctgggacagaagccgcagggacctagaaataacacctggcccaaccgtgaccaaagtgatggagtctttggaatgctgggagagattctgccttttgatcctgcagtgggctcagacccagagtttgcacgctatgtggcaggagtgagccaggcgatgcagcagaagcggcaggcccagcacggtcgccggccaggcaacccccggggcaactggccgcctatggatgacgcgcatcggacctggcccttccccgagttcttcacagaaggggatggcctgcacggtggctggtcgggtgctcagggagactctgccagctcgagtgatgagacatcctcagccaacggggacagcttgttctccatgttttcagggcctgacctcgttgctgctgtcaagcagagaaggaaacacagcagtggagagcaagacaccagcacgctgccctcaccacctctcctcaccacggtggaggatgtgaaccaggataacaaaaccaaaacgtggccacccaaagcaccctggcagcacccttccccgcttcccagcacgctgcccagccccagcgcaccactctatgcagtcaccagccctggcagccagtggaacgacaccatgcagatgctgcagtccccagtgtgggccgcaaccaacgactgcagtgccgctgccttctcctatgtgcagaccccaccccagcccccacccccaccagcacacaaggcagcacccaagggcttcaaggccttccctgggaagggtgagcgcaggccagcctatctgccccagtactgaccccaggccagccagcctgcctgcctgcctgcctgcccgcccagagctgtggggatgagtgtccccaccccagggccacttagctgacaccagcccctcagaggaccagtgcgccccatcccagggagggttccttggggacaagggtggttggcagctccaagcctttaaacctggcttctgaaacgatggcatcagagccctggagagccagctggagacacaggcgtctggccttcaggggcttgctagggaacctgcatgcctagtaagcgccacaggtgactctgatgcaggcgccacagccacacttgaagaaacacagctcttgggtttttagtcctgctgtgtgttgggaagacatcaggcctgaagctgagggcataactgaccattttttggaaaccctctcctccctcctccacaccttgagtgatgaccacaccaatcactgtattttatagctttttttttcatgtaggtttttagttaaaacatctcctgcctaaaatgcattgaatattttaagataacagatatactggctggaggtttgtttaacactatctatatttaagcttatacaaaatgggcaaaatatagaatatttgtgattggaagcagtcacctggggtttctgggggtggacagttcctcgccacccagcagcaccctgggactgcggcctttcccagctttattgaagcagaatggtggaacttgtgccggaggtacactgctgaaggtgcgtggcggtggaccagccagctgctgtccatgtgcagagcaaggctgcacctgctgcccttcgatccttccacacatggccaggacactgccacaatcctcggggtgtggtcaaggggcactcagagacacctgcactagaaattgcattgacattgtgagctggctcagaagacaaaccaattaagatgtagatagaaattaatttaaggtcttttcttaaaaaaaaaatccacctcattttcagttaacatgtgccattaaatagataacatcctgtggatttagggatattttccagccagaatggatccagaagaattgaatggtgcttaaattgagaaataataataaatatatctatatagaatagacatatcccactgtatattaattgaggttacagaaagttctttatataaaacttatttaaatttttcatatttcatctttgaaaaagtctgagaaaaatccataatattttctggtatgaaagtttgacagtattaatattttttttatattttcttaaatcattaaaccattttaatatatgttaactactaataaatggtttattctttctaactccatataagcttttccagcaaagattgtaataacacatttatgttctcgtttttctacagatataagtaaatttatatataaaaataccaaaaagaggctgggcgtggtggctcacgcctgtaatcccagcactttgggaggccgaggcaggtggatcacctaaggtcaggagttcgagaccagcctggccaatatggtgaaaccccatctctactaaaaatacaaaaattagccgggtgtggtggcgtgcgcctgtagtcccagctactcgggaggctgaagcagaagaatcgcttgaacccgggaggcggaggttacagtgagctgagattgtgccactgcactccagcctgggtgacagagtgagattccgtctcaacaagaaaaaaaaaaaagaatatatatatatgtatgtatgtatgtatgtaaacacacacactaatttgagaggacccgtagggtgtctgagcccagccacctgagtttttagtactgtgttgtcaggctcttcccaggcctcaggtgttgtcttttgtgctgtgtggggatgcattgctgcctgtatttatgatcttttgccgtggttctgagcattcacctcaccatgtttacaaagaactgttttgtatatagacattttcaggcacgtgctttgcaccaaccctgcgtggctcttgtctgtgttagctgtcacggtgtgcacactaatctctgttaaagttgtctatggctgttctacttgtaagatagttttctatttccttcagtaatgtgtccacagtaccctgtatttcgagttccattatactgaagtactcatgttttaatagtgcctctccaaaggcctcaccttggacagaggtcaatccttgatgctccagcacaggtgacgtcactaattgtcactttccagtttgtttttctctattaaggaagacattttctaattgcatctccatgggctgtgagactgtgtgaagccgtttgtgtggtctccatgtaggtgctgtgttcccggcaccgccttgctctgaacactggtaattccaggtgctgcgcttggcagaggggtctcgccaaagcgcatgtgtgtgcatgtgtgaacgtgtgtgtcctttgcatggttgggcgtgggtgccttgctagggcatcagcaggacattgtgtgtatagttacaatgcttccaaactggaactctacattttgtatcttttaaagctcctataagtaaaataactattggctttattaaaaatatacatttaat

SEQ ID NO: 397 - protein, 1070 aa, Homo sapiens
MYCCSAQDSKMDYKRRFLLGGSKQKVQQHQQYPMPELGRALSAPLASTATTAPLGSLTAAGSCHHAMPHTTPIADIQQGISKYLDALNVFCRASTFLTDLFSTVFRNSHYSKAATQLKDVQEHVMEVASRLTSAIKPEIAKMLMELSAGAANFTDQKEFSLQDIEVLGRCFLTVVQVHFQFLTHALQKVQPVAHSCFAEVIVPEKKNSGSGGGLSGMGHTPEVEEAVRSWRGAAEATSRLRERGCDGCLAGIEVQQLFCSQSAAIPEHQLKELNIKIDSALQAYKIALESLGHCEYAMKAGFHLNPKAIEASLQGCCSEAEAQQTGRRQTPPQPMQCELPTVPVQIGSHFLKGVSFNESAADNLKLKTHTMLQLMKEAGCYNGITSRDDFPVTEVLNQVCPSTWRGACKTAVQLLFGQAGLVVVDTAQIENKEAYAPQISLEGSRIVVQVPSTWCLKEDPATMSLLQRSLDPEKTLGLVDVLYTAVLDLNRWRAGREQALPCIQIQLQREICDFGNQADLPSGNGNKSSGGLQKTFSKLTSRFTKKASCTSSSSSTNYSIQNTPSKNIFIAGCSEEKAKMPGNIDTRLQSILNIGNFPRTTDPSQSAQNSSNTVANGFLMERRENFLHGDDGKDEKGMNLPTDQEMQEVIDFLSGFNMGQSHQGSPLVTRHNSAATAMVTEQKAGAMQPQQPSLPVPPPPRAPQAGAHTPLTPQPGLAPQQQSPKQQQPQVQYYQHLLQPIGPQQPPPQPRAPGKWVHGSSQQPAQAVGAGLSPLGQWPGISDLSSDLYSLGLVSSYMDNVMSEVLGQKPQGPRNNTWPNRDQSDGVFGMLGEILPFDPAVGSDPEFARYVAGVSQAMQQKRQAQHGRRPGNPRGNWPPMDDAHRTWPFPEFFTEGDGLHGGWSGAQGDSASSSDETSSANGDSLFSMFSGPDLVAAVKQRRKHSSGEQDTSTLPSPPLLTTVEDVNQDNKTKTWPPKAPWQHPSPLPSTLPSPSAPLYAVTSPGSQWNDTMQMLQSPVWAATNDCSAAAFSYVQTPPQPPPPPAHKAAPKGFKAFPGKGERRPAYLPQY

SEQ ID NO: 398 - DNA, 878 bp, Homo sapiens
gcgcgggcagggccgcacgagctggctggctgcttgcacccacatccttctttctctgggacctggggtcgcggttacttgggctggccggcgaacccttgagtggcctggcggggagcgggcctcgcgcgcctggagggccctgtggaacgaagagaggcacacagcatggcagaaaaccgagagccccgcggtgctgtggaggctgaactggatccagtggaatacacccttaggaaaaggcttcccagccgcttgccccggagacccaatgacatttatgtcaacatgaagacggactttaaggcccagctggcccgctgccagaagctgctggacggaggggcccggggtcagaacgcgtgctctgagatctacattcacggcttgggcctggccatcaaccacgccatcaacatcgcgctgcagctgcaggcgggcagcttcgggtccttgcaggtggctgccaatacctccaccgtggagcttgttgatgagctggagccagagaccgacacacgggagccactgactcggatccgcaacaactcagccatccacatccgagtcttcagggtcacacccaagtaattgaaaagacactcctccacttatcccctccgtgatatggctcttcgcatgctgagtactggacctcggaccagagccatgtaagaaaaggcctgttccctggaagcccaaaggactctgcattgagggtgggggtaattgtctcttggtggcccagttagtgggccttcctgagtgtgtgtatgcggtctgtaactattgccatataaataaaaaatcctgttgcactagtgtcctgccaaaaaaaaaaaaaaaaaaaaaaaaaaaaaaaaaaaaaaaaaaaaaaa

SEQ ID NO: 399 - protein, 140 aa, Homo sapiens
MAENREPRGAVEAELDPVEYTLRKRLPSRLPRRPNDIYVNMKTDFKAQLARCQKLLDGGARGQNACSEIYIHGLGLAINHAINIALQLQAGSFGSLQVAANTSTVELVDELEPETDTREPLTRIRNNSAIHIRVFRVTPK

SEQ ID NO: 400 - DNA, 1285 bp, Homo sapiens
tcccccatcccagcccgccccctcggccgctccgcgtccctggcgtgactcggcactgagagtcccgggagaagactcggcggtcgcacctcttctgtccaggcctcggccttcctgagcatctctccttcctctcccagatcgtcttctccttcagtttcaaagccagtggcgtcgcggccaccctgccgggctctctgtgaggatggtgggggtgaagcccgtcgggagcgacccggatttccagccagagctgagcggcgcgggctccagactcgccgtggtcaagttcaccatgagagggtgtgggccatgtttgaggattgccccagcattcagttctatgagtaataaatatccacaggctgttttcttggaagtcgatgtacatcagtgtcagggaacagctgccaccaacaatatatcagcaacacctacatttttgttttttcgaaacaaagtgagaattgatcaatatcaaggagcagatgctgtgggattagaagaaaaaatcaagcagcacttagaaaatgaccctggaagcaatgaggacacagatattccaaaaggctatatggatttaatgccttttattaacaaagctggttgtgaatgtcttaatgaaagtgatgagcatggatttgacaactgtttacgaaaagacacaaccttcttggaatctgactgtgatgaacagctgcttattactgtggcattcaatcaacctgttaagctttattccatgaaatttcaagggccagataatggtcagggccctaaatatgtaaaaatttttatcaacctaccccgatctatggattttgaagaggcagaaagaagtgaaccaactcaagctctggaactgacagaggatgatattaaagaagatggcattgttccacttcgttatgttaagtttcagaatgttaacagtgtaactatatttgttcagtcgaatcaaggtgaagaggaaacaacaagaatttcatattttacttttattggtactccagtccaggcaacaaatatgaatgacttcaaacgagtagttggcaaaaaaggagaaagccactaaggtacaaaagacactggacaaccatattgcaatcagatctacagctcctggataattgcttgattctcgccagagactgtcaatgtttcattcattgccattaccaataaatcattgcttttgttcagatggtatcactagtgtttccattgtaatcttgacacatgcaattgtaaataaaagtcaccacttttgccaagcttaaaaaaa

SEQ ID NO: 401 - protein, 289 aa, Homo sapiens
MVGVKPVGSDPDFQPELSGAGSRLAVVKFTMRGCGPCLRIAPAFSSMSNKYPQAVFLEVDVHQCQGTAATNNISATPTFLFFRNKVRIDQYQGADAVGLEEKIKQHLENDPGSNEDTDIPKGYMDLMPFINKAGCECLNESDEHGFDNCLRKDTTFLESDCDEQLLITVAFNQPVKLYSMKFQGPDNGQGPKYVKIFINLPRSMDFEEAERSEPTQALELTEDDIKEDGIVPLRYVKFQNVNSVTIFVQSNQGEEETTRISYFTFIGTPVQATNMNDFKRVVGKKGESH

SEQ ID NO: 402 - DNA, 4469 bp, Homo sapiens
cgcccgagttgccggagacgcccggccctctctgcctgccggctgggctgcccaccgccctccctccccgccctgccgccctgggagctccccggccgtcgccgcggggcccgggactcgctcgctcctccctccttcccaccgggctagggcggcggcggcagcgggggcggcagagaccatcacgggaggaggcagctgcggcggggccgaatcctaatgtacctggctagctggtggtgagtaggggctttggggccaacttggtgggctccccaaggaaacccctttgaaaccaatggatgcattcacgggctcgggtctcaagaggaagtttgatgatgtggatgtgggctcatcagtttccaactcagatgatgagatctccagcagtgatagtgctgacagctgcgacagcctcaatcctcctaccactgccagcttcacacccacatccatcctgaagcggcagaagcagctgcggaggaagaatgtacgctttgaccaggtgactgtatactactttgcccggcgccaaggttttaccagtgtgcccagccagggtggtagctctctgggcatggcccagcgccataactctgtacggagctatacactctgtgagtttgcccaggaacaggaggtgaaccatcgagagattctgcgtgagcacctgaaggaagagaaactccatgccaagaaaatgaagctgaccaagaatgggacagtggagtcggtggaggctgatggcctgacgctggatgatgtgtcagatgaagatattgatgtggaaaatgtggaggtggatgattacttcttcctgcagcctctgcccaccaaacggcgacgggccctgctgagggcttctggggtccaccgtattgatgctgaagagaagcaagaacttcgagccatccgcctgtcacgggaagaatgtggttgtgactgccgactgtattgtgacccagaagcgtgtgcctgcagccaggctgggattaaatgccaggtggatcgcatgtcctttccatgtggctgctcccgggatggctgtgggaacatggcaggacgcattgaatttaatccaatccgggtccggactcattacctccacaccattatgaagctggagctggagagcaagcggcaggtgagccgcccagcagccccagatgaggagccctccccgactgccagttgcagcctgacaggagcacagggctctgagacccaggacttccaggagttcattgctgagaatgagacagcagtgatgcacctgcagagtgcagaggaactggagcggctcaaggcagaagaagattccagcggctctagtgccagcctggactcgagcatcgagagcctgggtgtgtgcatcctagaggagcctctggctgtccccgaagagctgtgcccaggccttacagcccccattctcatccaggctcagctgcccccaggctcctctgtcctgtgttttaccgagaactcagaccacccaactgcctcaacggtgaacagcccatcctacttgaacagtgggcccctggtctattatcaagtggagcagaggccagtcttgggagtgaaaggagagcctggtacggaagaaggctcagcctctttcccaaaggagaaggatctgaatgtcttctctctccctgttacctcactcgtggcttgtagctccacagacccagctgccctctgtaaatcagaggtggggaaaacacccaccctagaagctctattgcccgaagattgtaaccctgaggagcctgaaaatgaagacttccacccttcctggtccccctcaagcctccccttccgcacggacaatgaagagggctgtgggatggtgaagacctcccagcagaatgaggatcggccccctgaagattcttccttagaactccctctggcagtgtgacaggcgctagaggtcctgcctcttacccattctctatttattcccttattttatctaacaccatttcaaaacaaaactgtagaagcagctgctgctcccatgttattttattggggtctttggggaatgggtgggaaaggattgtttgagtattttttaaaagggaaacagtaccaaggagaccagccctaccttgatctggggatagtcttggggcaaagaaagctgcgtagtgctgaacattaagctttctgggccactggaacaaagaactaggatctcacaggaaaagctgggtaactcaagcagctattctttctgtagggaccagaacacgagaatttgaagagcatggcaaagccctttctctcccaagccccaggcagagtacaagctcatttttctcggtggttattctgatatcccattttggtgtgtcataatacttcaaactggaaagtcacctggtcgagtctagggaggagggagtggaagggtctctgcttctgtacaaaatctccaggatttacaaaaatgtaacctgccttccttcaatcccatatttggtaaataagttaatatttgacatgtttggtgttctctgacctgttccccacactggggattcctggtctgtaacttgaattgtttcttccacatgttcttaagtactagagttaaacttgtctatgtgtcttttttctctccatcctttttccttcggagaaagagctggattggctggggatatggtataacgagcctgagccttctgtacgtgtctgacactagcactgtcaggcagctttcggctggggctcacccatcccataggaggcctatgtggagcattaactgtggccaaaggaggcagcgggaacaggctgcttgctatctggaaagatgacatatttgtgccatgcttgttttttcacccaggtttttccctctttgtgagatctgagctttagtggaatgtagaatgtggcaatcttaaggtcaccaatcagtttttgttcttttttcctggatctaccctcatggtcgttttcaacatagcgggttagagttcttatactgttccagttcaattccaagaattgcaaatgtttattggacccctccatcttgatgatatataaaaattggaagccaaaccagttcttaaatgctacatgcaactcccagattccaaaggattcaagttctaattataacctttgaagcgtatagaatggaactcattcagtttgattcagttcttacctctgtcaggaggaatacagttcctgttcatcctgtgttctaagatctccattgaacagcactgatttcctttcattagcaaagtgatctttgtctctgttctaaaatggaggcagtagggagcaaaactattcttctcaagcatcctttacaccatactttacttctggtatggtttattaaccacacacacacacaaaagtgaaaaactgtgttgggggggagacactactcctacttatcttgctcataaagccttttctggtgggatattaaggccctggtgtcttacagaaaccatcacgtatgtcgcagcagcatttcacccctgaagtctctaaactctgagcctgaaaagatttgtatttaatacacataacattttttagttcattctgcctttcctatttgttccagtttttgcttggttttagtttggaggggaacttaagtacacagatccttatctctccccatcccctagcctcacaaaacacagttgagagtcttttaagtacctgagctctcgaagctacccagaactgaactagactcccctaccttagactggtaccctcaaacacaggactgaagcttaattgggaatttggctttatggagaaaagaatctttttcaaagtttgtgtcggaaggggagggtgaggtttgcccactgtctctgcaggaaggctccggcttaatctaggaagtagattccagctgcacgatgaggaacacattagcttttgggatcaaaccaggaatatgaatctgtaattattaagctcattgccaacccacaagatatgtttctgaaaacctgtagtttcttaatttaagtccatccccttcattaacgctacagttgtgactcacactgatcccaaacttttaagtgctaaatattaacatttagcattaactgtcttgtcaagcgaaaggccttctctacaacctagtccatctcacttctggtgctacctgagttggacagaattctagctcatggttgctaggaaagctaggcctctgatcatagaagcagatagcttcagtcccagtctaggcctagataaatgactcttattaccacaacccttattattttccaatttcctttctcacatactgtacacaggtagtattttcaatgtgaatccaaagcttgtctggttctctgaaaataattttttcccctttaggttctttacattgtgataatgctgtatttaaagagaatatttaaatgtaatattaaagaaatattcaaaag

SEQ ID NO: 403 - protein, 543 aa, Homo sapiens
MDAFTGSGLKRKFDDVDVGSSVSNSDDEISSSDSADSCDSLNPPTTASFTPTSILKRQKQLRRKNVRFDQVTVYYFARRQGFTSVPSQGGSSLGMAQRHNSVRSYTLCEFAQEQEVNHREILREHLKEEKLHAKKMKLTKNGTVESVEADGLTLDDVSDEDIDVENVEVDDYFFLQPLPTKRRRALLRASGVHRIDAEEKQELRAIRLSREECGCDCRLYCDPEACACSQAGIKCQVDRMSFPCGCSRDGCGNMAGRIEFNPIRVRTHYLHTIMKLELESKRQVSRPAAPDEEPSPTASCSLTGAQGSETQDFQEFIAENETAVMHLQSAEELERLKAEEDSSGSSASLDSSIESLGVCILEEPLAVPEELCPGLTAPILIQAQLPPGSSVLCFTENSDHPTASTVNSPSYLNSGPLVYYQVEQRPVLGVKGEPGTEEGSASFPKEKDLNVFSLPVTSLVACSSTDPAALCKSEVGKTPTLEALLPEDCNPEEPENEDFHPSWSPSSLPFRTDNEEGCGMVKTSQQNEDRPPEDSSLELPLAV

SEQ ID NO: 404 - DNA, 2749 bp, Homo sapiens
cggtttcctcccccatccccttgactctcccctcccagccctcgctctctcgctcgccctcagcgcggcccccgccatgacggaggcgggtgccggtgccgttgccgccgctgccgtcgcagggggggagtcgggttcccagaaagtagcttgatgagtgtccaaagtagcagtggaagtttggaggggccgccatcttggtcccagctctccacgtctccaaccccgggctcggcggcggcggccaggtccctgctgaatcacacgccgccatccgggaggcccagggaaggtgcaatggatgagcttcatagtctggatccaagaaggcaagagttattggaagctagatttactggagttgcaagtgggagcactggaagtacgggcagttgcagtgttggtgctaaagccacaacaaataacgaaagctctaatcacagttttggaagcttgggatctttaagtgacaaagaatcagagacaccggagaagaaacaatcggaatcatccaggggaagaaagagaaaagcagaaaaccagaatgaaagtagtcagggaaaaagtattgggggacgtggccacaaaattagcgactattttgaataccagggtggaaatggctcaagtccagtaagaggcatacctcctgcaatccgttctcctcaaaattcacattcacattccactccttcctcatctgttcgaccgaatagcccttctcctactgcattagcatttggggaccaccctattgtacaaccaaagcaattatcctttaaaattattcagactgatctcacaatgctgaaattagcagcattagaaagtaataaaatccaggacctggaaaagaaggagggacgtatagatgatttgctcagggctaactgtgatctcagacggcaaatagatgaacaacaaaaattacttgaaaaatacaaagaacgattaaataagtgcatatcaatgagcaagaaacttcttattgaaaagagtacacaagaaaagctgtcaagcagagagaagagtatgcaagatcgattacgcctcgggcactttacaacagttagacatggcgcttcatttactgaacaatggacagatggttttgcatttcagaatcttgtgaagcaacaagaatgggtgaatcagcaaagggaagatattgaaaggcaaaggaaacttctagccaaacgcaaacctcccacagctaataattctcaggcaccctctaccaattctgaaccaaaacaaaggaaaaacaaagcagtcaatggagcagagaatgatccctttgttagaccaaatttaccacaactgttgactttggcagaatatcatgaacaggaagaaattttcaaacttagactaggacatctcaaaaaggaagaggcagaaatccaggcagaacttgaacgtttggaaagagtcagaaatcttcacatacgtgagctgaaaagaataaacaatgaagataattcacagttcaaagatcacccaacattaaatgaaagatatttattacttcatctgcttggtagaggtggctttagtgaagtgtataaggcttttgacctttatgaacaaagatatgctgctgtgaagatacatcagcttaataaaagctggagagatgagaagaaagaaaactaccacaaacatgcctgcagagagtatagaatacacaaagaactggatcaccccagaatagttaaactctatgattatttctccttggatacagatacgttttgtacagtgttagaatactgtgaaggcaatgacttggatttctatctgaagcaacacaagttaatgtcagagaaagaagctcggtctattgtaatgcagattgtaaatgcactaagatatctcaatgagatcaaaccccctattatacattatgatcttaagccaggaaacatcctactggtagatggaacagcatgtggtgaaatcaaaatcactgattttggtctgtccaagattatggatgatgatagctatggtgtagatggaatggatctaacttcccagggggcaggcacttactggtatttacctcctgagtgttttgtagttggaaaagagccaccaaagatttccaacaaggttgatgtatggtcggttggagtcatcttctttcagtgtctttatggtagaaagccatttggtcacaatcaatctcaacaagacattcttcaagaaaatacaatattaaaagccacagaagtccagttccctgtaaaaccggttgtaagcagtgaagccaaggcatttataagacgctgtttggcatatcgaaaagaagatcgatttgatgtgcaccagctggcaaatgacccataccttctcccacacatgagaagatcaaattcttcaggaaacctacacatggctgggctgacagcatcccctacacccccttcttcaagcataattacttactgactttcctccaagattggcatgatatctttgaatttgcttccagatgcacacttaagtttgagagcatttgagtgtttgttttctttttctttttttttttttttttttttttacacaagacgtggttaaagaactgtttgtgactgaagttcctcatagtgtcattggtatgagagaggatcatggacaatgaataaatgcacacttctgactataattttgagcagtgaaggaaggatgactgcctgttacacagaaacaggaataccatgttaagatagaggaaaaaaaaaaa

SEQ ID NO: 405 - protein, 718 aa, Homo sapiens
MDELHSLDPRRQELLEARFTGVASGSTGSTGSCSVGAKATTNNESSNHSFGSLGSLSDKESETPEKKQSESSRGRKRKAENQNESSQGKSIGGRGHKISDYFEYQGGNGSSPVRGIPPAIRSPQNSHSHSTPSSSVRPNSPSPTALAFGDHPIVQPKQLSFKIIQTDLTMLKLAALESNKIQDLEKKEGRIDDLLRANCDLRRQIDEQQKLLEKYKERLNKCISMSKKLLIEKSTQEKLSSREKSMQDRLRLGHFTTVRHGASFTEQWTDGFAFQNLVKQQEWVNQQREDIERQRKLLAKRKPPTANNSQAPSTNSEPKQRKNKAVNGAENDPFVRPNLPQLLTLAEYHEQEEIFKLRLGHLKKEEAEIQAELERLERVRNLHIRELKRINNEDNSQFKDHPTLNERYLLLHLLGRGGFSEVYKAFDLYEQRYAAVKIHQLNKSWRDEKKENYHKHACREYRIHKELDHPRIVKLYDYFSLDTDTFCTVLEYCEGNDLDFYLKQHKLMSEKEARSIVMQIVNALRYLNEIKPPIIHYDLKPGNILLVDGTACGEIKITDFGLSKIMDDDSYGVDGMDLTSQGAGTYWYLPPECFVVGKEPPKISNKVDVWSVGVIFFQCLYGRKPFGHNQSQQDILQENTILKATEVQFPVKPVVSSEAKAFIRRCLAYRKEDRFDVHQLANDPYLLPHMRRSNSSGNLHMAGLTASPTPPSSSIITY

SEQ ID NO: 406 - DNA, 3411 bp, Homo sapiens
ccctgcgtcggggggcaagatggcagcccaggctttggcgctgctgagagaggtagcgaggctggaagcgccgctggaggagctacgcgcgcttcactccgtgctgcaggcagtgccgctcaacgagcttcgccagcaagcggcggagctgcgcctcggcccgctcttctccctgcttaacgagaaccatagggaaaagactactttgtgtgtatccattctggagagattgctccaagctatggaaccggttcacgtggcccggaacctcagggttgacctgcagaggggactaattcaccctgatgattctgtaaaaatcctcactctttcccagattggaagaattgttgaaaattctgatgctgttactgagattctaaataatgctgaattactaaaacaaattgtttattgcattggtggagagaatctatctgtagcaaaagcggctatcaaatccctgtcaagaatatcactaacccaagctggactggaggctttatttgaaagcaatctgctggatgatttgaaaagtgtaatgaaaacaaatgacattgttcgatacagggtgtatgagctaattatagagatttcttccgtgtcaccagaatctttaaactactgtaccacaagtggattggtaacccagctcctgagagagctgactggtgaggatgtgttggtcagagccacctgtatagaaatggtgacatcactggcatatactcatcatgggcgacaatatcttgctcaagaaggagtaattgaccaaatttctaatataattgttggggcagattcagaccctttctctagcttctatctgccaggattcgtgaagttttttggaaacctggctgtcatggatagtcctcaacagatctgtgagcgttatcctatctttgtggaaaaagtctttgaaatgatagaaagtcaggaccccactatgattggtgtagctgtagacacagttggaatcttgggatccaatgttgaaggaaaacaggttttacagaaaacaggaactcgctttgaacgcttgcttatgagaataggacatcaatcaaagaatgccccagtggagctaaaaattagatgtttggatgcaatttcatctcttctgtacttaccacctgagcagcagactgatgaccttctgaggatgacagaatcctggttttcttctttatctcgggatccactggagctcttccgtggcattagtagtcagcccttccctgaactacactgtgctgccttaaaagtgtttacggccattgcaaaccaaccctgggctcagaaacttatgtttaacagtccaggttttgtagaatatgtggtggaccggtctgtggagcatgacaaagcttcaaaggatgccaaatatgaactagtgaaagcacttgccaattccaagacaattgcagaaatctttgggaacccaaattatttgaggctcagaacttacctgagtgaagggccatactatgtgaaacctgtttccacgacagcagtagaaggagccgaatgatttcttctagagctcatgtagaggaccacgttttgaccaaaacttctcctaaggcatttgactccatctatatttcacaaaagagacttcctttccccaagaattatcatggaatgtcagatgttactttgttaccaacactgttatatttctacattgaaatgcaaagtggaactaggagtttggaatgcattaagagcagacaagcttggtcataatagatccagtgtttttcagattcctttcactgccttaatctttgcaacagggtggaagtttttttcttccctcaaaattttcatggacatgcaatcttatctaaaagcctgcttcagggctgggcgcggtggctaacacctataattcccagcactttgggaggccaagatgggcaaatcacttgagtctaggagttcaagaccagcctggccaatatggcaaaaccctgtctctactaaaaatataaaatcagccaggcatggtggcgcacacctataatctcagctactcaggaggctgaggcacgagaatcgcttgagcctgggaggcagaggttgcagtgagctgagatcttgccactgcacaccagcctgggcaacacagcaagactctgtctcaaaaataaatgaataaaataaaaacctgccaccaaattatttctggattctcttcactatctttttttttctttttggtcctttttccatttctgattccactttcaaagtcttggatatattctttgaaaaatgagtagtatggaatattaagattatgttccttatactcagaatactttttatgagctctcttgtttttttgttactattattcctttgaaaaaaagacaaaatatctaaaaaatgtttatagtgttcatgtaattttttttgctgtttaccaatgaactttgccctgttgtggttttgggggatcagaaggattcctaaactgtcatttcatttattggtaggtcatgattgctgagggttttgctttggatttttcatacctataaagtcaatcttgagttgatcagagaaagggaaacttactcctaataaacagactcagaacagaagggacatatgcataaatcaggataccatctcattaatttacaaaggataatctttcttttcattgacaacacctacacccacctgttttccagtgttcttctctctaaacagcaaagccaaagcactctgcacaccaaatcacctgttcagaggtttatgcatgagcatatttcttttaggccgtggtgaagttgataaaccacccctgctttgtaacaaaattattttaaagtgactggaattatctagtccccagattgatcatctcccctggcaacgtgactctgttttttgtgtgtgtttccatgctgactagtcccctactgttaatatcactactaattaggctataaccaggtctttcctggcctgagaaatattctcttaaaatgacctttgttttaatctcattcatgatgttgattttttttcaatgtggtgcaatatatacaataaaatttgtcataactattttaagtgtacagttcagtatattacatatgttcataagttgtacaaccatcaccaccatccatcttcagaattattttcatcttatacaattgaaactgtattcattaaacaataactgtctattccctcttttccccagcctctggcaaccaccattctgcttcatgacattgattttattcacttaacatcagattttggggggatgccctctctcctatgtatggtctacacattctgattttttttttagattgaataaaatttgtaaatcattattttcatttcataagtaaaaaaaaaaaaaaaaaaaaaaaaaaa

SEQ ID NO: 407 - protein, 504 aa, Homo sapiens
MAAQALALLREVARLEAPLEELRALHSVLQAVPLNELRQQAAELRLGPLFSLLNENHREKTTLCVSILERLLQAMEPVHVARNLRVDLQRGLIHPDDSVKILTLSQIGRIVENSDAVTEILNNAELLKQIVYCIGGENLSVAKAAIKSLSRISLTQAGLEALFESNLLDDLKSVMKTNDIVRYRVYELIIEISSVSPESLNYCTTSGLVTQLLRELTGEDVLVRATCIEMVTSLAYTHHGRQYLAQEGVIDQISNIIVGADSDPFSSFYLPGFVKFFGNLAVMDSPQQICERYPIFVEKVFEMIESQDPTMIGVAVDTVGILGSNVEGKQVLQKTGTRFERLLMRIGHQSKNAPVELKIRCLDAISSLLYLPPEQQTDDLLRMTESWFSSLSRDPLELFRGISSQPFPELHCAALKVFTAIANQPWAQKLMFNSPGFVEYVVDRSVEHDKASKDAKYELVKALANSKTIAEIFGNPNYLRLRTYLSEGPYYVKPVSTTAVEGAE

SEQ ID NO: 408 - DNA, 2626 bp, Homo sapiens
atcgagccatttaacatggcggaggatgtttcctcagcggccccgagcccgcggcggtgtgcggatggtagggatgccgaccctactgaggagcagatggcagaaacagagagaaacgacgaggagcagttcgaatgccaggaactgctcgagtgccaggtgcaggtgggggcccccgaggaggaggaggaggaggaggaggacgcgggcctggtggccgaggccgaggccgtggctgccggctggatgctcgatttcctctgcctctctctttgccgagctttccgcgacggccgctccgaggacttccgcaggacccgcaacagcgcagaggctattattcatggactatccagtctaacagcttgccagttgagaacgatatacatatgtcagtttttgacaagaattgcagcaggaaaaacccttgatgcacagtttgaaaatgatgaacgaattacacccttggaatcagccctgatgatttggggttcaattgaaaaggaacatgacaaacttcatgaagaaatacagaatttaattaaaattcaggctatagctgtttgtatggaaaatggcaactttaaagaagcagaagaagtctttgaaagaatatttggtgatccaaattctcatatgcctttcaaaagcaaattgcttatgataatctctcagaaagatacatttcattccttttttcaacacttcagctacaaccacatgatggagaaaattaagagttatgtgaattatgtgctaagtgaaaaatcatcaacctttctaatgaaggcagcggcaaaagtagtagaaagcaaaaggacaagaacaataacttctcaagataaacctagtggtaatgatgttgaaatggaaactgaagctaatttggatacaagaaaaaggtctcacaagaatcttttcttatctaagttgcaacatggaacccagcaacaagaccttaataagaaagaaagaagagtaggaactcctcaaagtacaaaaaagaaaaaagaaagcagaagagccactgaaagcagaatacctgtttcaaagagtcagccggtaactcctgaaaaacatcgagctagaaaaagacaggcatggctttgggaagaagacaagaatttgagatctggcgtgaggaaatatggagagggaaactggtctaaaatactgttgcattataaattcaacaaccggacaagtgtcatgttaaaagacagatggaggaccatgaagaaactaaaactgatttcctcagacagcgaagactgattgtgtttgtaaaagcttgatgaaaggacagttaagtattttgatcactgcattttgtttgaaacttgtgtcattgatgtaatttaaaacttttgtttaaagcattacagtatttttctgtgaccatcaattaatgagggtttgtgctaccagagttaaagcatatgctatcattgtattctttaagaaccttattttgataaaatgtaaatttgttgaaccctgccacatttagtatccccacccccaaatcctgttccaatgaaaaaattaaaacctgatacgaaaaaaaaaaaattccagttaacctattttgtgtctgtaggctgacctcaaccctgtaacgtaacccattaaaatgaatttctttttttttaagacagagtttctctctgttgcccaggctggagtgcagtggcgcaatttcagctcactgaacctctgcctcccaggtcaagtgattctcctgcctcagcctctgagtagctgggattacaggcacacaccaccagccagctaatttttgtatttttagtagaggcggggtttcaccatgctggtcaggatgttctccaactcctgacttcatgatccacccacctcggcctcccaaagtgctgagattacagacgtgagccactgcgtcctgcctaaaatgaattttctagatgattgaataacagtagtagtcctttgatagaagataatgacttggtttatggccttaatatactacttaattacttaagatgtttattaatagaatgataaatgtacagagtaacctataagcatgacatacttttgctttcagtagtttcatgtaaagaaaaaaacttgaaaatagtaatacctgagtacccatgggaataatagacactggggaggtagggtggggagcgggacgaagagctgaaaaacttacctactggggactgtgctcactacctgggtgacaggatcatacgtaccccaaacctcaacatcacacagtatactcagctaacaaacctgcccatgtgtttcctgaatctaaaataaaaatcgaaataatttttttaaaaaagaaaaagacaatagtattacccatgggacaaaatttgtactattagcaagaatcattttgtgtctcatttagaaacaatttgacttttgttccagtgtttaaactttgacaaaaatggttttgaatagatctttataacctgatgcctaaatacaagattctctgataccttcatttaatatatcaatattggcctaaaacgtattctgtaaagcttaaattggtattaactatgatcatcttgatgtctatgatagataataaacaaggtcatacataccttaa

SEQ ID NO: 409 - protein, 419 aa, Homo sapiens
MAEDVSSAAPSPRRCADGRDADPTEEQMAETERNDEEQFECQELLECQVQVGAPEEEEEEEEDAGLVAEAEAVAAGWMLDFLCLSLCRAFRDGRSEDFRRTRNSAEAIIHGLSSLTACQLRTIYICQFLTRIAAGKTLDAQFENDERITPLESALMIWGSIEKEHDKLHEEIQNLIKIQAIAVCMENGNFKEAEEVFERIFGDPNSHMPFKSKLLMIISQKDTFHSFFQHFSYNHMMEKIKSYVNYVLSEKSSTFLMKAAAKVVESKRTRTITSQDKPSGNDVEMETEANLDTRKRSHKNLFLSKLQHGTQQQDLNKKERRVGTPQSTKKKKESRRATESRIPVSKSQPVTPEKHRARKRQAWLWEEDKNLRSGVRKYGEGNWSKILLHYKFNNRTSVMLKDRWRTMKKLKLISSDSED

SEQ ID NO: 410 - DNA, 2686 bp, Homo sapiens
atcgagccatttaacatggcggaggatgtttcctcagcggccccgagcccgcggcggtgtgcggatggtagggatgccgaccctactgaggagcagatggcagaaacagagagaaacgacgaggagcagttcgaatgccaggaactgctcgagtgccaggtgcaggtgggggcccccgaggaggaggaggaggaggaggaggacgcgggcctggtggccgaggccgaggccgtggctgccggctggatgctcgatttcctctgcctctctctttgccgagctttccgcgacggccgctccgaggacttccgcaggacccgcaacagcgcagaggctattattcatggactatccagtctaacagcttgccagttgagaacgatatacatatgtcagtttttgacaagaattgcagcaggaaaaacccttgatgcacagtttgaaaatgatgaacgaattacacccttggaatcagccctgatgatttggggttcaattgaaaaggaacatgacaaacttcatgaagaaatacagaatttaattaaaattcaggctatagctgtttgtatggaaaatggcaactttaaagaagcagaagaagtctttgaaagaatatttggtgatccaaattctcatatgcctttcaaaagcaaattgcttatgataatctctcagaaagatacatttcattccttttttcaacacttcagctacaaccacatgatggagaaaattaagagttatgtgaattatgtgctaagtgaaaaatcatcaacctttctaatgaaggcagcggcaaaagtagtagaaagcaaaaggacaagaacaataacttctcaagataaacctagtggtaatgatgttgaaatggaaactgaagctaatttggatacaagaaaaagtgttagtgacaaacagtctgcggtaactgaatcctcagagggtacagtatccttattgaggtctcacaagaatcttttcttatctaagttgcaacatggaacccagcaacaagaccttaataagaaagaaagaagagtaggaactcctcaaagtacaaaaaagaaaaaagaaagcagaagagccactgaaagcagaatacctgtttcaaagagtcagccggtaactcctgaaaaacatcgagctagaaaaagacaggcatggctttgggaagaagacaagaatttgagatctggcgtgaggaaatatggagagggaaactggtctaaaatactgttgcattataaattcaacaaccggacaagtgtcatgttaaaagacagatggaggaccatgaagaaactaaaactgatttcctcagacagcgaagactgattgtgtttgtaaaagcttgatgaaaggacagttaagtattttgatcactgcattttgtttgaaacttgtgtcattgatgtaatttaaaacttttgtttaaagcattacagtatttttctgtgaccatcaattaatgagggtttgtgctaccagagttaaagcatatgctatcattgtattctttaagaaccttattttgataaaatgtaaatttgttgaaccctgccacatttagtatccccacccccaaatcctgttccaatgaaaaaattaaaacctgatacgaaaaaaaaaaaattccagttaacctattttgtgtctgtaggctgacctcaaccctgtaacgtaacccattaaaatgaatttctttttttttaagacagagtttctctctgttgcccaggctggagtgcagtggcgcaatttcagctcactgaacctctgcctcccaggtcaagtgattctcctgcctcagcctctgagtagctgggattacaggcacacaccaccagccagctaatttttgtatttttagtagaggcggggtttcaccatgctggtcaggatgttctccaactcctgacttcatgatccacccacctcggcctcccaaagtgctgagattacagacgtgagccactgcgtcctgcctaaaatgaattttctagatgattgaataacagtagtagtcctttgatagaagataatgacttggtttatggccttaatatactacttaattacttaagatgtttattaatagaatgataaatgtacagagtaacctataagcatgacatacttttgctttcagtagtttcatgtaaagaaaaaaacttgaaaatagtaatacctgagtacccatgggaataatagacactggggaggtagggtggggagcgggacgaagagctgaaaaacttacctactggggactgtgctcactacctgggtgacaggatcatacgtaccccaaacctcaacatcacacagtatactcagctaacaaacctgcccatgtgtttcctgaatctaaaataaaaatcgaaataatttttttaaaaaagaaaaagacaatagtattacccatgggacaaaatttgtactattagcaagaatcattttgtgtctcatttagaaacaatttgacttttgttccagtgtttaaactttgacaaaaatggttttgaatagatctttataacctgatgcctaaatacaagattctctgataccttcatttaatatatcaatattggcctaaaacgtattctgtaaagcttaaattggtattaactatgatcatcttgatgtctatgatagataataaacaaggtcatacataccttaa

SEQ ID NO: 411 - protein, 439 aa, Homo sapiens
MAEDVSSAAPSPRRCADGRDADPTEEQMAETERNDEEQFECQELLECQVQVGAPEEEEEEEEDAGLVAEAEAVAAGWMLDFLCLSLCRAFRDGRSEDFRRTRNSAEAIIHGLSSLTACQLRTIYICQFLTRIAAGKTLDAQFENDERITPLESALMIWGSIEKEHDKLHEEIQNLIKIQAIAVCMENGNFKEAEEVFERIFGDPNSHMPFKSKLLMIISQKDTFHSFFQHFSYNHMMEKIKSYVNYVLSEKSSTFLMKAAAKVVESKRTRTITSQDKPSGNDVEMETEANLDTRKSVSDKQSAVTESSEGTVSLLRSHKNLFLSKLQHGTQQQDLNKKERRVGTPQSTKKKKESRRATESRIPVSKSQPVTPEKHRARKRQAWLWEEDKNLRSGVRKYGEGNWSKILLHYKFNNRTSVMLKDRWRTMKKLKLISSDSED

SEQ ID NO: 412 - DNA, 4640 bp, Homo sapiens
cccgcggctcgggatggaggctggacacctgttctgctgttgtgtcctgccattctcctgaagaacagaggcacactgtaaaacccaacacttccccttgcattctataagattacagcaagatggaaataccaaatccccctacctccaaatgtatcacttactggaaaagaaaagtgaaatctgaatacatgcgacttcgacaacttaaacggcttcaggcaaatatgggtgcaaaggctttgtatgtggcaaattttgcaaaggttcaagaaaaaacccagatcctcaatgaagaatggaagaagcttcgtgtccaacctgttcagtcaatgaagcctgtgagtggacacccttttctcaaaaagtgtaccatagagagcattttcccgggatttgcaagccaacatatgttaatgaggtcactgaacacagttgcattggttcccatcatgtattcctggtcccctctccaacagaactttatggtagaagatgagacggttttgtgcaatattccctacatgggagatgaagtgaaagaagaagatgagacttttattgaggagctgatcaataactatgatgggaaagtccatggtgaagaagagatgatccctggatccgttctgattagtgatgctgtttttctggagttggtcgatgccctgaatcagtactcagatgaggaggaggaagggcacaatgacacctcagatggaaagcaggatgacagcaaagaagatctgccagtaacaagaaagagaaagcgacatgctattgaaggcaacaaaaagagttccaagaaacagttcccaaatgacatgatcttcagtgcaattgcctcaatgttccctgagaatggtgtcccagatgacatgaaggagaggtatcgagaactaacagagatgtcagaccccaatgcacttccccctcagtgcacacccaacatcgatggccccaatgccaagtctgtgcagcgggagcaatctctgcactccttccacacacttttttgccggcgctgctttaaatacgactgcttccttcacccttttcatgccacccctaatgtatataaacgcaagaataaagaaatcaagattgaaccagaaccatgtggcacagactgcttccttttgctggaaggagcaaaggagtatgccatgctccacaacccccgctccaagtgctctggtcgtcgccggagaaggcaccacatagtcagtgcttcctgctccaatgcctcagcctctgctgtggctgagactaaagaaggagacagtgacagggacacaggcaatgactgggcctccagttcttcagaggctaactctcgctgtcagactcccacaaaacagaaggctagtccagccccacctcaactctgcgtagtggaagcaccctcggagcctgtggaatggactggggctgaagaatctctttttcgagtcttccatggcacctacttcaacaacttctgttcaatagccaggcttctggggaccaagacgtgcaagcaggtctttcagtttgcagtcaaagaatcacttatcctgaagctgccaacagatgagctcatgaacccctcacagaagaagaaaagaaagcacagattgtgggctgcacactgcaggaagattcagctgaagaaagataactcttccacacaagtgtacaactaccaaccctgcgaccacccagaccgcccctgtgacagcacctgcccctgcatcatgactcagaatttctgtgagaagttctgccagtgcaacccagactgtcagaatcgtttccctggctgtcgctgtaagacccagtgcaataccaagcaatgtccttgctatctggcagtgcgagaatgtgaccctgacctgtgtctcacctgtggggcctcagagcactgggactgcaaggtggtttcctgtaaaaactgcagcatccagcgtggacttaagaagcacctgctgctggccccctctgatgtggccggatggggcaccttcataaaggagtctgtgcagaagaacgaattcatttctgaatactgtggtgagctcatctctcaggatgaggctgatcgacgcggaaaggtctatgacaaatacatgtccagcttcctcttcaacctcaataatgattttgtagtggatgctactcggaaaggaaacaaaattcgatttgcaaatcattcagtgaatcccaactgttatgccaaagtggtcatggtgaatggagaccatcggattgggatctttgccaagagggcaattcaagctggcgaagagctcttctttgattacaggtacagccaagctgatgctctcaagtacgtggggatcgagagggagaccgacgtcctttagccctcccaggccccaacggcagcacttatggtagcggcactgtcttggctttcgtgctcacaccactgctgctcgagtctcctgcactgtgtctcccacactgagaaaccccccaacccactccctctgtagtgaggcctctgccatgtccagagggcacaaaactgtctcaatgagaggggagacagaggcagctagggcttggtctcccaggacagagagttacagaaatgggagactgtttctctggcctcagaagaagcgagcacaggctggggtggatgacttatgcgtgatttcgtgtcggctccccaggctgtggcctcaggaatcaacttaggcagttcccaacaagcgctagcctgtaattgtagctttccacatcaagagtccttatgttattgggatgcaggcaaacctctgtggtcctaagacctggagaggacaggctaagtgaagtgtggtccctggagcctacaagtggtctgggttagaggcgagcctggcaggcagcacagactgaactcagaggtagacaggtcaccttactacctcctccctcgtggcagggctcaaactgaaagagtgtgggttctaagtacaggcattcaaggctgggggaaggaaagctacgccatccttccttagccagagagggagaaccagccagatgatagtagttaaactgctaagcttgggcccaggaggctttgagaaagccttctctgtgtactctggagatagatggagaagtgttttcagattcctgggaacagacaccagtgctccagctcctccaaagttctggcttagcagctgcaggcaagcattatgctgctattgaagaagcattaggggtatgcctggcaggtgtgagcatcctggctcgctggatttgtgggtgttttcaggccttccattccccatagaggcaaggcccaatggccagtgttgcttatcgcttcagggtaggtgggcacaggcttggactagagaggagaaagattggtgtaatctgctttcctgtctgtagtgcctgctgtttggaaagggtgagttagaatatgttccaaggttggtgaggggctaaattgcacgcgtttaggctggcaccccgtgtgcagggcacactggcagagggtatctgaagtgggagaagaagcaggtagaccacctgtcccaggctgtggtgccaccctctctggcattcatgcagagcaaagcactttaaccatttcttttaaaaggtctatagattggggtagagtttggcctaaggtctctagggtccctgcctaaatcccactcctgagggagggggaagaagagagggtgggagattctcctccagtcctgtctcatctcctgggagaggcagacgagtgagtttcacacagaagaatttcatgtgaatggggccagcaagagctgccctgtgtccatggtgggtgtgccgggctggctgggaacaaggagcagtatgttgagtagaaagggtgtgggcgggtatagattggcctgggagtgttacagtagggagcaggcttctcccttctttctgggactcagagccccgcttcttcccactccacttgttgtcccatgaaggaagaagtggggttcctcctgacccagctgcctcttacggtttggtatgggacatgcacacacactcacatgctctcactcaccacactggagggcacacatgtaccccgcacccagcaactcctgacagaaagctcctcccacccaaatgggccaggccccagcatgatcctgaaatctgcatccgccgtggtttgtattcattgtgcatatcagggataccctcaagctggactgtgggttccaaattactcatagaggagaaaaccagagaaagatgaagaggaggagttaggtctatttgaaatgccaggggctcgctgtgaggaataggtgaaaaaaaaacttttcaccagcctttgagagactagactgaccccacccttccttcagtgagcagaatcactgtggtcagtctcctgtcccagcttcagttcatgaatactcctgttcctccagtttcccatcctttgtccctgctgtcccccacttttaaagatgggtctcaacccctccccaccacgtcatgatggatggggcaaggtggtggggactaggggagcctggtatacatgcggcttcattgccaataaatttcatgcactttaaagtcctgtggcttgtgacctcttaataaagtgttagaatccaaaaaaaaaaaaaaaa

SEQ ID NO: 413 - protein, 747 aa, Homo sapiens
MEIPNPPTSKCITYWKRKVKSEYMRLRQLKRLQANMGAKALYVANFAKVQEKTQILNEEWKKLRVQPVQSMKPVSGHPFLKKCTIESIFPGFASQHMLMRSLNTVALVPIMYSWSPLQQNFMVEDETVLCNIPYMGDEVKEEDETFIEELINNYDGKVHGEEEMIPGSVLISDAVFLELVDALNQYSDEEEEGHNDTSDGKQDDSKEDLPVTRKRKRHAIEGNKKSSKKQFPNDMIFSAIASMFPENGVPDDMKERYRELTEMSDPNALPPQCTPNIDGPNAKSVQREQSLHSFHTLFCRRCFKYDCFLHPFHATPNVYKRKNKEIKIEPEPCGTDCFLLLEGAKEYAMLHNPRSKCSGRRRRRHHIVSASCSNASASAVAETKEGDSDRDTGNDWASSSSEANSRCQTPTKQKASPAPPQLCVVEAPSEPVEWTGAEESLFRVFHGTYFNNFCSIARLLGTKTCKQVFQFAVKESLILKLPTDELMYPSQKKKRKHRLWAAHCRKIQLKKDNSSTQVYNYQPCDHPDRPCDSTCPCIMTQNFCEKFCQCNPDCQNRFPGCRCKTQCNTKQCPCYLAVRECDPDLCLTCGASEHWDCKVVSCKNCSIQRGLKKHLLLAPSDVAGWGTFIKESVQKNEFISEYCGELISQDEADRRGKVYDKYMSSFLFNLNNDFVVDATRKGNKIRFANHSVNPNCYAKVVMVNGDHRIGIFAKRAIQAGEELFFDYRYSQADALKYVGIERETDVL

SEQ ID NO: 414 - DNA, 2486 bp, Homo sapiens
ggcatcaccggccagccgggtggagtgagcggcgctgggctcgggctccggctccgcgggcggaagaggcggcggcggcggcagaagcggcggcggcggcggcggcgggagccgaggaggaggttccggacgctgcttaggaaccggggactcaggagtgcccgcgccctgagcgctcagctccagaggcgtcatggctgagtacgggaccctcctgcaagacctgaccaacaacatcacccttgaagatctagaacagctcaagtcggcctgcaaggaagacatccccagcgaaaagagtgaggagatcactactggcagtgcctggtttagcttcctggagagccacaacaagctggacaaagacaacctctcctacattgagcacatctttgagatctcccgccgtcctgacctactcactatggtggttgactacagaacccgtgtgctgaaaatctctgaggaggatgagctggacaccaagctaacccgtatccccagtgccaagaagtacaaagacattatccggcagccctctgaggaagagatcatcaaattggctcccccaccgaagaaggcctgagcaagggggaggaagaggaggaaggttggaccttcatcagaccactcccttcccccatcctccaggagagggggcaagggcaacccaccatctacccacttactaacctggtcctaacccccttactgtgcgcgtgtgtgtgcgtgtgcgcacgctctggctgtttgtctatatgtctagctcatctagttcctcttcttaaggggatgggggtcaggggctaggggagggggctgagtttccccactttaggaggaggtgggggctatttctatgcaaatagaaatcagcacattcctcctacttccctttcctccactccccccatatctttaaagtgtggaagcagaaaggacctgcattttcctacattgaggagctgacataggggtaaggtatgggagaggtaggtggatccagggaaaagcagtggggacggaaggcaaagagaccactcaacccccacctggaaggggcaaagaaaagccagagttccatgtttgtactcctgtgctggactgtttcctgagtaccagcaggtccctttttgtctctcatgggcctagcataggtatgagccagggatcctttcctggtccctaagatcaaaccccatggagcagccagcgttagatgcccccacccacctgtactctggagagactgtgctgggaacatgtaccactgagcctgagatggggatgagggcagagagaggggagccccctcttccactcagttgttcctactcagactgttgcactctaaacctagggaggttgaagaatgagacccttaggttttaacacgaatcctgacaccaccatctatagggtcccaacttggttattgtaggcaaccttccctctctccttggtgaagaacatcccaagccagaaagaagttaactacagtgttttcctttgcaccgatccccaccccaattcaatcccggaagggacttacttaggaaacccttctttactagatatcctggccccctgggcttgtgaacacctcctagccacatcactacagtacagtgagtgaccccagcctcctgcctaccccaagatgcccctccccaccctgaccgtgctaactgtgtgtacatatatattctacatatatgtatattaaaactgcactgccatgtctgcccttttttgtggtgtctagcattaacttattgtctaggccagagcgggggtgggaggggaatgccacagtgaagggagtggcagaatcaaattgctacatagtccaaacaaaaaagaaggctttttcaaaaaacattaaattcacatgcagtctcagagactatttagacaaagttcaagttaggagcttttaggatgtgggagtaaaactttaatgggaggggagggctggctgctggaagaaggaagaagccagactggttagacagtactcttaactcctagcccagcctagcgtgccctgcccctctggccactgctgcagacacctgccttaacacacacacctctaggactccacagttttgccttaaaggaccttcccaagtctccctttccctgtctggcttctcccttaagaagagagagatacttgtagaattgggtggggggaatgagcatgaactgtccttccatttgggatatgttacgttagagtgagagagagaataaggagcctttcttatggaagaaatgggagaagagagacagggttcttttcagcagagtctagtagtttctctgtaaggcaaaataatctaaaaagactaacctgcccacccactccttatattgctgtgagattgcccctatcttgtgctcttctgtctgcagtgtgcacggccttgttctaacccggaataaaggtgattgattgtattgcaaaaaaaaaaaaaaaa

SEQ ID NO: 415 - protein, 130 aa, Homo sapiens
MAEYGTLLQDLTNNITLEDLEQLKSACKEDIPSEKSEEITTGSAWFSFLESHNKLDKDNLSYIEHIFEISRRPDLLTMVVDYRTRVLKISEEDELDTKLTRIPSAKKYKDIIRQPSEEEIIKLAPPPKKA

SEQ ID NO: 416 - DNA, 1312 bp, Homo sapiens
ggatcctttcctggtccctaagatcaaaccccatggagcagccagcgttagatgcccccacccacctgtactctggagagactgtgctgggaacatgtaccactgagcctgagatggggatgagggcagagagaggggagccccctcttccactcagttgttcctactcagactgttgcactctaaacctagggaggttgaagaatgagacccttaggttttaacacgaatcctgacaccaccatctatagggtccaacttggttattgtaggcaaccttccctctctccttggtgaagaacatcccaagccagaaagaagttaactacagtgttttcctttgcaccgatccccaccccaattcaatcccggaaggacttacttaggaaacccttctttactagatatcctggccccctgggcttgtgaacacctcctagccacatcactacagtacagtgagtgaccccagcctcctgcctaccccaagatgcccctccccaccctgaccgtgctaactgtgtgtacatatatattctacatatatgtatattaaaactgcactgccatgtctgcccttttttgtggtgtctagcattaacttattgtctaggccagagcgggggtgggaggggaatgccacagtgaagggagtgggcagaatcaaattgctacatagtccaaagcaaaaaagaagggctttttcaaaaaacattaaattcacatgcagtctcagagactatttagacaaagttcaagttaggagcttttaggatgtgggagtaaaactttaatgggaggggagggctggctgctggaagaaggaagaagccagactggttagacagtactcttaactcctagcccagcctagcgtgccctgcccctctggccactgctgcagacacctgccttaacacacacacctctaggactccacagttttgccttaaaggaccttcccaagtctccctttccctgtctggcttctcccttaagaagagagagatacttgtagaattgggtggggggaatgagcatgaactgtccttccatttgggatatgttacattagagtgagagagagaataaggagcctttcttatggaagaaatgggagaagagagacagggttcttttcagcagagtctagtagtttctctgtaaggcaaaataatctaaaaagactaacctgcccacccactccttatattgctgtgagattgcccctatcttgtgctcttctgtctgcagtgtgcacggccttgttctaacccggaataaaggtgattgattgtattgccgcggatcc

SEQ ID NO: 417 - DNA, 6079 bp, Homo sapiens
cgttggccgggcccgggggaggaggggaatctcccgccatttttcaataatttcctccggtgctgctgaggagagtcgtgactgccggccgccgggacccgaagcggaggtcggcggggggctgctgggaggcgcggcggtgtgcgcgggagctctgcgccggtggcgttccgctccatgactgtcgcgcggccgcgccggcggtgagggagccggagttcgcgccgccctctcacccctcccttcacccaccccacccccgggcgcctggcgctcgctccgggccgcggggcctagtgctgcgccgcggggccggccccagcagccgccagtccccaccgccgccgccgcgatggcgccgctcctgggccgcaagcccttcccgctggtgaagccgttgcccggagaggagccgctcttcaccatcccgcacactcaggaggccttccgcacccgggaagagtatgaagcccgcttggaaaggtacagtgagcgcatttggacgtgcaagagtactggaagcagtcagctaacacacaaggaagcctgggaggaagaacaggaagttgctgagcttttgaaggaggagtttcctgcctggtatgagaagcttgttctggaaatggttcaccataacacagcctccttagagaagttagtagatactgcttggttggagatcatgaccaaatatgctgtgggagaagagtgtgacttcgaggttgggaaggagaaaatgctcaaggtgaagattgtgaagattcatcctttggagaaagtggatgaagaggccactgagaagaaatctgatggtgcctgtgattctccatcaagtgacaaagagaactccagtcagattgctcaggaccatcagaagaaggagacagttgtgaaagaggatgaaggaaggagagagagtattaatgacagagcacgtagatcgccacgaaaacttcctacttcattaaaaaaaggagaaaggaaatgggctcctccaaaatttctgcctcacaaatatgatgtgaaactacaaaatgaagataagatcatcagtaacgtgccagcagacagcttgattcgtacagagcgcccaccaaataaggagatagttcgatactttatacggcataatgcattacgagctggtactggtgaaaatgcaccttgggtcgtagaagatgaattggtgaagaaatactctctgcccagcaagttcagtgactttttacttgatccatacaagtatatgactctcaacccttctactaagaggaagaatactggatccccagacaggaagccctcaaagaaatccaagacagacaactcttctcttagttcaccactaaatcctaagttatggtgtcacgtacacttgaagaagtcattgagtggctcgccactcaaagtgaagaactcaaagaattccaaatctcctgaagaacatctagaagaaatgatgaagatgatgtcgcccaataagctgcacactaactttcacattcctaaaaaaggcccacctgccaagaaaccagggaagcacagtgacaagcctttgaaggcaaagggcagaagcaaaggcatcctgaatggacagaaatccacagggaattccaaatctcccaaaaaaggactgaagactcctaaaaccaaaatgaagcagatgactttgttggatatggccaaaggcacgcagaagatgacacgagccccacggaattctgggggtacacctaggacctctagtaaacctcataaacatctgcctcctgcagccctacacctcattgcatactacaaagaaaacaaagacagggaggacaagaggagcgccctgtcctgtgttatctccaaaacagctcgtcttctctctagtgaagatagagctcgtctcccagaagaattgcgaagtcttgttcaaaaacgctatgaacttctagagcacaaaaagaggtgggcttctatgtctgaagaacaacggaaagaatatttgaaaaagaaacgggaggagctgaaaaagaagttgaaggaaaaagccaaagaacgaagagagaaagaaatgcttgagagattagaaaaacagaagcggtatgaggaccaagagttaactggcaaaaaccttccagcattcagattggtggatacccctgaagggctgcccaacacgctgtttggggatgtggccatggtggtggaattcttgagctgttattctgggctacttttaccagatgctcagtatcctattactgctgtgtcccttatggaagccttgagtgcagataagggtggctttttataccttaacagggtgttggtcatcctcttacagaccctcctacaagatgagatagcagaagactatggtgaattgggaatgaagctgtcggaaatccccttgactctgcattctgtttcagagctggtgcggctctgcttgcgcagatctgatgttcaggaggaaagcgagggctcagacacagatgacaataaagattcagctgcatttgaggataatgaggtacaagatgagttcctagaaaagctggagacctctgaattttttgagctgacgtcagaggagaagctacagatcttgacagcactgtgccaccggatcctcatgacatactcagtgcaagaccacatggagaccagacagcagatgtctgcagagttgtggaaggaacggcttgctgtgttgaaggaagaaaatgataagaagagagcagagaaacagaaacggaaagaaatggaagccaaaaataaagaaaatggaaaagttgagaatgggttaggcaaaactgataggaaaaaagaaattgtgaagtttgagccccaagtagatacagaagctgaagacatgattagtgctgtgaagagcagaaggttgcttgccattcaagctaagaaggaacgggaaatccaggaaagagaaatgaaagtgaaactggaacgccaagctgaagaagaacgaatacggaagcacaaagcagctgctgagaaagctttccaggaagggattgccaaggccaaactagtcatgcgcaggactcctattggcacagatcgaaaccataatagatactggctcttctcagatgaagttccaggattattcattgaaaaaggctgggtacatgacagcattgactaccgattcaaccatcactgcaaagaccacacagtctctggtgatgaggattactgtcctcgcagtaagaaagcaaacttaggtaaaaatgcaagcatgaacacacaacatggaacagcaacagaagttgctgtagagacaaccacacccaaacaaggacagaacctatggtttttatgtgatagtcaaaaggagctggatgagttgctaaactgtcttcaccctcagggaataagagaaagtcaacttaaagagagactagagaagaggtaccaggacattattcactctattcatctagcacggaagccaaatttgggtctaaaatcttgtgatggcaaccaggagcttttaaacttccttcgtagtgatctcattgaagttgcaacaaggttacaaaaaggaggacttggatatgtggaagaaacatcagaatttgaagcccgggtcatttcattagagaaattgaaggattttggtgagtgtgtgattgcccttcaggccagtgtcataaagaaatttctccaaggcttcatggctcccaagcaaaagagaagaaaactccaaagtgaagattcagcaaaaactgaggaagtggatgaagagaagaaaatggtagaggaagcaaaggttgcatctgcactggagaaatggaagacagcaatccgggaagctcagactttctccaggatgcacgtgctgcttgggatgcttgatgcctgtatcaagtgggatatgtccgcagaaaatgctaggtgcaaagtttgtcgaaagaaaggtgaggatgacaaattgatcttgtgtgatgagtgtaataaagccttccacctgttttgtctgaggccggccctctatgaagtaccagatggtgagtggcagtgcccagcttgccagcccgctactgccaggcgcaactcccgtggcaggaactatactgaagagtctgcttctgaggacagtgaagatgatgagagtgatgaagaggaggaggaggaagaagaggaggaggaggaagaagattatgaggtggctggtttgcgattgagacctcgaaagaccatccggggcaagcacagcgtcatcccccctgcagcaaggtcaggccggcgcccgggtaagaagccacactctaccaggaggtctcagcccaaggcaccacctgtggatgatgctgaggtggatgagctggtgcttcagaccaagcggagctcccggaggcaaagcctggagctgcagaagtgtgaagagatcctccacatgatcgtgaagtaccgcttcagctggcccttcagggagcctgtgaccagagatgaggccgaggactactatgatgtgatcacgcaccccatggactttcagacagtgcagaacaaatgttcctgtgggagctaccgctctgtgcaggagtttcttactgacatgaagcaagtgtttaccaatgctgaggtttacaactgccgtggcagccatgtgctaagctgcatggtgaagacagaacagtgtctagtggctctgttgcataaacaccttcctggccacccatatgtccgcaggaagcgcaagaagtttcctgataggcttgctgaagatgaaggggacagtgagccagaggccgttggacagtccaggggacgaagacagaagaagtagagaggcagggccgtggtgacagtatcagtgagtgccatacagaattgtgtattcaccagcatcatgaaacagttgtggtcttttgagttgatcttggcagagtaaagggacgtgtcctggagccattcctgaatctccccttctttgtgacagctcctcccacccccccaaaaaataaaaaaaccacaaaaaacaaaaaaacaaaactaaggcacttcacttagagactggagtcctgcttataatcatgcatataacctttactttgatggatctggccagaggggtgttggagcccagcccacccacataccagtcaagctcttaggggagcagaagaaaagcaggaagaatttaaatgtttaattttttttttaaattgacttttctagttattaaaagttgcttgtttcagcagtgatattgtataaagaacatcttgtaagatactcctgacatcttgctttagcacatgtacagtacagtttctatgataatgtgtttgctctaacttccctggcttctccttcagcccatccactctcctctagagcagttgggttggaggctcattgaggcaagcagcaacattggagggggagcagggcagtgctgtgtctgctgcctcccatgcccgttctgacctcagccttggaactcctcaagaacctgaagattgagagcggcagagaagctctgagagccccttcccccacaacaaatctagctctagttgttatatttaggcaaaactttgtagtcttctttcccttttatgatggattttgataaaagtacaaaacagggtttttcttttttatcacctttgaatttggaaattttgagcacccaagctcttctgtacctatttaaagtccaccaaggggactgcagctcctagaacatgagaatcaagcctcttaattttaaactgcggaatgtggcctctgcttcctccgtcctcctgcccaaggacgacgaggattgctccagggctgctgggtagtttaccgtcccttctataggcatggagttggcactgacatcacagcttcataaccccaccaccgccagcttcccctgcctcctacatccagtctgttcttgttcatagtgagaatcctgtgttcccacttcagtgacacctgaattgtttgttgttgttttttttttttattgtcttcaaagaggaagggccccattaaagggtgaacttgtaataaattggaatttcaaataaacctcatgtacttgtgtttataaagaagaaaccaa

SEQ ID NO: 418 - protein, 1483 aa, Homo sapiens
MAPLLGRKPFPLVKPLPGEEPLFTIPHTQEAFRTREEYEARLERYSERIWTCKSTGSSQLTHKEAWEEEQEVAELLKEEFPAWYEKLVLEMVHHNTASLEKLVDTAWLEIMTKYAVGEECDFEVGKEKMLKVKIVKIHPLEKVDEEATEKKSDGACDSPSSDKENSSQIAQDHQKKETVVKEDEGRRESINDRARRSPRKLPTSLKKGERKWAPPKFLPHKYDVKLQNEDKIISNVPADSLIRTERPPNKEIVRYFIRHNALRAGTGENAPWVVEDELVKKYSLPSKFSDFLLDPYKYMTLNPSTKRKNTGSPDRKPSKKSKTDNSSLSSPLNPKLWCHVHLKKSLSGSPLKVKNSKNSKSPEEHLEEMMKMMSPNKLHTNFHIPKKGPPAKKPGKHSDKPLKAKGRSKGILNGQKSTGNSKSPKKGLKTPKTKMKQMTLLDMAKGTQKMTRAPRNSGGTPRTSSKPHKHLPPAALHLIAYYKENKDREDKRSALSCVISKTARLLSSEDRARLPEELRSLVQKRYELLEHKKRWASMSEEQRKEYLKKKREELKKKLKEKAKERREKEMLERLEKQKRYEDQELTGKNLPAFRLVDTPEGLPNTLFGDVAMVVEFLSCYSGLLLPDAQYPITAVSLMEALSADKGGFLYLNRVLVILLQTLLQDEIAEDYGELGMKLSEIPLTLHSVSELVRLCLRRSDVQEESEGSDTDDNKDSAAFEDNEVQDEFLEKLETSEFFELTSEEKLQILTALCHRILMTYSVQDHMETRQQMSAELWKERLAVLKEENDKKRAEKQKRKEMEAKNKENGKVENGLGKTDRKKEIVKFEPQVDTEAEDMISAVKSRRLLAIQAKKEREIQEREMKVKLERQAEEERIRKHKAAAEKAFQEGIAKAKLVMRRTPIGTDRNHNRYWLFSDEVPGLFIEKGWVHDSIDYRFNHHCKDHTVSGDEDYCPRSKKANLGKNASMNTQHGTATEVAVETTTPKQGQNLWFLCDSQKELDELLNCLHPQGIRESQLKERLEKRYQDIIHSIHLARKPNLGLKSCDGNQELLNFLRSDLIEVATRLQKGGLGYVEETSEFEARVISLEKLKDFGECVIALQASVIKKFLQGFMAPKQKRRKLQSEDSAKTEEVDEEKKMVEEAKVASALEKWKTAIREAQTFSRMHVLLGMLDACIKWDMSAENARCKVCRKKGEDDKLILCDECNKAFHLFCLRPALYEVPDGEWQCPACQPATARRNSRGRNYTEESASEDSEDDESDEEEEEEEEEEEEEDYEVAGLRLRPRKTIRGKHSVIPPAARSGRRPGKKPHSTRRSQPKAPPVDDAEVDELVLQTKRSSRRQSLELQKCEEILHMIVKYRFSWPFREPVTRDEAEDYYDVITHPMDFQTVQNKCSCGSYRSVQEFLTDMKQVFTNAEVYNCRGSHVLSCMVKTEQCLVALLHKHLPGHPYVRRKRKKFPDRLAEDEGDSEPEAVGQSRGRRQKK

SEQ ID NO: 419 - DNA, 6043 bp, Homo sapiens
tgaggaggagtcgtgactgccggccgccgggaccgaagcggaggtcggcggggggctgctgggaggcgcggcggtgtgcgcgggaactctgcgccgtggcgttccgctccatgactgtcgcgcggccgcgccggcggtgagggagccggagttcgcgccgccctctcacccctcccttcccccaccccacccccgggcgcctggcgctcgctccgggccgcggggcctagtgctgcgccgcggggccggccccagcagccgccagtcccaccgccgccgccgcgatggcgccgctcctgggccgcaagcccttcccgctggtgaagccgttgcccggagaggagccgctcttcaccatcccgcacactcaggaggccttccgcacccgggaagagtatgaagcccgcttggaaaggtacagtgagcgcatttggacgtgcaagagtactggaagcagtcagctaacacacaaggaagcctgggaggaagaacaggaagttgctgagcttttgaaggaggagtttcctgcctggtatgagaagcttgttctggaaatggttcaccataacacagcctccttagagaagttagtagatactgcttggttggagatcatgaccaaatatgctgtgggagaagagtgtgacttcgaggttgggaaggagaaaatgctcaaggtgaagattgtgaagattcatcctttggagaaagtggatgaagaggccactgagaagaaatctgatggtgcctgtgattctccatcaagtgacaaagagaactccagtcagattgctcaggaccatcagaagaaggagacagttgtgaaagaggatgaaggaaggagagagagtattaatgacagagcacgtagatcgccacgaaaacttcctacttcattaaaaaaaggagaaaggaaatgggctcctccaaaatttctgcctcacaaatatgatgtgaaactacaaaatgaagataagatcatcagtaacgtgccagcagacagcttgattcgtacagagcgcccaccaaataaggagatagttcgatactttatacggcataatgcattacgagctggtactggtgaaaatgcaccttgggtcgtagaagatgaattggtgaagaaatactctctgcccagcaagttcagtgactttttacttgatccatacaagtatatgactctcaacccttctactaagaggaagaatactggatccccagacaggaagccctcaaagaaatccaagacagacaactcttctcttagttcaccactaaatcctaagttatggtgtcacgtacacttgaagaagtcattgagtggctcgccactcaaagtgaagaactcaaagaattccaaatctcctgaagaacatctagaagaaatgatgaagatgatgtcgcccaataagctgcacactaactttcacattcctaaaaaaggcccacctgccaagaaaccagggaagcacagtgacaagcctttgaaggcaaagggcagaagcaaaggcatcctgaatggacagaaatccacagggaattccaaatctcccaaaaaaggactgaagactcctaaaaccaaaatgaagcagatgactttgttggatatggccaaaggcacgcagaagatgacacgagccccacggaattctgggggtacacctaggacctctagtaaacctcataaacatctgcctcctgcagccctacacctcattgcatactacaaagaaaacaaagacagggaggacaagaggagcgccctgtcctgtgttatctccaaaacagctcgtcttctctctagtgaagatagagctcgtctcccagaagaattgcgaagtcttgttcaaaaacgctatgaacttctagagcacaaaaagaggtgggcttctatgtctgaagaacaacggaaagaatatttgaaaaagaaacgggaggagctgaaaaagaagttgaaggaaaaagccaaagaacgaagagagaaagaaatgcttgagagattagaaaaacagaagcggtatgaggaccaagagttaactggcaaaaaccttccagcattcagattggtggatacccctgaagggctgcccaacacgctgtttggggatgtggccatggtggtggaattcttgagctgttattctgggctacttttaccagatgctcagtatcctattactgctgtgtcccttatggaagccttgagtgcagataagggtggctttttataccttaacagggtgttggtcatcctcttacagaccctcctacaagatgagatagcagaagactatggtgaattgggaatgaagctgtcggaaatccccttgactctgcattctgtttcagagctggtgcggctctgcttgcgcagatctgatgttcaggaggaaagcgagggctcagacacagatgacaataaagattcagctgcatttgaggataatgaggtacaagatgagttcctagaaaagctggagacctctgaattttttgagctgacgtcagaggagaagctacagatcttgacagcactgtgccaccggatcctcatgacatactcagtgcaagaccacatggagaccagacagcagatgtctgcagagttgtggaaggaacggcttgctgtgttgaaggaagaaaatgataagaagagagcagagaaacagaaacggaaagaaatggaagccaaaaataaagaaaatggaaaagttgagaatgggttaggcaaaactgataggaaaaaagaaattgtgaagtttgagccccaagtagatacagaagctgaagacatgattagtgctgtgaagagcagaaggttgcttgccattcaagctaagaaggaacgggaaatccaggaaagagaaatgaaagtgaaactggaacgccaagctgaagaagaacgaatacggaagcacaaagcagctgctgagaaagctttccaggaagggattgccaaggccaaactagtcatgcgcaggactcctattggcacagatcgaaaccataatagatactggctcttctcagatgaagttccaggattattcattgaaaaaggctgggtacatgacagcattgactaccgattcaaccatcactgcaaagaccacacagtctctggtgatgaggattactgtcctcgcagtaagaaagcaaacttaggtaaaaatgcaagcatgaacacacaacatggaacagcaacagaagttgctgtagagacaaccacacccaaacaaggacagaacctatggtttttatgtgatagtcaaaaggagctggatgagttgctaaactgtcttcaccctcagggaataagagaaagtcaacttaaagagagactagagaagaggtaccaggacattattcactctattcatctagcacggaagccaaatttgggtctaaaatcttgtgatggcaaccaggagcttttaaacttccttcgtagtgatctcattgaagttgcaacaaggttacaaaaaggaggacttggatatgtggaagaaacatcagaatttgaagcccgggtcatttcattagagaaattgaaggattttggtgagtgtgtgattgcccttcaggccagtgtcataaagaaatttctccaaggcttcatggctcccaagcaaaagagaagaaaactccaaagtgaagattcagcaaaaactgaggaagtggatgaagagaagaaaatggtagaggaagcaaaggttgcatctgcactggagaaatggaagacagcaatccgggaagctcagactttctccaggatgcacgtgctgcttgggatgcttgatgcctgtatcaagtgggatatgtccgcagaaaatgctaggtgcaaagtttgtcgaaagaaaggtgaggatgacaaattgatcttatgtgatgagtgtaataaagccttccacctgttttgtctgaggccggccctctatgaagtaccagatggtgagtggcagtgcccagcttgccagcccgctactgccaggcgcaactcccgtggcaggaactatactgaagagtctgcttctgaggacagtgaagatgatgagagtgatgaagaggaggaggaggaagaagaggaggaggaggaagaagattatgaggtggctggtttgcgattgagacctcgaaagaccatccggggcaagcacagcgtcatcccccctgcagcaaggtcaggccggcgcccgggtaagaagccacactctaccaggaggtctcagcccaaggcaccacctgtggatgatgctgaggtggatgagctggtgcttcagaccaagcggagctcccggaggcaaagcctggagctgcagaagtgtgaagagatcctccacaagatcgtgaagtaccgcttcagctggcccttcagggagcctgtgaccagagatgaggccgaggactactatgatgtgatcacgcaccccatggactttcagacagtgcagaacaaatgttcctgtgggagctaccgctctgtgcaggagtttcttactgacatgaagcaagtgtttaccaatgctgaggtttacaactgccgtggcagccatgtgctaagctgcatggtgaagacagaacagtgtctagtggctctgttgcataaacaccttcctggccacccatatgtccgcaggaagcgcaagaagtttcctgataggcttgctgaagatgaaggggacagtgagccagaggccgttggacagtccaggggacgaagacagaagaagtagagaggcagggccgtggtgacagtatcagtgagtgccatacagaattgtgtattcaccagcatcataaaacagttgtggtcttttgagttgatcttggcagagtaaagggacgtgtcctggagccattcctgaatctccccttctttgtgacagctcctcccacccccccaaaaaataaaaaaaccacaaaaaacaaaaaaacaaaactaaggcacttcacttagagactggagtcctgcttataatcatgcatataacctttactttgatggatctggccagaggggtgttggagcccagcccacccacataccagtcaagctcttaggggagcagaagaaaagcaggaagaatttaaatgtttaattttttttttaaattgacttttctagttattaaaagttgcttgtttcagcagtgatattgtataaagaacatcttgtaagatactcctgacatcttgctttagcacatgtacagtacagtttctatgataatgtgtttgctctaacttccctggcttctccttcagcccatccactctcctctagagcagttgggttggaggctcattgaggcaagcagcaacattggagggggagcagggcagtgctgtgtctgctgcctcccatgcccgttctgacctcagccttggaactcctcaagaacctgaagattccagtggtcagtgtcggtggggggtgggaggagagagcggcagagaagctctgagagccccttcccccacaacaaatctagctctagttgttatatttaggcaaaactttgtagtcttctttcccttttatgatggattttgataaaagtacaaaacagggtttttcttttttatcacctttgaatttggaaattttgagcacccaagctcttctgtacctatttaaagtccaccaaggggactgcagctcctagaacatgagaatcaagcctcttaattttaaactgcggaatgtggcctctgcttcctccgtcctcctgcccaaggacgacgaggattgctccagggctgctgggtagtttaccgtcccttctataggcatggagttggcactgacatcacagcttcataaccccaccaccgccagcttcccctgcctcctacatccagtctgttcttgttcatagtgagaatcctgtgttcccacttcagtgacacctgaattgtttgttgttgttttttttttttattgtcttcaaagaggaagggccccattaaagggtgaacttgtaataaattggaatttcaaataaacctcatgtacttgtgtttataaagaagaaaccaa

SEQ ID NO: 420 - protein, 1483 aa, Homo sapiens
MAPLLGRKPFPLVKPLPGEEPLFTIPHTQEAFRTREEYEARLERYSERIWTCKSTGSSQLTHKEAWEEEQEVAELLKEEFPAWYEKLVLEMVHHNTASLEKLVDTAWLEIMTKYAVGEECDFEVGKEKMLKVKIVKIHPLEKVDEEATEKKSDGACDSPSSDKENSSQIAQDHQKKETVVKEDEGRRESINDRARRSPRKLPTSLKKGERKWAPPKFLPHKYDVKLQNEDKIISNVPADSLIRTERPPNKEIVRYFIRHNALRAGTGENAPWVVEDELVKKYSLPSKFSDFLLDPYKYMTLNPSTKRKNTGSPDRKPSKKSKTDNSSLSSPLNPKLWCHVHLKKSLSGSPLKVKNSKNSKSPEEHLEEMMKMMSPNKLHTNFHIPKKGPPAKKPGKHSDKPLKAKGRSKGILNGQKSTGNSKSPKKGLKTPKTKMKQMTLLDMAKGTQKMTRAPRNSGGTPRTSSKPHKHLPPAALHLIAYYKENKDREDKRSALSCVISKTARLLSSEDRARLPEELRSLVQKRYELLEHKKRWASMSEEQRKEYLKKKREELKKKLKEKAKERREKEMLERLEKQKRYEDQELTGKNLPAFRLVDTPEGLPNTLFGDVAMVVEFLSCYSGLLLPDAQYPITAVSLMEALSADKGGFLYLNRVLVILLQTLLQDEIAEDYGELGMKLSEIPLTLHSVSELVRLCLRRSDVQEESEGSDTDDNKDSAAFEDNEVQDEFLEKLETSEFFELTSEEKLQILTALCHRILMTYSVQDHMETRQQMSAELWKERLAVLKEENDKKRAEKQKRKEMEAKNKENGKVENGLGKTDRKKEIVKFEPQVDTEAEDMISAVKSRRLLAIQAKKEREIQEREMKVKLERQAEEERIRKHKAAAEKAFQEGIAKAKLVMRRTPIGTDRNHNRYWLFSDEVPGLFIEKGWVHDSIDYRFNHHCKDHTVSGDEDYCPRSKKANLGKNASMNTQHGTATEVAVETTTPKQGQNLWFLCDSQKELDELLNCLHPQGIRESQLKERLEKRYQDIIHSIHLARKPNLGLKSCDGNQELLNFLRSDLIEVATRLQKGGLGYVEETSEFEARVISLEKLKDFGECVIALQASVIKKFLQGFMAPKQKRRKLQSEDSAKTEEVDEEKKMVEEAKVASALEKWKTAIREAQTFSRMHVLLGMLDACIKWDMSAENARCKVCRKKGEDDKLILCDECNKAFHLFCLRPALYEVPDGEWQCPACQPATARRNSRGRNYTEESASEDSEDDESDEEEEEEEEEEEEEDYEVAGLRLRPRKTIRGKHSVIPPAARSGRRPGKKPHSTRRSQPKAPPVDDAEVDELVLQTKRSSRRQSLELQKCEEILHKIVKYRFSWPFREPVTRDEAEDYYDVITHPMDFQTVQNKCSCGSYRSVQEFLTDMKQVFTNAEVYNCRGSHVLSCMVKTEQCLVALLHKHLPGHPYVRRKRKKFPDRLAEDEGDSEPEAVGQSRGRRQKK

SEQ ID NO: 421 - DNA, 2862 bp, Homo sapiens
ggaaaagtgtgaggggctcttcacgtggggaaggaacagcaggcgcggaggagggggcaagcgtgtgtgagattcagtggtccatgcgtgcgtttgtcgtgtaagggtcattcctggggtttggagtgggggaacaaatcaatgtggctgtttttccgtggaaagaattcccactgcagtgtcccggagcctgcgtgtggtgggcaagctcctcaaatggtatctcacagggaataggggagtcttgaaaacgcagcttcggcagtaggaacatgaacctcttacctaaaagttccagggagtttggctccgttgactattgggagaagttcttccagcagcgaggaaagaaagctttcgagtggtatggaacctacctggaactgtgcggggtgctacataaatatatcaagcccagggaaaaggtgctggtgattgggtgtggcaactcagaactgagtgagcaactgtatgatgtgggctatcgggatatagtgaacatcgacatcagtgaggttgtcatcaagcaaatgaaggaatgtaatgccacccgacggccccagatgagcttcttgaagatggacatgacgcagatggagtttcctgatgcctcgttccaggtggtgttggacaagggcaccctggatgctgtcctgacagatgaggaagagaagaccttacaacaggtggacaggatgctggctgaggttggccgtgtcctgcagggccgggagaccgagtggctctttggcatggatgagggccggaaacagctggcggccagtgctggcttcaggaggttgattacagtggcccttcaccgaggtcagcagtatgaaagcatggaccacatccaagctgagctgtcggctagagtcatggagctggccccagctgggatgcccacccagcagcaggtcccctttctgtctgtgggtggggacattggggtccggaccgttcagcaccaagactgcagccccttgagcggtgactatgtcattgaggatgtgcaaggggatgacaagcgatacttccgtcgactgatcttcctcagcaacaggaatgtggtgcagtccgaagccaggttgctgaaggatgtgtctcacaaagcccagaagaagcggaaaaaggacaggaagaagcagcggcctgctgatgcggaggacctccctgcagccccggggcagtccattgataagagttacctgtgttgtgaacaccacaaagccatgatcgctggccttgccctgctgagaaacccagagctactcctagagatcccactggcattgttggtggtaggcctgggcgggggcagcctccccctctttgtccacgatcattttccaaagtcctgcattgatgctgtggagatcgatccctccatgttggaagtggccacccagtggtttggcttctcccagagtgaccgaatgaaggtccacattgcagatggcctggactatatcgccagcttggcaggaggaggagaagcacggccttgctacgatgtcataatgtttgatgttgacagtaaggacccaacactgggaatgagttgtccgcccccagcatttgtggagcaatcttttctacagaaggttaaaagcatcttgactcctgaaggtgtttttattctcaaccttgtgtgccgagacttggggctaaaagactcagtgctggctgggctcaaggcagtgttccccctcctatatgtccggcgaattgagggtgaagtgaatgagatcctgttctgtcagctgcaccctgagcaaaaacttgccacaccagagctcctagaaacagcccaggctttggagcggaccctgaggaagcctgggaggggttgggatgacacgtatgtcttgtcagatatgctcaagacggtgaaaattgtgtgactgcttaggccaagcagccctcctgcctagactgaccttggactcccagcctgccagagaatgaagaaatacaacgcacagtacttttgaagcttcgtatttttcttggtttcacactcagctacatgtgacctccagcttggtgaggttgcctgaagattagggaaaataaaaatgtccttcccatcttgtcctcttcagtaccacttgggttggtttgtctttgcttcctacaccacgtccttgagtggagttccctgctgaagcccctagcacacactgcatgccttaacaagtgtgtgcaagcccctcagaactcaagacatccaaattttattgcgtctctacttatactggtttgcttttgatttattcctctattagttctataggagtgatctcaagtgagatagcagagcaagatgccaaaagaccataaatagagtaaggtttctatagatgtgagacagatttgagagagcatttactctgtctccctgtggatgaaactgctgctgaaatggttccaatttttaggaatctgcttacccacttcattatttgacagctttccttggtgacccaaaccttgtagcctaagccatttgtctttttctcagtggagggagtgtatggacctggccccatggctttgcatgttagagacctggcagactaaagtctctagtgtttgtttgctcacatttgctgagtgacagctatgtgccagactgcataaagggtggtggcagaagtgaaaatgtttaagaatgaccaaaaacattagtaatgaaagttaatgtgttccaggcattcttctaagtggtttacatgcactgtctcatttaatctgagataaaggatacttaagcccaaactatatctaaacccaaatctcacttggctggaaacatcaatcttaaccatttattcagaaccattaaaccaatgattccaa

SEQ ID NO: 422 - protein, 543 aa, Homo sapiens
MNLLPKSSREFGSVDYWEKFFQQRGKKAFEWYGTYLELCGVLHKYIKPREKVLVIGCGNSELSEQLYDVGYRDIVNIDISEVVIKQMKECNATRRPQMSFLKMDMTQMEFPDASFQVVLDKGTLDAVLTDEEEKTLQQVDRMLAEVGRVLQGRETEWLFGMDEGRKQLAASAGFRRLITVALHRGQQYESMDHIQAELSARVMELAPAGMPTQQQVPFLSVGGDIGVRTVQHQDCSPLSGDYVIEDVQGDDKRYFRRLIFLSNRNVVQSEARLLKDVSHKAQKKRKKDRKKQRPADAEDLPAAPGQSIDKSYLCCEHHKAMIAGLALLRNPELLLEIPLALLVVGLGGGSLPLFVHDHFPKSCIDAVEIDPSMLEVATQWFGFSQSDRMKVHIADGLDYIASLAGGGEARPCYDVIMFDVDSKDPTLGMSCPPPAFVEQSFLQKVKSILTPEGVFILNLVCRDLGLKDSVLAGLKAVFPLLYVRRIEGEVNEILFCQLHPEQKLATPELLETAQALERTLRKPGRGWDDTYVLSDMLKTVKIV

SEQ ID NO: 423 - DNA, 1473 bp, Homo sapiens
gccctcccaaagtgctggggatgacagatgtgagccactgtgcctggccagttgtcttgactttaatattaccacgaatggtgattatttgaaaagttgtctgaagtcattatagcagttggtttccttagtcactttttctaagtcctgaaaatgttaatagtctagttttcagggagcttttaaaagcatgtttcagttttaactgaaagaacttctcacttgctgaaaattgttttttcctccctcacttttgtttacccttgcaacaggcatcttccttgacttgatgcacctgaagaaacctgggggctttgacatatccttgttctacagagatatcatcagcatagcagaggatgaggacctcagggttcactttgaggaatccagcaagctagaagacctgttgcggaaggttcgcgccaaggagaccaggaagcgagcactcagcaggtgtgcactcagcccgggtcagctgcctacactgcccttaaatcagaagcaggctgggcgcggtggctcacacctgtaatcccaacagtttgggaggccaaggcaggcggattgcttgagcctaggagttgagaccagcttgggcaacatggcaagaccctctctctacctaaaaaaaaaaaaaaaaaaaatcagaagcaatgcactgctacacattgcttaacaaaccagaagcaatacattgctctgacctgactggctacttaactcgactatgccactgcctcactgtcttcctctaaaatagtttatttcaggatagcagaagctatttgctgctttatctctggcaagagctggcatgatatttctctaaagtaacacagccctccatttcgtgggggtagacagttatggtctaagagtatccttagctgtactcactagtacagtcatgtgttaattaatgatagggataccttcttagaattgcgtcattaggcgattttgtcattgtgcaaacatagagggtacttcacacacccagagagtacagcttgactacacacctgggctgtgtggttagcctgttgctcttaggctacaaacctgtatagcatattaccatactgtttactgtaggcaatggtaagtatttgtgtatctaaatgtatctaaaggtatagaaaaggtacaataaaaatatgatataggccagacacggtggctcacgccttgtaatcccaccactttgggatgccgaggcgggtggatcacaagttcaagagattgagaccatcctggcctacatggtgaaaccttgttctctactaaagatacaaaaattagctggacgtgatggcgcgcgcctgtagtcccagctactcaggaggctgagaatcgcttgaacccaggagtcagaggtggcagtgagccaagatcatgccactgcactccagcctggtgacaaagtgagactccgcctcaaaaaaaaaaaaaaaaaaaaaaaaaaaaaaa

SEQ ID NO: 424 - DNA, 521 bp, Homo sapiens
tcttcctcggcgctgcctacggaggtggcagccatctccttctcggcatcatggccgccctcagaccccttgtgaagcccaagatcgtcaaaaagagaaccaagaagttcatccggcaccagtcagaccgatatgtcaaaattaagcgtaactggcggaaacccagaggcattgacaacagggttcgtagaagattcaagggccagatcttgatgcccaacattggttatggaagcaacaaaaaaacaaagcacatgctgcccagtggcttccggaagttcctggtccacaacgtcaaggagctggaagtgctgctgatgtgcaacaaatcttactgtgccgagatcgctcacaatgtttcctccaagaaccgcaaagccatcgtggaaagagctgcccaactggccatcagagtcaccaaccccaatgccaggctgcgcagtgaagaaaatgagtaggcagctcatgtgcacgttttctgtttaaataaatgtaaaaactgccatctggcatcttccttc

SEQ ID NO: 425 - protein, 135 aa, Homo sapiens [sequence omitted]

SEQ ID NO: 426 - DNA, 795 bp, Homo sapiens
atgtgtccttggcggcctagactaggccgtcgctgtatggtgagccccagggaggcggatctgggcccccagaaggacacccgcctggatttgccccgtagcccggcccgggcccctcgggagcagaacagccttggtgaggtggacaggaggggacctcgcgagcagacgcgcgcgccagcgacagcagccccgccccggcctctcgggagccggggggcagaggctgcggagccccaggagggtctatcagccacagtctctgcatgtttccaagagcaacaggaaatgaacacattgcaggggccagtgtcattcaaagatgtggctgtggatttcacccaggaggagtggcggcaactggaccctgatgagaagatagcatacggggatgtgatgttggagaactacagccatctagtttctgtggggtatgattatcaccaagccaaacatcatcatggagtggaggtgaaggaagtggagcagggagaggagccgtggataatggaaggtgaatttccatgtcaacatagtccagaacctgctaaggccatcaaacctattgatcggaagtcagtccatcagatttgctctgggccagtggtactgagtctaagcactgcagtgaaggagttagtagaaaacagtctggatgctggtgccactaatattgatctaaagcttaaggactatggagtggatctcattgaagtttcagacaatggatgtggggtagaagaagaaaactttgaaggcttaatctctttcagctctgaaacatcacacatgtaa

SEQ ID NO: 427 - protein, 264 aa, Homo sapiens
MCPWRPRLGRRCMVSPREADLGPQKDTRLDLPRSPARAPREQNSLGEVDRRGPREQTRAPATAAPPRPLGSRGAEAAEPQEGLSATVSACFQEQQEMNTLQGPVSFKDVAVDFTQEEWRQLDPDEKIAYGDVMLENYSHLVSVGYDYHQAKHHHGVEVKEVEQGEEPWIMEGEFPCQHSPEPAKAIKPIDRKSVHQICSGPVVLSLSTAVKELVENSLDAGATNIDLKLKDYGVDLIEVSDNGCGVEEENFEGLISFSSETSHM

SEQ ID NO: 428 - DNA, 1044 bp, Homo sapiens
tgctgctctcctcccgctccgtcctcctcgcctgccaccggtgcacccagtccgctcacccagcccagtccgtccggtcctcaccgcctgccggccggcccaccccccaccgcaggccatggacgccatcaagaagaagatgcagatgctgaagctggacaaggagaacgccatcgaccgcgccgagcaggccgaagccgacaagaagcaagctgaggaccgctgcaagcagctggaggaggagcagcaggccctccagaagaagctgaaggggacagaggatgaggtggaaaagtattctgaatccgtgaaggaggcccaggagaaactggagcaggccgagaagaaggccactgatgctgaggcagatgtggcctccctgaaccgccgcattcagctggttgaggaggagctggaccgggcccaggagcgcctggctacagccctgcagaagctggaggaggccgagaaggcggctgatgagagcgagagaggaatgaaggtcatcgaaaaccgggccatgaaggatgaggagaagatggaactgcaggagatgcagctgaaggaggccaagcacatcgctgaggattcagaccgcaaatatgaagaggtggccaggaagctggtgatcctggaaggagagctggagcgctcggaggagagggctgaggtggccgagagccgagccagacagctggaggaggaacttcgaaccatggaccaggccctcaagtccctgatggcctcagaggaggagtattccaccaaagaagataaatatgaagaggagatcaaactgttggaggagaagctgaaggaggctgagacccgagcagagtttgccgagaggtctgtggcaaagttggagaaaaccatcgatgacctagaagagaccttggccagtgccaaggaggagaacgtcgagattcaccagaccttggaccagaccctgctggaactcaacaacctgtgagggccagccccacccccagccaggctatggttgccaccccaacccaataaaactgatgttactagcctctc

SEQ ID NO: 429 - protein, 284 aa, Homo sapiens
MDAIKKKMQMLKLDKENAIDRAEQAEADKKQAEDRCKQLEEEQQALQKKLKGTEDEVEKYSESVKEAQEKLEQAEKKATDAEADVASLNRRIQLVEEELDRAQERLATALQKLEEAEKAADESERGMKVIENRAMKDEEKMELQEMQLKEAKHIAEDSDRKYEEVARKLVILEGELERSEERAEVAESRARQLEEELRTMDQALKSLMASEEEYSTKEDKYEEEIKLLEEKLKEAETRAEFAERSVAKLEKTIDDLEETLASAKEENVEIHQTLDQTLLELNNL

SEQ ID NO: 430 - DNA, 515 bp, Homo sapiens
cttttcctccttggctgtctgaagatagatcgccatcatgaacgacaccgtaactatccgcactagaaagttcatgaccaaccgactacttcagaggaaacaaatggtcattgatgtccttcaccccgggaaggcgacagtgcctaagacagaaattcgggaaaaactagccaaaatgtacaagaccacaccggatgtcatctttgtatttggattcagaactcattttggtggtggcaagacaactggctttggcatgatttatgattccctggattatgcaaagaaaaatgaacccaaacatagacttgcaagacatggcctgtatgagaagaaaaagacctcaagaaagcaacgaaaggaacgcaagaacagaatgaagaaagtcagggggactgcaaaggccaatgttggtgctggcaaaaagccgaaggagtaaaggtgctgcaatgatgttagctgtggccactgtggatttttcgcaagaacattaataaactaaaaacttcatgtgt

SEQ ID NO: 431 - protein, 133 aa, Homo sapiens [sequence omitted]

SEQ ID NO: 432 - DNA, 537 bp, Homo sapiens
cttttcctccttggctgtctgaagatagatcgccatcatgaacgacaccgtaactatccgcactagaaagttcatgaccaaccgactacttcagaggaaacaaatggtcattgatgtccttcaccccgggaaggcgacagtgcctaagacagaaattcgggaaaaactagccaaaatgtacaagaccacaccggatgtcatctttgtatttggattcagaactcattttggtggtggcaagacaactggctttggcatgatttatgattccctggattatgcaaagaaaaatgaacccaaacatagacttgcaagacatggcctgtatgagaagaaaaagacctcaagaaagcaacgaaaggaacgcaagaacagaatgaagaaagtcagggggactgcaaaggccaatgttggtgctggcaaaaagtgagctggagattggatcacagccgaaggagtaaaggtgctgcaatgatgttagctgtggccactgtggatttttcgcaagaacattaataaactaaaaacttcatgtgt

SEQ ID NO: 433 - protein, 130 aa, Homo sapiens
MNDTVTIRTRKFMTNRLLQRKQMVIDVLHPGKATVPKTEIREKLAKMYKTTPDVIFVFGFRTHFGGGKTTGFGMIYDSLDYAKKNEPKHRLARHGLYEKKKTSRKQRKERKNRMKKVRGTAKANVGAGKK

SEQ ID NO: 434 - DNA, 1793 bp, Homo sapiens
cgcgtccgccccgcgagcacagagcctcgcctttgccgatccgccgcccgtccacacccgccgccagctcaccatggatgatgatatcgccgcgctcgtcgtcgacaacggctccggcatgtgcaaggccggcttcgcgggcgacgatgccccccgggccgtcttcccctccatcgtggggcgccccaggcaccagggcgtgatggtgggcatgggtcagaaggattcctatgtgggcgacgaggcccagagcaagagaggcatcctcaccctgaagtaccccatcgagcacggcatcgtcaccaactgggacgacatggagaaaatctggcaccacaccttctacaatgagctgcgtgtggctcccgaggagcaccccgtgctgctgaccgaggcccccctgaaccccaaggccaaccgcgagaagatgacccagatcatgtttgagaccttcaacaccccagccatgtacgttgctatccaggctgtgctatccctgtacgcctctggccgtaccactggcatcgtgatggactccggtgacggggtcacccacactgtgcccatctacgaggggtatgccctcccccatgccatcctgcgtctggacctggctggccgggacctgactgactacctcatgaagatcctcaccgagcgcggctacagcttcaccaccacggccgagcgggaaatcgtgcgtgacattaaggagaagctgtgctacgtcgccctggacttcgagcaagagatggccacggctgcttccagctcctccctggagaagagctacgagctgcctgacggccaggtcatcaccattggcaatgagcggttccgctgccctgaggcactcttccagccttccttcctgggcatggagtcctgtggcatccacgaaactaccttcaactccatcatgaagtgtgacgtggacatccgcaaagacctgtacgccaacacagtgctgtctggcggcaccaccatgtaccctggcattgccgacaggatgcagaaggagatcactgccctggcacccagcacaatgaagatcaagatcattgctcctcctgagcgcaagtactccgtgtggatcggcggctccatcctggcctcgctgtccaccttccagcagatgtggatcagcaagcaggagtatgacgagtccggcccctccatcgtccaccgcaaatgcttctaggcggactatgacttagttgcgttacaccctttcttgacaaaacctaacttgcgcagaaaacaagatgagattggcatggctttatttgttttttttgttttgttttggttttttttttttttttggcttgactcaggatttaaaaactggaacggtgaaggtgacagcagtcggttggagcgagcatcccccaaagttcacaatgtggccgaggactttgattgcacattgttgtttttttaatagtcattccaaatatgagatgcattgttacaggaagtcccttgccatcctaaaagccaccccacttctctctaaggagaatggcccagtcctctcccaagtccacacaggggaggtgatagcattgctttcgtgtaaattatgtaatgcaaaatttttttaatcttcgccttaatacttttttattttgttttattttgaatgatgagccttcgtgcccccccttccccctttttgtcccccaacttgagatgtatgaaggcttttggtctccctgggagtgggtggaggcagccagggcttacctgtacactgacttgagaccagttgaataaaagtgcacacctta

SEQ ID NO: 435 - protein, 375 aa, Homo sapiens
MDDDIAALVVDNGSGMCKAGFAGDDAPRAVFPSIVGRPRHQGVMVGMGQKDSYVGDEAQSKRGILTLKYPIEHGIVTNWDDMEKIWHHTFYNELRVAPEEHPVLLTEAPLNPKANREKMTQIMFETFNTPAMYVAIQAVLSLYASGRTTGIVMDSGDGVTHTVPIYEGYALPHAILRLDLAGRDLTDYLMKILTERGYSFTTTAEREIVRDIKEKLCYVALDFEQEMATAASSSSLEKSYELPDGQVITIGNERFRCPEALFQPSFLGMESCGIHETTFNSIMKCDVDIRKDLYANTVLSGGTTMYPGIADRMQKEITALAPSTMKIKIIAPPERKYSVWIGGSILASLSTFQQMWISKQEYDESGPSIVHRKCF

SEQ ID NO: 436 - DNA, 594 bp, Homo sapiens
ctgcccctttctttttttcaggcggccgggaagatggcggacattcagactgagcgtgcctaccaaaagcagccgaccatctttcaaaacaagaagagggtcctgctgggagaaactggcaaggagaagctcccgcggtactacaagaacatcggtctgggcttcaagacacccaaggaggctattgagggcacctacattgacaagaaatgccccttcactggtaatgtgtccattcgagggcggatcctctctggcgtggtgaccaagatgaagatgcagaggaccattgtcatccgccgagactatctgcactacatccgcaagtacaaccgcttcgagaagcgccacaagaacatgtctgtacacctgtccccctgcttcagggacgtccagatcggtgacatcgtcacagtgggcgagtgccggcctctgagcaagacagtgcgcttcaacgtgctcaaggtcaccaaggctgccggcaccaagaagcagttccagaagttctgaggctggacatcggcccgctccccacaatgaaataaagttattttctcattccaaaaaaaaaaaaaaaaaaaaaaaaaaaaaaaa

SEQ ID NO: 437 - protein, 158 aa, Homo sapiens [sequence omitted]

SEQ ID NO: 438 - DNA, 1707 bp, Homo sapiens
cggcgctgggctgaggggaggggttgtcttaaaagtctctccttccccctgtaggggcggccggcgagtcccagtgagagcggagggtgccagaggtagggggccgagaaacaaagttcccggggcttcctccggggccgcggtcggggctgcgcgtttgaccgcccccctcctcgcgaagcaatggcttccaaactcctgcgcgcggtcatcctcgggccgcccggctcgggcaagggcaccgtgtgccagaggatcgcccagaactttggtctccagcatctctccagcggccacttcttgcgggagaacatcaaggccagcaccgaagttggtgagatggcaaagcagtatatagagaaaagtcttttggttccagaccatgtgatcacacgcctaatgatgtccgagttggagaacaggcgtggacagcactggctccttgatggttttcctaggacattaggacaagccgaagccctggacaaaatctgtgaagtggatctagtgatcagtttgaatattccatttgaaacacttaaagatcgtctcagccgccgttggattcaccctcctagcggaagggtatataacctggacttcaatccacctcatgtacatggtattgatgacgtcactggtgaaccgttagtccagcaggaggatgataaacccgaagcagttgctgccaggctaagacagtacaaagacgtggcaaagccagtcattgaattatacaagagccgaggagtgctccaccaattttccggaacggagacgaacaaaatctggccctacgtttacacacttttctcaaacaagatcacacctattcagtccaaagaagcatattgaccctgcccaatggaagaaccaggaagatgtggtcattcattcaatagtgtgtgtagtattggtgctgtgtccaaattagaagctagctgaggtagcttgcagcatcttttctagttgaaatggtgaactgataggaaaacaaatgagtagaaagagttcatgaagaggccctcctctgcctttcaaaaggctggtcacctacacatgtttaaggtgtctctgcacatgtctcaagcccatcacaagaaagcaagtacagtgtggatttcaaatggtgtgtaacttcagctccagctggtttttgacagctgttgctgtggtaatatttttgacatgtgatggtgatagtctctggttctccccatccccacaaaggctgttgaaccacagcaccaggaagcctgagaatgaatcctgagggctctagcccaggctttgtcccaggctttctggtgtgtgccctcctggtaacagtgaaattgaagctacttactcatagtggttgtttctctggtcttgagtgactgtgtccacagttcatttttttccggtaggaataactccttttctacatccacgctccatagagtctctccttttcagacatcctgggatgaaagaatttggcttttttttttcttttttttttggacatctgttttcactcttaggcttttaaacaatagttattgcttttatccctctcagattctaataactgagagcgatggggctatattgaatctctgtatgcactgagaactgagctatgaagagaatcttattaaactgctggtctgactttatggattgacactgttcctttcttttattgtgaaaaaaaaaaaaaaa

SEQ ID NO: 439 - protein, 223 aa, Homo sapiens
MASKLLRAVILGPPGSGKGTVCQRIAQNFGLQHLSSGHFLRENIKASTEVGEMAKQYIEKSLLVPDHVITRLMMSELENRRGQHWLLDGFPRTLGQAEALDKICEVDLVISLNIPFETLKDRLSRRWIHPPSGRVYNLDFNPPHVHGIDDVTGEPLVQQEDDKPEAVAARLRQYKDVAKPVIELYKSRGVLHQFSGTETNKIWPYVYTLFSNKITPIQSKEAY

SEQ ID NO: 440 - DNA, 1464 bp, Homo sapiens
agtaccgggtacgcaggggtgcctcaaccacactccgtccacggactctccgttattttaggaggtccctggccaaagatttatttctcttgacaaccaagggcctccgtctggatttccaaggaagaatttcctctgaagcaccggaacttgctactaccagcaccatgccctaccaatatccagcactgaccccggagcagaagaaggagctgtctgacatcgctcaccgcatcgtggcacctggcaagggcatcctggctgcagatgagtccactgggagcattgccaagcggctgcagtccattggcaccgagaacaccgaggagaaccggcgcttctaccgccagctgctgctgacagctgacgaccgcgtgaacccctgcattgggggtgtcatcctcttccatgagacactctaccagaaggcggatgatgggcgtcccttcccccaagttatcaaatccaagggcggtgttgtgggcatcaaggtagacaagggcgtggtccccctggcagggacaaatggcgagactaccacccaagggttggatgggctgtctgagcgctgtgcccagtacaagaaggacggagctgacttcgccaagtggcgttgtgtgctgaagattggggaacacaccccctcagccctcgccatcatggaaaatgccaatgttctggcccgttatgccagtatctgccagcagaatggcattgtgcccatcgtggagcctgagatcctccctgatggggaccatgacttgaagcgctgccagtatgtgaccgagaaggtgctggctgctgtctacaaggctctgagtgaccaccacatctacctggaaggcaccttgctgaagcccaacatggtcaccccaggccatgcttgcactcagaagttttctcatgaggagattgccatggcgaccgtcacagcgctgcgccgcacagtgccccccgctgtcactgggatcaccttcctgtctggaggccagagtgaggaggaggcgtccatcaacctcaatgccattaacaagtgccccctgctgaagccctgggccctgaccttctcctacggccgagccctgcaggcctctgccctgaaggcctggggcgggaagaaggagaacctgaaggctgcgcaggaggagtatgtcaagcgagccctggccaacagccttgcctgtcaaggaaagtacactccgagcggtcaggctggggctgctgccagcgagtccctcttcgtctctaaccacgcctattaagcggaggtgttcccaggctgcccccaacaactccaggccctgccccctcccactcttgaagaggaggccgcctcctcggggctccaggctggcttgcccgcgctctttcttccctcgtgacagtggtgtgtggtgtcgtctgtgaatgctaagtccatcaccctttccggcacactgccaaataaacagctatttaaggggg

SEQ ID NO: 441 - protein, 364 aa, Homo sapiens
MPYQYPALTPEQKKELSDIAHRIVAPGKGILAADESTGSIAKRLQSIGTENTEENRRFYRQLLLTADDRVNPCIGGVILFHETLYQKADDGRPFPQVIKSKGGVVGIKVDKGVVPLAGTNGETTTQGLDGLSERCAQYKKDGADFAKWRCVLKIGEHTPSALAIMENANVLARYASICQQNGIVPIVEPEILPDGDHDLKRCQYVTEKVLAAVYKALSDHHIYLEGTLLKPNMVTPGHACTQKFSHEEIAMATVTALRRTVPPAVTGITFLSGGQSEEEASINLNAINKCPLLKPWALTFSYGRALQASALKAWGGKKENLKAAQEEYVKRALANSLACQGKYTPSGQAGAAASESLFVSNHAY

SEQ ID NO: 442 - DNA, 568 bp, Homo sapiens
gaaccgccatcttccagtaattcgccaaaatgacgaacacaaagggaaagaggagaggcacccgatatatgttctctaggccttttagaaaacatggagttgttcctttggccacatatatgcgaatctataagaaaggtgatattgtagacatcaagggaatgggtactgttcaaaaaggaatgccccacaagtgttaccatggcaaaactggaagagtctacaatgttacccagcatgctgttggcattgttgtaaacaaacaagttaagggcaagattcttgccaagagaattaatgtgcgtattgagcacattaagcactctaagagccgagatagcttcctgaaacgtgtgaaggaaaatgatcagaaaaagaaagaagccaaagagaaaggtacctgggttcaactaaagcgccagcctgctccacccagagaagcacactttgtgagaaccaatgggaaggagcctgagctgctggaacctattccctatgaattcatggcataataggtgttaaaaaaaaaaataaaggacctctgggctacaaaaaaaaaaaaaaaaaa

SEQ ID NO: 443 - protein, 160 aa, Homo sapiens [sequence omitted]

SEQ ID NO: 444 - DNA, 1474 bp, Homo sapiens
aaaaagaaatcaagaatgcaattttatttacaatagtcacgccggaaatacctagaaataaatttaactgaggatgtaaaagacctctacaaggagagttcaatgcgtagcgggagcggagagctgaccccagagagccctgggcagccccacctccgccgccggcctagttaccatcacaccccggagagcccgcagctgccgcagccggccccagtcaccatcaccgcaaccatgagcagcgaggccgagacccagcagccgcccgccgccccccccgccgcccccgccctcagcgccgccgacaccaagcccggcactaccggagcggcgcagggagcggtggcccgggcggctcacatcggcggcgctggcgcgggcgacaagaaggtcatcgcaacgaaggttttgggaacagtaaaatggttcaatgtaaggaacggatatggtttcatcaacaggaatgacaccaaggaagatgtatttgtacaccagactgccataaagaagaataaccccaggaagtaccttcgcagtgtaggagatggagagactgtggagtttgatgttgttgaaggagaaaagggtgcggaggcagcaaatgttacaggtcctggtggtgttccagttcaaggcagtaaatatgcagcagaccgtaaccattatagacgctatccacgtcgtaggggtcctccacgcaattaccagcaaaattaccagaatagtgagagtggggaaaagaacgagggatcggagagtgctcccgaagccaggcccaacaacgccggccctacgcaggcgaaggttcccaccttactacatgcggagacctatgggcgtcgaccacagtattccaaccctcctgtgcagggagaagtgatggagggtgctgacaaccagggtgcaggagaacaaggtagaccagtgaggcagatatgtatcggggatatagaccacgattccgcaggggccctcctcgccaaaagacagcctagagaggacggcaatgaagaagataaagaaaatcaaggagatgagacccaaggtcagcagccacctcaagctcggtaccgccgcaacttcaattaccgacgcagacgcccagaaaaccctaaaccacaagatggcaaagagacaaaagcagccgatccaccagctgagaattcgtccgctcccgaggctgagcagggcggggctgagtaaatgccggcttaccatctctaccatcatccggtttagtcatccaacaagaagaaatatgaaattccagcaataagaaatgaacaaaagattggagctgaagacctaaagtgcttgctttttgcccgttgaccagataaatagaactatctgcattatctatgcagcatggggtttttattatgttttacctaaagacgtctctttttggtaataacaaaccgtgttttttaaaaaagcctggtttttctcaatacgcctttaaaggaattcc

SEQ ID NO: 445 - protein, 322 aa, Homo sapiens
MSSEAETQQPPAAPPAAPALSAADTKPGTTGAAQGAVARAAHIGGAGAGDKKVIATKVLGTVKWFNVRNGYGFINRNDTKEDVFVHQTAIKKNNPRKYLRSVGDGETVEFDVVEGEKGAEAANVTGPGGVPVQGSKYAADRNHYRRYPRRRGPPRNYQQNYQNSESGEKNEGSESAPEARPNNAGPTQAKVPTLLHAETYGRRPQYSNPPVQGEVMEGADNQGAGEQGRPVRQICIGDIDHDSAGALLAKRQPREDGNEEDKENQGDETQGQQPPQARYRRNFNYRRRRPENPKPQDGKETKAADPPAENSSAPEAEQGGAE

SEQ ID NO: 446 - DNA, 546 bp, Homo sapiens
attggagacccttttcacaagatggcgccgaaagcgaagaaggaagctcctgcccctcctaaagctgaagccaaagcgaaggctttaaaggccaagaaggcagtgttgaaaggtgtccacagccacaaaaagaagaagatccgcacgtcacccaccttccggcggccgaagacactgcgactccggagacagcccaaatatcctcggaagagcgctcccaggagaaacaagcttgaccactatgctatcatcaagtttccgctgaccactgagtctgccatgaagaagatagaagacaacaacacacttgtgttcattgtggatgttaaagccaacaagcaccagattaaacaggctgtgaagaagctgtatgacattgatgtggccaaggtcaacaccctgattcggcctgatggagagaagaaggcatatgttcgactggctcctgattacgatgctttggatgttgccaacaaaattgggatcatctaaactgagtccagctgcctaattctgaatatatatatatatatatcttttcaccat

SEQ ID NO: 447 - protein, 156 aa, Homo sapiens [sequence omitted]

SEQ ID NO: 448 - DNA, 2936 bp, Homo sapiens
ggaatggcactcagggcaaaggcagaggtgtgcgtggcagcgccctggctgtccctgcaaagggcacgggcactgggcactagagccgctcgggcccctaggacggtgctgccgtttgaagccatgccccagcatccaggcaacaggtggctgaggctgctgcagatctggagggagcagggttatgagcacctgcacctggagatgcaccagaccttccaggagctggggcccattttcaggtacaacttgggaggaccacgcatggtgtgtgtgatgctgccggaggatgtggagaagctgcaacaggtggacagcctgcatccctgcaggatgatcctggagccctgggtggcctacagacaacatcgtgggcacaaatgtggcgtgttcttgttgaatgggcctgaatggcgcttcaaccgattgcggctgaacccagatgtgctgtcgcccaaggccgtgcagaggttcctcccgatggtggatgcagtggccagggacttctcccaggccctgaagaagaaggtgctgcagaacgcccgggggagcctgaccctggacgtccagcccagcatcttccactacaccatagaagccagcaacttagctctttttggagagcggctgggcctggttggccacagccccagttctgccagcctgaacttcctccatgccctggaggtcatgttcaaatccaccgtccagctcatgttcatgcccaggagcctgtctcgctggatcagacccaaggtgtggaaggagcactttgaggcctgggactgcatcttccagtacggtgacaactgtatccagaaaatctaccaggaactggccttcaaccgccctcaacactacacaggcatcgtggcagagctcctgttgaaggcggaactgtcactagaagccatcaaggccaactctatggaactcactgcagggagcgtggacacgacagcgtttcccttgctgatgacgctctttgagctggctcggaaccccgacgtgcagcagatcctgcgccaggagagcctggccgccgcagccagcatcagtgaacatccccagaaggcaaccaccgagctgcccttgctgcgggcggccctcaaggagaccttgcggctctaccctgtgggtctgtttttggagcgagtggtgagctcagacttggtgcttcagaactaccacatcccagctgggacattggtacaggttttcctctactcgctgggtcgcaatgccgccttgttcccgaggcctgagcggtataatccccagcgctggctagacatcaggggctccggcaggaacttccaccacgtgccctttggctttggcatgcgccagtgcctcgggcggcgcctggcagaggcagagatgctgctgctgctgcaccacgtgctgaagcacttcctggtggagacactaactcaagaggacataaagatggtctacagcttcatattgaggcctggcacgtcccccctcctcactttcagagcgattaactagtcttgcatctgcacccagggtcccagcctggccaccagcttccctctgcctgaccccaggccacctgtcttctctcccacatgcacagcttcctgagtcacccctctgtccagccagctcctgcacaaatggaactccccagggcctccaggactggggcttgccaggcttgtcaaatagcaaggccagggcacagctggagacgatcttgctggcagggcctggccttgtccccagccccacctggccccttctccagcaagcagtgccctctggacagcttgactctactcccagcgctggctccaggctcctcatgaggccatgcaagggtgctgtgattttgtcccttgccttcctgcctagtctcacatgtccctgtccctctcgccctggccagggcctctgtgcagacagtgtcagagtcattaagcgggatcccagcatctcagagtccagtcaagttccctcctgcagcctgaccccaggcagctcgagcatgccctgagctctctgaaagttgtcaccctggaatacgatcctgcagggtagactaaaaaggcccctgtggtcacttatcctgacacattttcaagtgatacaactgagtctcgaggggcgtgtgttccccagctgatcatgtcagcctcatgccccaggcctcgtctttcatggaccaggtcttgttcaagcagcgagtgttgggtcctctgcttcctgagctgtcccctggagaaggtcccgaggatgctgtcaggagatggaagagtcatgtggggtgggaacctggggtgtggttccagaaatgtttttggcaacaggagagacaggattgggccaacaaggactcagatgagttttattgactcattcctctggttgatacggagccatgtcatgtgccacgacctggggtgggcacagggaggctgcagttccctacgtgaacctgccttgggcctcatctgctcctagcccagcagagagagttgacccctcctgaactggccactccccagtgctcctgtgcagggataggaagtgccccagggtgagaacgtgcccagccacatcatctttatctcctgggattttcattagggcaaagatctcagcagccagctcctggtagctgatgaggatcagagcgtttgttcccccatgaaaggggaaatacttaggtaatcattccaggtgtgttcagtagttccaggactcagggactcaggccagtcaccctgtgaccgcaggttgctttcccaccctgggcaatgcagtgcagcatgggaaaggaataagggggcaacaaggtgcacagacctcagagatggcttccttgtttatggggctctcacagatacccatccaactcctctagtcagcactagatcatgggatcctaaaataaaccttggaaaaat

SEQ ID NO: 449 - protein, 503 aa, Homo sapiens
MALRAKAEVCVAAPWLSLQRARALGTRAARAPRTVLPFEAMPQHPGNRWLRLLQIWREQGYEHLHLEMHQTFQELGPIFRYNLGGPRMVCVMLPEDVEKLQQVDSLHPCRMILEPWVAYRQHRGHKCGVFLLNGPEWRFNRLRLNPDVLSPKAVQRFLPMVDAVARDFSQALKKKVLQNARGSLTLDVQPSIFHYTIEASNLALFGERLGLVGHSPSSASLNFLHALEVMFKSTVQLMFMPRSLSRWIRPKVWKEHFEAWDCIFQYGDNCIQKIYQELAFNRPQHYTGIVAELLLKAELSLEAIKANSMELTAGSVDTTAFPLLMTLFELARNPDVQQILRQESLAAAASISEHPQKATTELPLLRAALKETLRLYPVGLFLERVVSSDLVLQNYHIPAGTLVQVFLYSLGRNAALFPRPERYNPQRWLDIRGSGRNFHHVPFGFGMRQCLGRRLAEAEMLLLLHHVLKHFLVETLTQEDIKMVYSFILRPGTSPLLTFRAIN

SEQ ID NO: 450 - DNA, 2345 bp, Homo sapiens
ggcacgaggcagtggctccttgcacagcagctgcacgcgccgtggctccggatctcttcgtctttgcagcgtagcccgagtcggtcagcgccggaggacctcagcagccatgtcgaagccccatagtcaagccgggactgccttcattcagacccagcagctgcacgcagccatggctgacacattcctggagcacatgtgccgcctggacattgattcaccacccatcacagcccggaacactggcatcatctgtaccattggcccagcttcccgatcagtggagacgttgaaggagatgattaagtctggaatgaatgtggctcgtctgaacttctctcatggaactcatgagtaccatgcggagaccatcaagaatgtgcgcacagccacggaaagctttgcttctgaccccatcctctaccggcccgttgctgtggctctagacactaaaggacctgagatccgaactgggctcatcaagggcagcggcactgcagaggtggagctgaagaagggagccactctcaaaatcacgctggataacgcctacatggaaaagtgtgacgagaacatcctgtggctggactacaagaacatctgcaaggtggtggaagtgggcagcaagatctacgtggatgatgggcttatttctctccaggtgaagcagaaaggtgccgacttcctggtgacggaggtggaaaatggtggctccttgggcagcaagaagggtgtgaaccttcctggggctgctgtggacttgcctgctgtgtcggagaaggacatccaggatctgaagtttggggtcgagcaggatgttgatatggtgtttgcgtcattcatccgcaaggcatctgatgtccatgaagttaggaaggtcctgggagagaagggaaagaacatcaagattatcagcaaaatcgagaatcatgagggggttcggaggtttgatgaaatcctggaggccagtgatgggatcatggtggctcgtggtgatctaggcattgagattcctgcagagaaggtcttccttgctcagaagatgatgattggacggtgcaaccgagctgggaagcctgtcatctgtgctactcagatgctggagagcatgatcaagaagccccgccccactcgggctgaaggcagtgatgtggccaatgcagtcctggatggagccgactgcatcatgctgtctggagaaacagccaaaggggactatcctctggaggctgtgcgcatgcagcacctgattgcccgtgaggcagaggctgccatctaccacttgcaattatttgaggaactccgccgcctggcgcccattaccagcgaccccacagaagccaccgccgtgggtgccgtggaggcctccttcaagtgctgcagtggggccataatcgtcctcaccaagtctggcaggtctgctcaccaggtggccagataccgcccacgtgcccccatcattgctgtgacccggaatccccagacagctcgtcaggcccacctgtaccgtggcatcttccctgtgctgtgcaaggacccagtccaggaggcctgggctgaggacgtggacctccgggtgaactttgccatgaatgttggcaaggcccgaggcttcttcaagaagggacatgtggtcattgtgctgaccggatggcgccctggctccggcttcaccaacaccatgcgtgttgttcctgtgccgtgatggaccccagagcccctcctccagcccctgtcccacccccttcccccagcccatccattaggccagcaacgcttgtagaactcactctgggctgtaacgtggcactggtaggttgggacaccagggaagaagatcaacgcctcactgaaacatggctgtgtttgcagcctgctctagtgggacagcccagagcctggctgcccatcatgtggccccacccaatcaagggaagaaggaggaatgctggactggaggcccctggagccagatggcaagagggtgacagcttcctttcctgtgtgtactctgtccagttcctttagaaaaaatggatgcccagaggactcccaaccctggcttggggtcaagaaacagccagcaagagttaggggccttagggcactgggctgttgttccattgaagccgactctggccctggcccttacttgcttctctagctctctaggcctctccagtttgcacctgtccccaccctccactcagctgtcctgcagcaaacactccaccctccaccttccattttcccccactactgcagcacctccaggcctgttgctatagagcctacctgtatgtcaataaacaacagctgaagcaaaaaaaaaaaaaaaaaaaaaa

SEQ ID NO: 451 - protein, 531 aa, Homo sapiens [sequence omitted]

SEQ ID NO: 452 - DNA, 715 bp, Homo sapiens
  misc_feature (2)..(5): n is a, c, g, or t
  misc_feature (110)..(110): n is a, c, g, or t
  misc_feature (112)..(112): n is a, c, g, or t
  misc_feature (156)..(156): n is a, c, g, or t
  misc_feature (173)..(173): n is a, c, g, or t
  misc_feature (230)..(230): n is a, c, g, or t
  misc_feature (243)..(243): n is a, c, g, or t
  misc_feature (251)..(251): n is a, c, g, or t
  misc_feature (414)..(414): n is a, c, g, or t
  misc_feature (444)..(444): n is a, c, g, or t
  misc_feature (471)..(471): n is a, c, g, or t
  misc_feature (473)..(473): n is a, c, g, or t
  misc_feature (522)..(524): n is a, c, g, or t
  misc_feature (530)..(530): n is a, c, g, or t
  misc_feature (538)..(538): n is a, c, g, or t
  misc_feature (543)..(544): n is a, c, g, or t
  misc_feature (550)..(550): n is a, c, g, or t
  misc_feature (555)..(555): n is a, c, g, or t
  misc_feature (558)..(582): n is a, c, g, or t
  misc_feature (587)..(715): n is a, c, g, or t
tnnnncgtcatccaattttatggctgcgtagtaattccatgctgtatacgtgccacactttctttatccagcctatcattcatgggcattcgagttggttccaagtcttngntattgtaaatagtgctgcagtaaacatacgtgtccacgtgtctncctagtaggaacttctncctcttcagcccgctgagtagctggcactttaaggcaggtgccaacgcaccggcagnaagcttccttttnggcccggnaaaaactgaggtgcaggtagtataagccattgatcacggaacgcacaggagcagagctcgagtccaggcatcgtggctccacccgtcatgctggatgcatctttaggctccgctctaggtattgtgtatcctttacgggatcagccaccggcagttgccttgngagcacgatgaaaacctcctgccggtcttnggggtctcatccctgtttctatacgtngnatcccaacataaagaccggatgtcccttcggtgaccagcttctcacccnnnccaacnccaggggntccanntggtangtgtncannnnnnnnnnnnnnnnnnnnnnnnntatcnnnnnnnnnnnnnnnnnnnnnnnnnnnnnnnnnnnnnnnnnnnnnnnnnnnnnnnnnnnnnnnnnnnnnnnnnnnnnnnnnnnnnnnnnnnnnnnnnnnnnnnnnnnnnnnnnnnnnnnnnnnnnnnnn

SEQ ID NO: 453 - DNA, 514 bp, Homo sapiens
ctttttcgtctgggctgccaacatgccatccagactgaggaagacccggaaacttaggggccacgtgagccacggccacggccgcataggcaagcaccggaagcaccccggcggccgcggtaatgctggtggtctgcatcaccaccggatcaacttcgacaaataccacccaggctactttgggaaagttggtatgaagcattaccacttaaagaggaaccagagcttctgcccaactgtcaaccttgacaaattgtggactttggtcagtgaacagacacgggtgaatgctgctaaaaacaagactggggctgctcccatcattgatgtggtgcgatcgggctactacaaagttctgggaaagggaaagctcccaaagcagcctgtcatcgtgaaggccaaattcttcagcagaagagctgaggagaagattaagagtgttgggggggcctgtgtcctggtggcttgaagccacatggagggagtttcattaaatgctaactacttttaaaaa

SEQ ID NO: 454 - protein, 148 aa, Homo sapiens [sequence omitted]

SEQ ID NO: 455 - DNA, 725 bp, Homo sapiens
ggcggcgcgtggtctacgccgagtgacagagacgctcaggctgtgttctcaggatgaccgagtgggagacagcagcaccagcggtggcagagaccccagacatcaagctctttgggaagtggagcaccgatgatgtgcagatcaatgacatttccctgcaggattacattgcagtgaaggagaagtatgccaagtacctgcctcacagtgcagggcggtatgccgccaaacgcttccgcaaagctcagtgtcccattgtggagcgcctcactaactccatgatgatgcacggccgcaacaacggcaagaagctcatgactgtgcgcatcgtcaagcatgccttcgagatcatacacctgctcacaggcgagaaccctctgcaggtcctggtgaacgccatcatcaacagtggtccccgggaggactccacacgcattgggcgcgccgggactgtgagacgacaggctgtggatgtgtcccccctgcgccgtgtgaaccaggccatctggctgctgtgcacaggcgctcgtgaggctgccttccggaacattaagaccattgctgagtgcctggcagatgagctcatcaatgctgccaagggctcctcgaactcctatgccattaagaagaaggacgagctggagcgtgtggccaagtccaaccgctgattttcccagctgctgcccaataaacctgtctgccctttggggcagtcccagccaaaa

SEQ ID NO: 456 - protein, 204 aa, Homo sapiens [sequence omitted]

SEQ ID NO: 457 - DNA, 539 bp, Homo sapiens
ctttctttttgaggaagacgcggtcgtaagggctgaggatttttggtccgcacgctcctgctcctgactcaccgctgttcgctctcgccgaggaacaagtcggtcaggaagcccgcgcgcaacagccatggcttttaaggataccggaaaaacacccgtggagccggaggtggcaattcaccgaattcgaatcaccctaacaagccgcaacgtaaaatccttggaaaaggtgtgtgctgacttgataagaggcgcaaaagaaaagaatctcaaagtgaaaggaccagttcgaatgcctaccaagactttgagaatcactacaagaaaaactccttgtggtgaaggttctaagacgtgggatcgtttccagatgagaattcacaagcgactcattgacttgcacagtccttctgagattgttaagcagattacttccatcagtattgagccaggagttgaggtggaagtcaccattgcagatgcttaagtcaactattttaataaattgatgaccagttgttaaaaaaaaaaaaaaaaaa

SEQ ID NO: 458 - protein, 119 aa, Homo sapiens [sequence omitted]

SEQ ID NO: 459 - DNA, 2758 bp, Homo sapiens
ctatccgcgcgcgtcgccggcccagtcctgtcgctgacgggaggatctgaagccggccgcaggtcaaagagtaaaatgaagtacattctggttactggtggtgttatatcaggaattggaaaaggaatcattgccagcagtgtgggcacaatactcaagtcatgtggtttacatgtaacttcaatcaaaattgacccctacattaacattgatgcaggaacattctctccttatgagcatggtgaggtttttgtgctggatgatggtggggaagtagaccttgacctgggtaactatgagcggttccttgacatccgcctcaccaaggacaataatctgaccactggaaagatataccagtatgtcattaacaaggaacggaaaggagattacttggggaaaactgtccaagttgtccctcatatcacagatgcaatccaggagtgggtgatgagacaggcgttaatacctgtagatgaagatggcctggaacctcaagtgtgtgttattgagcttggtggaaccgtgggggacatagaaagcatgccctttattgaggccttccgtcagttccaattcaaggtcaaaagagagaacttttgtaacatccacgtcagtctagttccccagccaagttcaacaggggaacagaagactaaacctacccagaatagtgttcgggaacttagaggacttgggctttccccagatctggttgtatgcaggtgctcaaatccacttgacacatcagtgaaggagaaaatatcaatgttctgccatgttgagcctgaacaagtgatctgtgtccacgatgtctcatccatctaccgagtccccttgttgttagaggagcaaggggttgtagattattttcttcgaagacttgaccttcctattgagaggcagccaagaaaaatgctgatgaaatggaaagagatggctgacagatatgatcgcttgctggagacctgctctattgcccttgtggcgaaatacaccgagttctcagactcctatgcctctgtcattaaggctctggagcattctgcactggccatcaaccacaaattggaaatcaagtacatagattctgcggacttggagcccatcacctcgcaagaagagcccgtgcgctaccacgaagcttggcagaagctctgtagtgctcatggagtgctggttccaggaggatttggtgttcgaggaacagaaggaaaaatccaagcaattgcctgggctcggaatcagaaaaagccttttttgggcgtgtgcttagggatgcagttggcagtggttgaattctcaagaaacgtgctgggatggcaagatgccaattctacagagtttgaccctacgaccagtcatcccgtggtcgtagacatgccagaacacaacccagggcagatgggcggaaccatgaggctgggcaagaggagaaccctgttccagaccaagaactcagtcatgaggaaactctatggagacgcagactacttggaagagaggcaccgccaccgatttgaggtgaatccagtctggaaaaagtgtttggaagaacaaggcttgaagtttgttggccaagatgttgaaggagagagaatggaaattgtggagttagaagatcatcccttttttgttggggttcagtaccaccctgagttcctgtccaggcctatcaagccctccccaccatactttggcctcctcctggcctctgtggggcggctctcacattacctccagaaaggctgcaggctctcacccagggacacctatagtgacaggagtggaagcagctcccctgactctgaaatcaccgaactgaagtttccatcaataaatcatgactgatcttgtagcggatgattcttcaagagacccttcaaacttgggtagagtttacagctctgactttacactcggctttggagactttctttaaattatgtttttattaagattattttattatgcggaaaggtatttgggaaacttgtcacttgcatgtcccatcacgtgtactggctcctctgtggtgtctgcctgttgcgtgacactctccttgcagttcttgagttgcggcagaacatcgcgatgggaaccgatggtgggtggggctgcagatgtccccatcggtcaccttgtttctcaactacctcgcatcattgcagatcgtagcgcgttgcctgtcgctttcccttggatacctagaccgttataaagtgtgccacatggacttaccgagcatggagagaggattttagctaggatttgaacacttggtgctgggaacctcagggtattgcttgccactaagccatgaaaccagagacaaaatctctatactgccctgagttggggggaattctcagtgccaactgtggctggtcctcattcaaagggacggtcagtttggtgtcaacatgaaacaccaagatgtctgtctctgaagcgtgattttaaaatccccatgcctgtgcgtgcgcttcctatttctagggctgggaaacactccttgcatcaaggggtcacttacagaacaaagaatcttttgggggaaacttcctctaaaaccctctcatatatagacagctttgactggagggtccatttttcttccaggatggtgttactgcagttgaagggcaatatgaagttactttcttaatgtgacctagcaataggcatagctacgtggcactatattctggccagactcgatgtgtactctaacttaagaaataaatcagtaaggcag

SEQ ID NO: 460 - protein, 591 aa, Homo sapiens
MKYILVTGGVISGIGKGIIASSVGTILKSCGLHVTSIKIDPYINIDAGTFSPYEHGEVFVLDDGGEVDLDLGNYERFLDIRLTKDNNLTTGKIYQYVINKERKGDYLGKTVQVVPHITDAIQEWVMRQALIPVDEDGLEPQVCVIELGGTVGDIESMPFIEAFRQFQFKVKRENFCNIHVSLVPQPSSTGEQKTKPTQNSVRELRGLGLSPDLVVCRCSNPLDTSVKEKISMFCHVEPEQVICVHDVSSIYRVPLLLEEQGVVDYFLRRLDLPIERQPRKMLMKWKEMADRYDRLLETCSIALVAKYTEFSDSYASVIKALEHSALAINHKLEIKYIDSADLEPITSQEEPVRYHEAWQKLCSAHGVLVPGGFGVRGTEGKIQAIAWARNQKKPFLGVCLGMQLAVVEFSRNVLGWQDANSTEFDPTTSHPVVVDMPEHNPGQMGGTMRLGKRRTLFQTKNSVMRKLYGDADYLEERHRHRFEVNPVWKKCLEEQGLKFVGQDVEGERMEIVELEDHPFFVGVQYHPEFLSRPIKPSPPYFGLLLASVGRLSHYLQKGCRLSPRDTYSDRSGSSSPDSEITELKFPSINHD

SEQ ID NO: 461 - DNA, 478 bp, Homo sapiens
acccggcgctccattaaatagccgtagacggaacttcgcctttctctcggccttagcgccatttttttggaaacctctgcgccatgagagccaagtggaggaagaagcgaatgcgcaggctgaagcgcaaaagaagaaagatgaggcagaggtccaagtaaaccgctagcttgttgcaccgtggaggccacaggagcagaaacatggaatgccagacgctggggatgctggtacaagttgtgggactgcatgctactgtctagagcttgtctcaatggatctagaacttcatcgccctctgatcgccgatcacctctgagacccaccttgctcataaacaaaatgcccatgttggtcctctgccctggacctgtgacattctggactatttctgtgtttatttgtggccgagtgtaacaaccatataataaatcacctcttccgctgttttagctgaagaattaaatcaaaaaaaaaa

SEQ ID NO: 462 - protein, 25 aa, Homo sapiens [sequence omitted]

SEQ ID NO: 463 - DNA, 4237 bp, Homo sapiens
aagcttactggtgaggcaagtgtgcgtctatttccatggcgccctggctcgcggcagcccctggctgggcgaggggtgtgatgtgggagtggggtgggagggggcagcaggcggggcctgccacgtcacttggagagtgtgtgttgggaaggaagggcagagcggagagccgagccgctgcagctgcggcggcggcagcgaagccttgagccgtggggaggtgggtccccgcgctcgggcgccggggcagccccgggccctctgcgaggcctgcggcgcggctcctagggaggaggtggcggctgtggcggccggaaccgcgaccttggccggacccagccccgcggtggacgcagggcggaggccgagccccgccaggagtctttgccgagccggagggaggcgcatctggcgcttcggtaccagcggcagccgggggtccggagcggctggaggagcgcagtgggaactgggaagagctagcccggctggagggcggacctctgcgtccgggagccgggtctcaggcaccgctgggggcgaagccacgcgtcttttcgggcagccaatttcacacgcgcctgtgtgcggttccgggcatcccagtaagctctagcacccgggcgcgggtaacgggaagcgcagaaccaaatccccagcgcccaggtcacctccccagacccagccttgcagggaccagggctttagggctcacggacccaacggccaggtcagaccgcgaaccgggaggagcgcgggccccaccctaaagagggcgcagccgggagctggggagcgggtgccgcgctccagagattgtgtcgtgggcgccgtcctagtggcggggagcgcacctccgagggggcatgagatcggagaaatcccttacgctggcggcgccgggggaggtccgtgggccggagggagagcaacaggatgcgggagacttcccggaggccggcgggggcgggggctgctgtagtagcgagcggctggtgatcaatatctccgggctgcgctttgagacacaattgcgcaccctgtcgctgtttccggacacgctgctcggagaccctggccggcgagtccgcttcttcgaccccctgaggaacgagtacttcttcgaccgcaaccggcccagcttcgacgccatcctctactactaccagtctgggggccgcctgcggaggccggtcaacgtgcccctggacattttcctggaggagatccgcttctaccagctgggggacgaggccctggcggccttccgggaggacgagggctgcctgcccgaaggtggcgaggacgagaagccgctgccctcccagcccttccagcgccaggtgtggctgctctttgagtacccagagagctctgggccggccaggggcatcgccatcgtctccgtgttggtcattctcatctccatagtcatcttttgcctggagaccttaccccagttccgtgtagatggtcgaggtggaaacaatggtggtgtgagtcgagtctccccagtttccagggggagtcaggaggaagaggaggatgaagacgattcctacacatttcatcatggcatcacccctggggaaatggggaccgggggctcctcctcactcagtactcttgggggctccttctttacagaccccttctttctggtggagacgctgtgcattgtctggttcacttttgagctcctggtgcgcttctccgcctgccctagcaagccggccttcttccggaacatcatgaacatcattgacttggtggctatcttcccctacttcatcaccctgggcactgagctggtgcagcagcaggagcagcaaccagccagtggaggaggcggccagaatgggcagcaggccatgtccctggccatcctccgagtcatccgcctggtccgggtgttccgcatcttcaagctctcccgccactccaaggggctgcagatcctgggcaagaccttgcaggcctccatgagggagctggggctgctcatcttcttcctcttcatcggggtcatcctcttctccagtgccgtctacttcgcagaggctgacgatgacgattcgctttttcccagcatcccggatgccttctggtgggcagtggttacaatgaccacggtaggttacggggacatgtaccccatgactgtggggggaaagatcgtgggctcgctgtgtgccatcgctggggtcctcaccattgccctgcctgtgcccgtcatcgtctccaacttcaactacttctaccaccgggagacggagcaggaggagcaaggccagtatacccacgtcacttgtgggcagcctgcgccggacctgagggcaactgacaacggacttggcaagcctgacttccccgaggctaaccgggaacggagacccagctaccttcctacaccacatcgggcctatgcagagaaaagaatgctcacggaggtctgacccatgcaggcagggcctgcaggaggggagcactgagctaacagtctcttaggcttccttctcatttccactactcactctagcttcagttgacttcttgactctctcccctacacccactacctggcatccaggaccaaatacctggactatcaaccttgttgcttaatccctgcagcattcaaggttaatccatctaagtgacatttttgaaattccagcggtgccacccaatcatgcccagcttctgtcatatgaatgagatatacatttatatgacagaagctgggcatgattgggtggcaccgctggaatttcaaaaatgtcaaggaacagcaatgtcaacaggatggaaaccagccctatctgagtcttcgctccctccttagtgttctttgctttgggtcatgtgcgtttcctagcttcaggctacttggtaactggaagaagctggaggacagaagcagtactcaacttgctgttattccagtgccctgtaacaatcactggtcctcctgcagatgacccttggtagagtctttatttgcatagcctcaaaataggttattcgtttctaaacttggatggaattagagaatacaatcaaactttaccacttggaggacacggggttagtccaggaccaaagaggccaatggatttttcaaagtgtgccccagcacaagaggcactggtgttcggtctacatttagttctccccactctgatcccctgactctccagcttccaggaaggttccttctcagagccaaatactctttgtgcaagtgccttcctgagcagaagaactggagaaagggaaccacagagccaggaggaatgtctgagcagagtcaagcaactggcttgaccacagtctgaagcaaggtgccacttaaacagatactgttttctcaaaggggcagaggaatcgtgttgcagatggcagccttttctccttcattttccccacattttctctggccctctaccttgcttcctgggagtttgatttaggattgctgttgaaggcttcctcaggcaaactccagcttaaagccctagacaggtaaaagcacacattggatggcagcatgggtttcttcccattttatgggcatgaaatatgtggtttagaataaggaacaagcattattcctttgccaacagcctcactctaagaggcttttttgctgagtcaagcaaacacttgcctgctctgccccttggagctgcatttgacctgctctcactggtaaggtgacttggtggcgttcccacttgatttagccattttcttccattgtgagaccactgccatctatccacctgcccacctccccttttgtttctcagtaacattgccatttgttttttgcctttgataaactgtgatgtactgttctgagatcttttgggtgcagttctgaaactgaaaggactgttaacatgtttttaattttatatctatgctttcagactctttgatgataattttttttttaaaaattattctctcgaagagcaacttacgagaggacagccttatgagggtttgcttgagaggcagtgtggcttctgtgactgccagctctaaatctcgatcttgccataactttacagggtaacttgggtccacagtcactctttgtgcctcagtttacccacccattaaatgggaacattactgtcttcccctccctacctcatggggaatgtctgggaagctggggacattgctatgcaaatgtgtgaatcttagtcatggatttgatttttag

SEQ ID NO: 464 - protein, 529 aa, Homo sapiens
MRSEKSLTLAAPGEVRGPEGEQQDAGDFPEAGGGGGCCSSERLVINISGLRFETQLRTLSLFPDTLLGDPGRRVRFFDPLRNEYFFDRNRPSFDAILYYYQSGGRLRRPVNVPLDIFLEEIRFYQLGDEALAAFREDEGCLPEGGEDEKPLPSQPFQRQVWLLFEYPESSGPARGIAIVSVLVILISIVIFCLETLPQFRVDGRGGNNGGVSRVSPVSRGSQEEEEDEDDSYTFHHGITPGEMGTGGSSSLSTLGGSFFTDPFFLVETLCIVWFTFELLVRFSACPSKPAFFRNIMNIIDLVAIFPYFITLGTELVQQQEQQPASGGGGQNGQQAMSLAILRVIRLVRVFRIFKLSRHSKGLQILGKTLQASMRELGLLIFFLFIGVILFSSAVYFAEADDDDSLFPSIPDAFWWAVVTMTTVGYGDMYPMTVGGKIVGSLCAIAGVLTIALPVPVIVSNFNYFYHRETEQEEQGQYTHVTCGQPAPDLRATDNGLGKPDFPEANRERRPSYLPTPHRAYAEKRMLTEV

SEQ ID NO: 465 - DNA, 482 bp, Homo sapiens
ttccttttcctccctgtcgccaccgaggtcgcacgcgtgagacttctccgccgcctccgccgcagacgccgccgcgatgcgctacgtcgcctcctacctgctggctgccctagggggcaactcctcccccagcgccaaggacatcaagaagatcttggacagcgtgggtatcgaggcggacgacgaccggctcaacaaggttatcagtgagctgaatggaaaaaacattgaagacgtcattgcccagggtattggcaagcttgccagtgtacctgctggtggggctgtagccgtctctgctgccccaggctctgcagcccctgctgctggttctgcccctgctgcagcagaggagaagaaagatgagaagaaggaggagtctgaagagtcagatgatgacatgggatttggcctttttgattaaattcctgctcccctgcaaataaagcctttttacacatctcaaaaaaaaaaaaaaaaaa

SEQ ID NO: 466 - protein, 115 aa, Homo sapiens
MRYVASYLLAALGGNSSPSAKDIKKILDSVGIEADDDRLNKVISELNGKNIEDVIAQGIGKLASVPAGGAVAVSAAPGSAAPAAGSAPAAAEEKKDEKKEESEESDDDMGFGLFD

SEQ ID NO: 467 - DNA, 3816 bp, Homo sapiens
gcagcgccggggccctcagatcgaggctgcctccccctctcagccggcagcacattccgtcgccttgccgccgcccggccccacagttgtctttgccggagctgcagtcgcgctggggttagggcgggggggcgggcggggagaggagaaggccgcggcggaggcaggtgagaggaggaaggaagcggcggcgcggcgggcacagcagctcaggcggcggcccggttcctgggagtgtcggtgcggcgcgttggttggggcggatcccgcggggcccgggcgggggaaggagtcaccggcccggccatggcggacaacgagaaactggacaaccaacggctcaagaatttcaagaacaaaggccgcgacttggagactatgagaagacaacgaaatgaagttgtagttgaattaaggaagaataaaagagatgaacatctcttaaagagaaggaatgtaccacatgaagatatctgtgaagactctgatatagatggtgattatagagtgcaaaatacctctctagaagctattgttcaaaatgcttcaagtgataaccaaggaattcaattaagtgcagttcaagctgctaggaagcttttgtccagtgatcgaaatccaccaattgatgacttaataaaatctggaatattgcccattttagtccattgtcttgaaagagatgacaatccttctttacagtttgaagctgcatgggctttgacaaacattgcatctggaacttctgaacaaactcaagcagtagttcagtccaatgctgtgccacttttcctgaggcttctccattcaccccatcagaatgtctgtgagcaagcagtgtgggcattgggaaatatcataggtgatgggccccagtgtagagattatgtcataagtcttggagttgtgaaacctttactttccttcataagtccatctattcctataacattcttaagaaatgttacttgggttatggtcaacttatgtcgccacaaagacccaccaccaccaatggaaaccattcaggagattcttccagccctttgtgttttaattcatcacacagatgtaaatatactggtagacacagtctgggccctctcttaccttactgatgctggcaatgaacaaatacagatggtaatagactctggaatagttcctcatttggttcctctgctcagccaccaggaagttaaagttcagactgctgcacttagagctgtgggcaacattgttactggaactgatgagcaaacacaagtagttttgaactgtgatgctctttcacacttcccagcactcctgacacatcccaaagagaaaattaataaagaagcagtgtggttcctctccaacatcactgcaggaaatcagcagcaggtacaggcagtaattgatgccaatcttgtaccaatgataatacaccttttggataagggggattttggcactcaaaaagaagctgcttgggccataagtaacttaacaattagtggaaggaaagatcaagtggcttaccttatccaacaaaatgttatcccacctttttgcaacttgctgactgtaaaagatgcacaagttgtgcaagtagtactcgatggactaagtaatatattaaaaatggctgaagatgaggcagaaaccataggcaatcttatagaagaatgtggagggctggagaaaattgaacaacttcaaaatcatgaaaatgaagacatctacaaattggcctatgagatcattgatcagttcttctcttcagatgatattgatgaagaccctagccttgttccagaggcaattcaaggcggaacatttggtttcaattcatctgccaatgtaccaacagaagggttccagttttagaaagatgttgtggaagttaggtacaatgcagcactgagatatatatatatatatgtgtgtgtgtatatatatatatatatacatatatataaaaaggtttgatccatcaagcttggctcatgggatctgctgctgcattaaatcgggaaagaaaatgtgaagatttcatttggaatcacagaaaatgcccaaatgaggtcaagatggcgagtgggtgcgagtgagaatgagtggcaaaatgtaatgaaaactttacatgaatgcttatttaggttgttcaaagtaaaaagggctacaggtcacagatcgtcagtgcctgagaaagaacattgacttactctatatcaattgaggggaaagtgcagtaccgtcatcttcaagccttgtaagcataaaagagaataggctgcccatataagtcaaaggaaaatgagcccaggccttgctatgaagcagtgtgtgaatggacaatgttgaatgaatgtctggctcagtgatggagagccaggttcatctttgaaatctagggctcttcactcatgaagcagactcctagtcctggagtgactgtgtacgagagcgtggttgtggtgctgtatgtgaacgcatgcaagcttgattcaccttcagggggctgataacctagtaaatcatcaaaatgagatcataagtgttaatgtacactggacatgaaaacaaagactggtttagcagcagacattggtttactctgcagcctgtgttttctgtttccccctttcccacctccttccccccacccaatccttttttttttcttttttgcttttcttttctttttttttagtttttatttactttacctagtatgcctttttttagttgcttctcaagtcagaaaacttttcaggaaggtttccctgtgcatttgcaccagatgaatgtttgatgctatgaaaagctttccatatcatcaaaactaatttgtgtagatttttgcatgaaaaaaatcataaatttccctcaaaatagactgtgttgcagtacacaagttgccataatagtataaaacagtaaaatgtgcttaaaaggccatccttttcattttcagagataacataaagatctttgcatgaggtaaatctacagcatagttcatttttagattttgttgagtcctgtaaagaagaagaagaaaaaagtttcagttgtggtagaataccgtgctgtgtttaaatgttacttgttttcaaactttgttttctatgaaaatgatatggaaacttctaaaatggaatttggtgcatatgtactgctgaataaagaccgatgaagaggtttgagtagatgtacaaatcaagtaatggtttgaacacctttaataatatgcctaatctgttcaattgttttagaatctttttatcttagatgtaggcagccatgaacaatctattttgagccactttagggagaaaactttgtatttttaaaacttgcataaaagttatgcaagtggtttttataaattggaataatacctcagttttgaggttatgcacactaaattaaatgtgacataaattaatttgtacaaaaagaactctttataaggtggctcattgtaggaaatcctgtgccttcccctttgagcacaagtgttgcatgaacaacagtttgctataagaaacataccagattagccaccattagcatctatatctactttgtgtttaaaaatcaactggtaattctgaaacactgtagaatggataaaaattattttgtgatcataactctttgttgaactagagtatttttgcagcattccttgtcatcagaaacatggttaaagtttaaaactagaagcagcagaaaactagcttgtaaaatttatccaagtagagtgcaggctaggctgtcttggggaaataaacattaaaacttaaagcaaaaaaaaaaaaaaaa

SEQ ID NO: 468 - protein, 521 aa, Homo sapiens
MADNEKLDNQRLKNFKNKGRDLETMRRQRNEVVVELRKNKRDEHLLKRRNVPHEDICEDSDIDGDYRVQNTSLEAIVQNASSDNQGIQLSAVQAARKLLSSDRNPPIDDLIKSGILPILVHCLERDDNPSLQFEAAWALTNIASGTSEQTQAVVQSNAVPLFLRLLHSPHQNVCEQAVWALGNIIGDGPQCRDYVISLGVVKPLLSFISPSIPITFLRNVTWVMVNLCRHKDPPPPMETIQEILPALCVLIHHTDVNILVDTVWALSYLTDAGNEQIQMVIDSGIVPHLVPLLSHQEVKVQTAALRAVGNIVTGTDEQTQVVLNCDALSHFPALLTHPKEKINKEAVWFLSNITAGNQQQVQAVIDANLVPMIIHLLDKGDFGTQKEAAWAISNLTISGRKDQVAYLIQQNVIPPFCNLLTVKDAQVVQVVLDGLSNILKMAEDEAETIGNLIEECGGLEKIEQLQNHENEDIYKLAYEIIDQFFSSDDIDEDPSLVPEAIQGGTFGFNSSANVPTEGFQF

SEQ ID NO: 469 - DNA, 1740 bp, Homo sapiens
atgtaatgaaaactttacatgaatgcttatttaggttgttcaaagtaaaaagggctacaggtcacagatcgtcagtgcctgagaaagaacattgacttactctatatcaattgaggggaaagtgcagtaccgtcatcttcaagccttgtaagcataaaagagaataggctgcccatataagtcaaaggaaaatgagcccaggccttgctatgaagcagtgtgtgaatggacaatgttgaatgaatgtctggctcagtgatggagagccaggttcatctttgaaatctagggctcttcactcatgaagcagactcctagtcctggagtgactgtgtacgagagcgtggttgtggtgctgtatgtgaacgcatgcaagcttgattcaccttcagggggctgataacctagtaaatcatcaaaatgagatcataagtgttaatgtacacttgacatgaaaacaaagactggtttagcagcagacattggtttactctgcagcctgtgttttctgtttccccctttcccacctccttccccccacccaatccttttttttttcttttttgcttttcttttctttttttttagtttttatttactttacctagtatgcctttttttagttgcttctcaagtcagaaaacttttcaggaaggtttccctgtgcatttgcaccagatgaatgtttgatgctatgaaaagctttccatatcatcaaaactaatttgtgtagatttttgcatgaaaaaaatcataaatttccctcaaaatagactgtgttgcagtacacaagttgccataatagtataaaacagtaaaatgtgcttaaaaggccatccttttcattttcagagataacataaagatctttgcatgaggtaaatctacagcatagttcatttttagattttgttgagtcctgtaaagaagaagaagaaaaaagtttcagttgtggtagaataccgtgctgtgtttaaatgttacttgttttcaaactttgttttctatgaaaatgatatggaaacttctaaaatggaatttggtgcatatgtactgctgaataaagaccgatgaagaggtttgagtagatgtacaaatcaagtaatggtttgaacacctttaataatatgcctaatctgttcaattgttttagaatctttttatcttagatgtaggcagccatgaacaatctattttgagccactttagggagaaaactttgtatttttaaaacttgcataaaagttatgcaagtggtttttataaattggaataatacctcagttttgaggttatgcacactaaattaaatgtgacataaattaatttgtacaaaaagaactctttataaggtggctcattgtaggaaatcctgtgccttcccctttgagcacaagtgttgcatgaacaacagtttgctataagaaacataccagattagccaccattagcatctatatctactttgtgtttaaaaatcaactggtaattctgaaacactgtagaatggataaaaattattttgtgatcataactctttgttgaactagagtatttttgcagcattccttgtcatcagaaacatggttaaagtttaaaactagaagcagcagaaaactagcttgtaaaatttatccaagtagagtgcaggctaggctgtcttggggaaataaacattaaaacttaaagcaatgttttaaaaaaaaaaagaaaaaaaaaaaaaaaaaaaaaaaaaaaaaa

SEQ ID NO: 470 - protein, 32 aa, Homo sapiens
MKQTPSPGVTVYESVVVVLYVNACKLDSPSGG

SEQ ID NO: 471 - DNA, 10174 bp, Homo sapiens
gactggggttttaaggggtgtggcaggaggttttggactcgatgagtttccaccgaaatgtcggagaagtcaggccagagcacaaaagcaaaggatgggaaaaagtatgcaacactcagtttatttaatacttacaaggggaaatcattagaaacacagaaaaccacagctcgacatggattacagagtcttggaaaagtcggtatttcacggcgtatgcctccacctgctaacctcccaagtcttaaagcagaaaacaaaggcaatgatcctaatgtaaacattgtacctaaagatggcacagggtgggcatcaaaacaagagcaacatgaagaagaaaaaacaccagaagtgccaccagcacagccaaaacctggggttgcagctcccccagaagtagcacctgctcccaaatcatgggccagtaacaagcaaggtgggcaaggagatggaatccaagtgaatagtcagtttcagcaagaatttcccagcctgcaggcagctggggatcaggaaaaaaaagaaaaggaaacaaatgatgacaactatggacctggacccagtttacgtccaccaaatgttgcttgttggagagatggtggtaaggctgctggctcaccttcgtcatctgatcaagatgaaaagctccctggccaggatgaaagcacagctggaacatcagagcaaaatgatatcctcaaagtggtggaaaagaggatagcttgtggtcctccacaggctaaactgaatggacagcaggctgctctcgcttcccagtatagagctatgatgcctccttatatgttccaacagtatccgaggatgacatatcctcctctacatggtcccatgagattcccaccttctttatctgaaacaaacaaaggccttcgaggaagaggcccacctccttcatgggcctctgagcctgaacgcccatccattcttagtgcatcagaactgaaggagcttgataaatttgataacctagatgctgaagctgatgaaggttgggcaggtgctcagatggaagtagattatacagagcaactgaatttcagtgatgatgatgaacaaggaagtaacagtcctaaagagaataacagtgaggatcaaggttcaaaagcctctgaaaacaacgaaaacaaaaaagaaacagatgaagtttccaacactaaatcatcttcccaaatacctgcccaaccatcagtagcaaaagttccctatgggaaaggaccttcatttaatcaggaacgtggaacatcttcacatctgccaccacctccaaagttgcttgcacagcagcatccacctccagatcgacaggcagtacctggaagaccaggcccctttccctccaagcagcaagtagctgatgaagatgaaatatggaagcaaagacgaagacaacaatcagaaatttctgcagcagtagaacgtgctcgtaaacggcgtgaagaggaagagcgaagaatggaagaacaaaggaaggcagcttgtgcggagaaactgaaacgattggatgagaagcttggcatcctggaaaaacaaccatctccagaggaaattagggaaagggagcgagaaaaagaacgggagcgtgagaaagaacttgaaaaagaacaagaacaggagcgagagaaggagagggaaaaagacagagagagacagcaggaaaaggagaaagagctggagaaggagcaggaaaaacaaagagaaatggagaaagaaagaaagcaagaaaaagaaaaagaactagaacggcagaaagaaaaggaaaaagaactacaaaagatgaaagaacaagaaaaggaatgtgagctggagaaggaaagggaaaaattagaggagaaaattgaacccagagaacctaatttagagcccatggtagaaaaacaagaaagtgaaaacagctgtaataaagaggaggaacccgttttcactagacaagacagcaatcgcagtgaaaaggaagccacaccagtggtgcatgaaacagaaccagaatcagggtctcaacctcggccggctgtattatctggctatttcaaacagtttcagaagtctttacctccacgattccagcggcagcaggaacagatgaaacagcagcagtggcagcagcagcaacagcaaggtgtacttccacagactgttccttcacaaccgtccagtagtactgtccctcctccaccacacagacctctttatcagcctatgcagcctcatcctcagcatttggcttctatgggttttgatccaaggtggctcatgatgcagtcctacatggatcctcgaatgatgtcaggaagacctgctatggatattccacccattcatcctggaatgattcctcctaaaccattaatgagaagagaccagatggaagggtcaccgaacagttctgagtcatttgagcatatagctcgatctgcaagagatcacgcaatttccctttctgagcctcgtatgctgtgggggtcagatccctatcctcatgctgagcctcaacaagcaactactcccaaagcaacagaagagcctgaggatgtaaggtctgaagctgcgttggaccaggaacagattactgctgcttattctgtagaacataatcaattagaggctcacccaaaggcagactttatcagagaatcaagtgaggcacaagtacaaaagtttttaagcagatctgtggaagatgttagacctcaccatactgatgcaaataatcagtctgcttgttttgaagcacctgatcaaaagaccttatccgctcctcaagaggagcggatttcagctgtagaaagtcagccttcccggaaaagaagtgtttcccatggatctaaccatacgcaaaaaccagacgagcagagaagtgaaccatctgcaggcattcctaaagtaaccagcagatgcattgattcaaaagaaccaatagaaaggccagaggagaaaccaaaaaaggaaggctttatacgatcttctgaaggaccaaaacctgaaaaagtatataaatctaaatcagaaactcgttggggcccacgaccaagctctaacagaagggaagaagttaatgatagacctgtgagaagatcaggtcccattaaaaaacctgtacttagagatatgaaagaggaacgggaacagaggaaggagaaagaaggagaaaaggccgaaaaggtcactgaaaaagtagttgtaaagcctgaaaagacggaaaagaaggatcttcctcctcccccaccaccacctcagccaccagcaccaattcagccacagtcagttccaccaccaattcaaccagaagcagagaaatttccttcaacagaaactgcaactttggctcaaaaaccatctcaggatactgagaagcctctggaacctgtgagtactgttcaggtagagcctgcagttaagactgtaaaccaacagactatggcagcaccagtagtcaaagaagaaaaacaacctgagaaagtcatcagcaaagaccttgttatagagaggcctcgaccagattcaagaccagcagttaaaaaagaatcaactttgcctcccaggacctattggaaagaagctagagagagagattggtttccagatcaaggatacagaggtcgaggccgaggtgaatattactccagaggtcgaagctatagaggttcttatggagggcgtggcaggggtggtaggggacacactcgagattatcctcagtatagagacaataagccaagagcagagcatataccctcagggcctctcagacagcgagaagaaagtgaaacacggagtgagagctctgattttgaagttgtccccaaaagaagacgacagcggggttcagagactgacacagacagtgaaattcatgaaagtgcaagtgacaaggacagtttaagtaaaggcaaacttcccaaaagagaggaacggcctgaaaacaaaaaacctgtaaagcctcattcttctttcaagcctgataatcatgttcgaatagataatagactgctagaaaagccttatgtaagggatgacgataaagctaaaccaggctttcttcctaaaggagagcctacaaggagaggcagagggggaacattcaggcgtggtggaagggatcctggaggccgtccatcacgcccttccactttacgaagaccagcttatcgggacaatcagtggaacccaaggcagtcagaagttcctaaaccagaagatggagagccgccaagaagacatgagcagtttattcctatagcagcagataaacgacctccaaaatttgagcgaaaatttgacccagctagagaaaggcctcgaaggcagcgtcctactcgaccaccaaggcaagacaagccacctcgatttagacggctaagagagagggaggctgcttcaaaatcaaatgaggtggtagcagtgcccacaaatggcacagttaataatgtggctcaagaaccagttaatactcttggggatatttccgggaataagacaccagatttatctaatcagaactcttcagatcaggcaaatgaagaatgggaaacagcttctgaaagcagtgatttcaatgagaggcgagagagggatgaaaaaaaaaatgctgacttgaatgcacaaacagttgtaaaggttggagagaatgttctacctccaaagagggaaattgcaaagagaagtttttctagtcagagaccagtagatcgtcagaatcgacgtggcaacaatggtccacccaaatcaggaaggaatttctcaggtcctagaaatgaaaggagaagtggcccaccatcaaaaagtgggaagagagggccatttgatgaccagcctgcaggcacaactggggttgacctcatcaatggcagctctgcacaccatcaggaaggagtacctaatggtacaggacaaaagaactccaaagattctactgggaaaaaaagagaagaccccaaaccaggccctaaaaaaccaaaagagaaagtggatgctctatcacagtttgatctcaacaattatgcaagtgttgttataattgatgatcatcctgaagtaacagtaattgaagatccccagtcaaatttgaatgatgatggttttactgaagtggtatccaaaaaacaacaaaaacgtttacaggatgaagaacgccgaaagaaggaagaacaagtcatacaggtctggaacaaaaagaatgcaaatgaaaaaggaagaagccagacttctaagcttcctccaagatttgccaaaaaacaggctacagggatccagcaagcacagtcttcagcctcagttccacctctagcttcggctccacttccaccttcaacctcagcttcagttccagcctcaacctcagctccacttccggcaaccttaactccagttccagcctcaacctcagctccggttccagcctcaactttagctccagttctggcctcaacctcagctccagttccagcctcacccttagctccagtttcagcctcagcctcagtctcagcttcagttccagcctctacttcagctgcagctataacctcttcttcagctccagcctcagccccagctccaacccccatccttgcctcagtttcaaccccagcttctgtcaccattcttgcctcagcctcaattcccattcttgcttcagccctagcatcaacttcagctccaacgccagccccagcagcctcttccccagctgccccagtcatcacagcaccaactatcccagcctcagccccaactgcctcagtcccacttgcccctgcctcagcttcagccccagccccagcccctaccccagtctcagccccaaatcctgccccacctgccccagcccagactcaggcacagacccacaaaccagtccagaatccactacagactacatctcagtcttcaaaacaaccaccaccatcaattaggctgccttcagctcaaacacctaatggcacagattatgtagcctcaggaaaatccatccagaccccacagtcacatggcactctgacagctgaattatgggataacaaggtggccccaccagctgtgctgaatgatatctctaagaaattaggtcccattagtccaccacagccaccttcagtcagtgcatggaataagcccttaacatcgtttggatcagctccttcatcagagggagcgaagaatggtcaagaaagtggactcgaaattggaactgacacaattcagtttggtgctccagcctcaaatggaaatgaaaatgaagttgttcctgtgctttcggaaaaatctgctgacaaaatacctgaacctaaagaacagcggcagaagcagccacgagcaggacctatcaaagcccagaagcttccagatttgagtccagtagaaaacaaagaacacaaacctggtcccattggaaaggaacgttcattaaaaaatagaaaagtaaaagatgcccaacaggtggagccagaaggacaagagaaaccaagcccagctacagtcagaagcacagatcctgtcacgacaaaggagactaaagcagtctcagaaatgtctactgaaataggaacaatgatctcggtatcatctgcagaatatggtactaatgcaaaggagtctgtaacagactatactacaccctcttcttctttgcctaacaccgtggctactaataatacaaagatggaggatactttggttaataatgtgcccctgcccaacacccttcccctccctaagagggagactatacaacagagctccagcctaacttcagttcctcccactactttcagcctcaccttcaagatggagtctgcacgcaaagcatgggagaattctccaaatgtaagggaaaaggggtctccagtaacttccacagcacctccaattgcaactggagtcagcagtagtgccagtggaccaagcactgctaattacaattcgttctcaagtgcatccatgccccagattcctgttgcttcagtcactcctacagcatcactatcaggagctggtacatacactacctcttctttgagcacaaaatctacaaccacatcggaccctccaaatatttgtaaagtgaaacctcagcagttacagacaagcagcctgccttctgcaagtcatttttcacagttaagctgtatgccttcccttattgcccagcagcaacagaatccgcaagtttatgtgtctcagtctgcagcagctcaaatcccagccttctatatggacacaagtcatttattcaatacccaacatgcacgattggctccgccatccttggctcaacaacagggtttccaaccaggtctctctcagccaacttcagttcagcagattccaatccctatttatgcaccactgcaagggcagcatcaagcccaactgagtttgggggctggccctgctgtttcccaggctcaggaattgttcagctcctcacttcaaccatatagatctcagccagcttttatgcaaagcagtttatcccagccatctgtggtcctttctggtactgctattcacaactttccaactgtccaacaccaagaacttgccaaggcacaatccggtcttgcctttcagcaaacatcaaatactcagcccattcctatattgtatgaacatcaactggggcaggcatcaggactaggaggttcccagctgattgacacacatcttctccaggccagagcaaatcttacccaggcctcaaatctttattctggacaagtacaacagcctggtcagacaaatttttataacactgcccagtcaccaagtgctctccagcaggttacagtacctttaccagcatcgcagctttccttgcctaattttggatctacagggcaacctctaattgctttgcctcagactcttcagcccccattacagcataccactccccaagcacaggctcagagtctgagtcgtcctgcacaagtaagccagcctttcagaggattaattcctgctggaacacagcatagcatgattgcaaccacaggaaaaatgtctgaaatggaactaaaagcctttggaagtggcattgatataaaaccaggcacacctccaatcgctggtagaagcaccacaccaacatctagtccttccgggctacttctacaagtccgaacagccagtccagcaaaatgaacagcattgtctaccagaagcagttccagtcagcccctgccactgtgagaatgacacaaccatttcctacacagtttgcaccccaggcaaagcagagagcagaggttcttcagtccacgcaacggttcttctctgaacagcaacagagcaaacagataggaggaggcaaagcccagaaagtggacagtgattcaagtaaacctcctgaaacactgaccgaccctcctggggtctgtcaggaaaaagtagaagaaaagccaccccctgcaccctccatagccaccaaacctgttagaactggaccaatcaaacctcaggcgatcaaaaccgaagaaacaaaatcttaaaggctatggtttattgcaggggattgggaggggggcgggaaaacatggagaattaagtcagataatgctggcagccaaaggggcaaaatggcctgtgacattatcctgttcagagcttggagatgtacaagggacataggagcaatttacactgacacacagctgctgtaccagtgaaaacgaggctttgcaagcttgtacctactatataacatgtgcttggttgatggccatgcatcttcagtcagaatttatatataaatgtatgcacccatttttttgagtgcatataatttagacctaaaaatccttatgattagatgaaacaccaaaaatataaggaaaataacacagcagaggaatagctcagcctgaacagtgtgatggtcccagctactacatcagatgcggtttttttgctcccttatgttcttcggatatggttatggcatttgtaggcttggaggtaaagaactgaagataactggtgctggatagaggagccttattttttattatggcagcttgctatttttataacatggtgattgagttgaacacaatcaaagtacagtagtaactgatgtccccttcttcctggatgaatgagcagataaatattgatgtcagcatccttgaaccatatcaaagtgagcagtgtttggctactgcttctatttgaaatggtgctgtgttttggttgtggtctgaagctttgaagcgctacttagcatctcctttcttccatggagctctcacgattcaaacatgacagatttggtaaaatgctggttaggttgagtcttccttgcccccactcagtcatctttgtatgaatcccatgatttgggggtttttttctttttttttttataccagtttttagctggtgtttatgaagaacagtgagtacctagaactgtgccactaattaaaggaaatcctaagaaggtgcatttctttacagagctgtgtcatgccatcctttgggccctctgctggaaaagtagaatcaagtctcaaataatgcctttttaattgtatcctctagtattatagatataggacagtactgtatcatacctctgtgaatgtaaaatatcttgtacctgctttatgatacgtagtagtgaccgtgctttatcagagctgtttttaatgatgttattctagaatgttttctttccagatgatgattcagaagctaattttaaaaaacggtgccaggtaccacaacagtaacagaactttgcaattttctggggttttgttttttacctttttccccccttttttttaaatggagtgtgctggatgtctctataattttattcagatgactgcagaacctggaaaagctgttgctgctattgatgcataacatactgctattggtctttttatataaatatatatatatatatacatatatatatataatttgaatttttggaaactttagctgtgctgtcaactttggaaaaagtatcccggtttactgtgttgagttggcattgtacagaaattaacagccatattggtctagaaacgttaaacttaatttttttccatttgtacaggggtaacgcactgtattaaatatgtaaggtcttatctacatgggtttgattacagaaactaataaagtattctctaaataatga

SEQ ID NO: 472 - protein, 2701 aa, Homo sapiens
MSEKSGQSTKAKDGKKYATLSLFNTYKGKSLETQKTTARHGLQSLGKVGISRRMPPPANLPSLKAENKGNDPNVNIVPKDGTGWASKQEQHEEEKTPEVPPAQPKPGVAAPPEVAPAPKSWASNKQGGQGDGIQVNSQFQQEFPSLQAAGDQEKKEKETNDDNYGPGPSLRPPNVACWRDGGKAAGSPSSSDQDEKLPGQDESTAGTSEQNDILKVVEKRIACGPPQAKLNGQQAALASQYRAMMPPYMFQQYPRMTYPPLHGPMRFPPSLSETNKGLRGRGPPPSWASEPERPSILSASELKELDKFDNLDAEADEGWAGAQMEVDYTEQLNFSDDDEQGSNSPKENNSEDQGSKASENNENKKETDEVSNTKSSSQIPAQPSVAKVPYGKGPSFNQERGTSSHLPPPPKLLAQQHPPPDRQAVPGRPGPFPSKQQVADEDEIWKQRRRQQSEISAAVERARKRREEEERRMEEQRKAACAEKLKRLDEKLGILEKQPSPEEIREREREKEREREKELEKEQEQEREKEREKDRERQQEKEKELEKEQEKQREMEKERKQEKEKELERQKEKEKELQKMKEQEKECELEKEREKLEEKIEPREPNLEPMVEKQESENSCNKEEEPVFTRQDSNRSEKEATPVVHETEPESGSQPRPAVLSGYFKQFQKSLPPRFQRQQEQMKQQQWQQQQQQGVLPQTVPSQPSSSTVPPPPHRPLYQPMQPHPQHLASMGFDPRWLMMQSYMDPRMMSGRPAMDIPPIHPGMIPPKPLMRRDQMEGSPNSSESFEHIARSARDHAISLSEPRMLWGSDPYPHAEPQQATTPKATEEPEDVRSEAALDQEQITAAYSVEHNQLEAHPKADFIRESSEAQVQKFLSRSVEDVRPHHTDANNQSACFEAPDQKTLSAPQEERISAVESQPSRKRSVSHGSNHTQKPDEQRSEPSAGIPKVTSRCIDSKEPIERPEEKPKKEGFIRSSEGPKPEKVYKSKSETRWGPRPSSNRREEVNDRPVRRSGPIKKPVLRDMKEEREQRKEKEGEKAEKVTEKVVVKPEKTEKKDLPPPPPPPQPPAPIQPQSVPPPIQPEAEKFPSTETATLAQKPSQDTEKPLEPVSTVQVEPAVKTVNQQTMAAPVVKEEKQPEKVISKDLVIERPRPDSRPAVKKESTLPPRTYWKEARERDWFPDQGYRGRGRGEYYSRGRSYRGSYGGRGRGGRGHTRDYPQYRDNKPRAEHIPSGPLRQREESETRSESSDFEVVPKRRRQRGSETDTDSEIHESASDKDSLSKGKLPKREERPENKKPVKPHSSFKPDNHVRIDNRLLEKPYVRDDDKAKPGFLPKGEPTRRGRGGTFRRGGRDPGGRPSRPSTLRRPAYRDNQWNPRQSEVPKPEDGEPPRRHEQFIPIAADKRPPKFERKFDPARERPRRQRPTRPPRQDKPPRFRRLREREAASKSNEVVAVPTNGTVNNVAQEPVNTLGDISGNKTPDLSNQNSSDQANEEWETASESSDFNERRERDEKKNADLNAQTVVKVGENVLPPKREIAKRSFSSQRPVDRQNRRGNNGPPKSGRNFSGPRNERRSGPPSKSGKRGPFDDQPAGTTGVDLINGSSAHHQEGVPNGTGQKNSKDSTGKKREDPKPGPKKPKEKVDALSQFDLNNYASVVIIDDHPEVTVIEDPQSNLNDDGFTEVVSKKQQKRLQDEERRKKEEQVIQVWNKKNANEKGRSQTSKLPPRFAKKQATGIQQAQSSASVPPLASAPLPPSTSASVPASTSAPLPATLTPVPASTSAPVPASTLAPVLASTSAPVPASPLAPVSASASVSASVPASTSAAAITSSSAPASAPAPTPILASVSTPASVTILASASIPILASALASTSAPTPAPAASSPAAPVITAPTIPASAPTASVPLAPASASAPAPAPTPVSAPNPAPPAPAQTQAQTHKPVQNPLQTTSQSSKQPPPSIRLPSAQTPNGTDYVASGKSIQTPQSHGTLTAELWDNKVAPPAVLNDISKKLGPISPPQPPSVSAWNKPLTSFGSAPSSEGAKNGQESGLEIGTDTIQFGAPASNGNENEVVPVLSEKSADKIPEPKEQRQKQPRAGPIKAQKLPDLSPVENKEHKPGPIGKERSLKNRKVKDAQQVEPEGQEKPSPATVRSTDPVTTKETKAVSEMSTEIGTMISVSSAEYGTNAKESVTDYTTPSSSLPNTVATNNTKMEDTLVNNVPLPNTLPLPKRETIQQSSSLTSVPPTTFSLTFKMESARKAWENSPNVREKGSPVTSTAPPIATGVSSSASGPSTANYNSFSSASMPQIPVASVTPTASLSGAGTYTTSSLSTKSTTTSDPPNICKVKPQQLQTSSLPSASHFSQLSCMPSLIAQQQQNPQVYVSQSAAAQIPAFYMDTSHLFNTQHARLAPPSLAQQQGFQPGLSQPTSVQQIPIPIYAPLQGQHQAQLSLGAGPAVSQAQELFSSSLQPYRSQPAFMQSSLSQPSVVLSGTAIHNFPTVQHQELAKAQSGLAFQQTSNTQPIPILYEHQLGQASGLGGSQLIDTHLLQARANLTQASNLYSGQVQQPGQTNFYNTAQSPSALQQVTVPLPASQLSLPNFGSTGQPLIALPQTLQPPLQHTTPQAQAQSLSRPAQVSQPFRGLIPAGTQHSMIATTGKMSEMELKAFGSGIDIKPGTPPIAGRSTTPTSSPSGLLLQVRTASPAK

SEQ ID NO: 473 - DNA, 507 bp, Homo sapiens
  misc_feature (2)..(2): n is a, c, g, or t
tntttttagcaaaatgggtgcttttattttcacagacatgtctatgcaatacactcagtcacaagagagagcttcttaagcctgaccataatttaaactctgaaaggtgagtgagcctgttaagagacctccacccttctagtaacctatatcccttgatatgggaaggatatcttagttctccctagccccttgcttaggattaagtgagagacttcagctttggtgtaaagctgtcagctgccctaatcaaggacaatacacaaaaattagactccttataagaataagggattaaatggaggaagatctagaagtgggtgggaacaaaagagcagaactgagcctgcatctgcagaaaatgtccaaagacaactggcagagttcactccatggggaaaaggcatgttagtgtgtaggtagagaaactggacaaggaaggatggccttagccttccataatggagaagtcgggcaggggatgtctgcatgcaatagacaactgaa

SEQ ID NO: 474 - DNA, 3238 bp, Homo sapiens
atgagctacacgttggactcgctgggcaacccgtccgcctaccggcgggtaaccgagacccgctcgagcttcagccgcgtcagcggctccccgtccagtggcttccgctcgcagtcgtggtcccgcggctcgcccagcaccgtgtcctcctcctataagcgcagcatgctcgccccgcgcctcgcttacagctcggccatgctcagctccgccgagagcagccttgacttcagccagtcctcgtccctgctcaacggcggctccggacccggcggcgactacaagctgtcccgctccaacgagaaggagcagctgcaggggctgaacgaccgctttgccggctacatagagaaggtgcactacctggagcagcagaataaggagattgaggcggagatccaggcgctgcggcagaagcaggcctcgcacgcccagctgggcgacgcgtacgaccaggagatccgcgagctgcgcgccaccctggagatggtgaaccacgagaaggctcaggtgcagctggactcggaccacctggaggaagacatccaccggctcaaggagcgctttgaggaggaggcgcggttgcgggacgacactgaggcggccatccgggcgctgcgcaaagacatcgaggaggcgtcgctggtcaaggtggagctggacaagaaggtgcagtcgctgcaggatgaggtggccttcctgcggagcaaccacgaggaggaggtggccgaccttctggcccagatccaggcatcgcacatcacggtggagcgcaaagactacctgaagacagacatctcgacggcgctgaaggaaatccgctcccagctcgaaagccactcagaccagaatatgcaccaggccgaagagtggttcaaatgccgctacgccaagctcaccgaggcggccgagcagaacaaggaggccatccgctccgccaaggaagagatcgccgagtaccggcgccagctgcagtccaagagcatcgagctagagtcggtgcgcggcaccaaggagtccctggagcggcagctcagcgacatcgaggagcgccacaaccacgacctcagcagctaccaggacaccatccagcagctggaaaatgagcttcggggcacaaagtgggaaatggctcgtcatttgcgcgaataccaggacctcctcaacgtcaagatggctctggatatagaaatcgctgcgtacagaaaactcctggagggtgaagagactagatttagcacatttgcaggaagcatcactgggccactgtatacacaccgacccccaatcacaatatccagtaagattcagaaaaccaaggtggaagctcccaagcttaaggtccaacacaaatttgtcgaggagatcatagaggaaaccaaagtggaggatgagaagtcagaaatggaagaggccctgacagccattacagaggaattggccgcttccatgaaggaagagaagaaagaagcagcagaagaaaaggaagaggaacccgaagctgaagaagaagaagtagctgccaaaaagtctccagtgaaagcaactgcacctgaagttaaagaagaggaaggggaaaaggaggaagaagaaggccaggaagaagaggaggaagaagatgagggagctaagtcagaccaagccgaagagggaggatccgagaaggaaggctctagtgaaaaagaggaaggtgagcaggaagaaggagaaacagaagctgaagctgaaggagaggaagccgaagctaaagaggaaaagaaagtggaggaaaagagtgaggaagtggctaccaaggaggagctggtggcagatgccaaggtggaaaagccagaaaaagccaagtctcctgtgccaaaatcaccagtggaagagaaaggcaagtctcctgtgcccaagtcaccagtggaagagaaaggcaagtctcctgtgcccaagtcaccagtggaagagaaaggcaagtctcctgtgccgaaatcaccagtggaagagaaaggcaagtctcctgtgtcaaaatcaccagtggaagagaaagccaaatctcctgtgccaaaatcaccagtggaagaggcaaagtcaaaagcagaagtggggaaaggtgaacagaaagaggaagaagaaaaggaagtcaaggaagctcccaaggaagagaaggtagagaaaaaggaagagaaaccaaaggatgtgccagagaagaagaaagctgagtcccctgtaaaggaggaagctgtggcagaggtggtcaccatcaccaaatcggtaaaggtgcacttggagaaagagaccaaagaagaggggaagccactgcagcaggagaaagagaaggagaaagcgggaggagagggaggaagtgaggaggaagggagtgataaaggtgccaagggatccaggaaggaagacatagctgtcaatggggaggtagaaggaaaagaggaggtagagcaggagaccaaggaaaaaggcagtgggagggaagaggagaaaggcgttgtcaccaatggcctagacttgagcccagcagatgaaaagaaggggggtgataaaagtgaggagaaagtggtggtgaccaaaacggtagaaaaaatcaccagtgaggggggagatggtgctaccaaatacatcactaaatctgtaaccgtcactcaaaaggttgaagagcatgaagagacctttgaggagaaactagtgtctactaaaaaggtagaaaaagtcacttcacacgccatagtaaaggaagtcacccagagtgactaagatttgagtccattgcaaaaggttaagccatatgacaatttcaaaatgcatgtgattggcagcttcaaaacagaacgggttctcccatgggggctccagacattgtattttactttgtgcaatatgaggggactgcatgcaagctcagggtgctccctcctcagtctttgggggattcaaatgcatgatattgtatgtacctgggaaatttgccgatttcctaagctgttggaagggggtcacttaaggggggatgtcttgagatgtattatgcaaagtaccaactgagccaaaaacaataaatgaaacacagaactcagccttaagaaagctatatatgaataattatgtttacctcactggtgcatttaaaatggacttttgttcatgggagaacctcgttgacatgcacagtttgcaatcttatgttgatcgatgttaaacgtcacagcagtacttgctcaataaaggtcatattggaaacata

SEQ ID NO: 475 - protein, 916 aa, Homo sapiens
MSYTLDSLGNPSAYRRVTETRSSFSRVSGSPSSGFRSQSWSRGSPSTVSSSYKRSMLAPRLAYSSAMLSSAESSLDFSQSSSLLNGGSGPGGDYKLSRSNEKEQLQGLNDRFAGYIEKVHYLEQQNKEIEAEIQALRQKQASHAQLGDAYDQEIRELRATLEMVNHEKAQVQLDSDHLEEDIHRLKERFEEEARLRDDTEAAIRALRKDIEEASLVKVELDKKVQSLQDEVAFLRSNHEEEVADLLAQIQASHITVERKDYLKTDISTALKEIRSQLESHSDQNMHQAEEWFKCRYAKLTEAAEQNKEAIRSAKEEIAEYRRQLQSKSIELESVRGTKESLERQLSDIEERHNHDLSSYQDTIQQLENELRGTKWEMARHLREYQDLLNVKMALDIEIAAYRKLLEGEETRFSTFAGSITGPLYTHRPPITISSKIQKTKVEAPKLKVQHKFVEEIIEETKVEDEKSEMEEALTAITEELAASMKEEKKEAAEEKEEEPEAEEEEVAAKKSPVKATAPEVKEEEGEKEEEEGQEEEEEEDEGAKSDQAEEGGSEKEGSSEKEEGEQEEGETEAEAEGEEAEAKEEKKVEEKSEEVATKEELVADAKVEKPEKAKSPVPKSPVEEKGKSPVPKSPVEEKGKSPVPKSPVEEKGKSPVPKSPVEEKGKSPVSKSPVEEKAKSPVPKSPVEEAKSKAEVGKGEQKEEEEKEVKEAPKEEKVEKKEEKPKDVPEKKKAESPVKEEAVAEVVTITKSVKVHLEKETKEEGKPLQQEKEKEKAGGEGGSEEEGSDKGAKGSRKEDIAVNGEVEGKEEVEQETKEKGSGREEEKGVVTNGLDLSPADEKKGGDKSEEKVVVTKTVEKITSEGGDGATKYITKSVTVTQKVEEHEETFEEKLVSTKKVEKVTSHAIVKEVTQSD

SEQ ID NO: 476 - DNA, 2813 bp, Homo sapiens
gcgagggccgctggggccgcgaagtggggcggccgggtgggctacgagccgggtctgggctgaggggcgcggcttcgcggtggaccccagcccggcaacggaaggcgagctctcctccaccgtccaaagtaaactttgccgctccttccgcggcgctcccgagtcctcgccgccgccgggccgccgcagtccgcgaagagccgtcctgcgtcagggcctccttccctgccccggcgcggggccactgcgccatggacgccacagcactggagcgggacgctgtgcagttcgcccgtctggcggttcagcgcgaccacgaaggccgctactccgaggcggtgttttattacaaggaagctgcacaagccttaatttatgctgagatggcaggatcaagcctagaaaatattcaagaaaaaataactgagtatctggaaagagttcaagctctacattcagcagttcagtcaaagagtgctgatcctttgaagtcaaaacatcagttggacttagagcgtgctcatttccttgttacacaagcttttgatgaagatgaaaaagagaatgttgaagatgctatagaattgtacacagaagctgtggatctctgtctgaaaacatcttatgaaactgctgataaagtcctgcaaaataaactgaaacagttggctcgacaggcactagacagagcagaagcgctgagtgagcctttgaccaagccagttggcaaaatcagttcaacaagtgttaagccaaagccacctccagtgagagcacattttccactgggcgctaatcccttccttgaaagacctcagtcatttataagtcctcagtcatgtgatgcacaaggacagagatacacagcagaagaaatagaagtactcaggacaacatcaaaaataaatggtatagaatatgttcctttcatgaatgttgacctgagagaacgttttgcctatccaatgcctttctgtgatagatggggcaagctaccattatcacctaaacaaaaaactacattttccaagtgggtacgaccagaagacctcaccaacaatcctacaatgatatatactgtgtccagttttagcataaagcagacaatagtatcggattgctcctttgtggcatcactggccatcagtgcagcttatgaaagacgttttaataagaagttaattaccggcataatttaccctcaaaacaaggatggtgaaccagaatacaatccatgtgggaagtatatggtaaaacttcacctcaatggtgtcccaagaaaggtgataattgatgaccagttacctgttgatcacaagggagaattgctctgttcttattccaacaacaaaagtgaattatgggtttctctcatagaaaaagcatacatgaaagtcatgggaggatatgattttccaggatccaactccaatattgatcttcatgcactgactggctggataccagaaagaattgctatgcattcagatagccaaactttcagtaaggataattctttcagaatgctttatcaaagatttcacaagggagatgtcctcatcactgcgtcaactggaatgatgacagaagctgaaggagagaagtggggtctggttcccacacacgcatatgctgttttggatattagagagttcaaggggctgcgatttatccagttgaaaaatccttggagtcatttacgttggaaaggaagatacagtgaaaatgatgtaaaaaactggactccagagttgcaaaagtatttaaactttgatccccgaacagctcagaaaatagacaacggaatattttggatttcctgggatgatctctgccagtattatgatgtgatttatttgagttggaatccaggtctttttaaagaatcaacatgtattcacagtacttgggatgctaagcaaggacctgtgaaagatgcctatagcctggccaacaacccccagtacaaactggaggtgcagtgtccacaggggggtgctgcagtttgggttttgcttagtagacacataacagacaaggatgattttgcgaataatcgagaatttatcacaatggttgtatacaagactgatgggaaaaaagtttattacccagctgacccacctccatacattgatggaattcgaattaacagccctcattatttgactaagataaagctgaccacacctggcacccatacctttacattagtggtttctcaatatgaaaaacagaacacaatccattacacggttcgggtatattcagcatgcagctttactttttcaaagattccttcaccatacaccttatcaaaacggattaatggaaagtggagtggtcagagtgctggaggatgtggaaatttccaagagactcacaaaaataaccccatctaccaattccatatagaaaagactgggccgttactgattgagctacgaggaccaaggcaatatagcgttggatttgaggttgtaacagtttctactctaggagatcctggtccccatggctttctgaggaaatctagtggtgactataggtgtgggttttgctacctggaattagaaaatataccttctgggatcttcaatatcattcctagtacctttttgcctaaacaagaaggaccttttttcttggactttaatagtattatccccatcaagatcacacaacttcagtgatggagaaatctcaagttactggcttttatacttaccaaacatcagttcttcaaataaggacgcaaatcttcaggacagtaagcagaacaatcagaatggaattaaatctctaaaaacgtg

SEQ ID NO: 477 - protein, 813 aa, Homo sapiens
MDATALERDAVQFARLAVQRDHEGRYSEAVFYYKEAAQALIYAEMAGSSLENIQEKITEYLERVQALHSAVQSKSADPLKSKHQLDLERAHFLVTQAFDEDEKENVEDAIELYTEAVDLCLKTSYETADKVLQNKLKQLARQALDRAEALSEPLTKPVGKISSTSVKPKPPPVRAHFPLGANPFLERPQSFISPQSCDAQGQRYTAEEIEVLRTTSKINGIEYVPFMNVDLRERFAYPMPFCDRWGKLPLSPKQKTTFSKWVRPEDLTNNPTMIYTVSSFSIKQTIVSDCSFVASLAISAAYERRFNKKLITGIIYPQNKDGEPEYNPCGKYMVKLHLNGVPRKVIIDDQLPVDHKGELLCSYSNNKSELWVSLIEKAYMKVMGGYDFPGSNSNIDLHALTGWIPERIAMHSDSQTFSKDNSFRMLYQRFHKGDVLITASTGMMTEAEGEKWGLVPTHAYAVLDIREFKGLRFIQLKNPWSHLRWKGRYSENDVKNWTPELQKYLNFDPRTAQKIDNGIFWISWDDLCQYYDVIYLSWNPGLFKESTCIHSTWDAKQGPVKDAYSLANNPQYKLEVQCPQGGAAVWVLLSRHITDKDDFANNREFITMVVYKTDGKKVYYPADPPPYIDGIRINSPHYLTKIKLTTPGTHTFTLVVSQYEKQNTIHYTVRVYSACSFTFSKIPSPYTLSKRINGKWSGQSAGGCGNFQETHKNNPIYQFHIEKTGPLLIELRGPRQYSVGFEVVTVSTLGDPGPHGFLRKSSGDYRCGFCYLELENIPSGIFNIIPSTFLPKQEGPFFLDFNSIIPIKITQLQ

SEQ ID NO: 478 - DNA, 1044 bp, Homo sapiens
gaccggggcgtgcggagggatgtggcccggaatattggtagggggggcccgggtggcgtcatgcaggtaccccgcgctggggcctcgcctcgccgctcactttccagcgcagcggccgccgcagcggacactccagaacggcctggccctgcagcggtgcctgcacgcgacggcgacccgggctctcccgctcattcccatcgtggtggagcagacgggtcgcggcgagcgcgcctatgacatctactcgcggctgctgcgggagcgcatcgtgtgcgtcatgggcccgatcgatgacagcgttgccagccttgttatcgcacagctcctcttcctgcaatccgagagcaacaagaagcccatccacatgtacatcaacagccctggtggtgtggtgaccgcgggcctggccatctacgacacgatgcagtacatcctcaacccgatctgcacctggtgcgtgggccaggccgccagcatgggctccctgcttctcgccgccggcaccccaggcatgcgccactcgctccccaactcccgtatcatgatccaccagccctcaggaggcgcccggggccaagccacagacattgccatccaggcagaggagatcatgaagctcaagaagcagctctataacatctacgccaagcacaccaaacagagcctgcaggtgatcgagtccgccatggagagggaccgctacatgagccccatggaggcccaggagtttggcatcttagacaaggttctggtccaccctccccaggacggtgaggatgagcccacgctggtgcagaaggagcctgtagaagcagcgccggcagcagaacctgtcccagctagcacctgagagctgggcctcctctccagaatcatgtggaggggccagaggcttgccagacccccagctgggccctgctcaccccttgttgctgggcttggaggggcctcttgaggaacttttaatttgcaggggtgcccgctatggacggggcattccagctgagacactgtgattttaaattaaatctttgtggtctt

SEQ ID NO: 479 - protein, 277 aa, Homo sapiens
MWPGILVGGARVASCRYPALGPRLAAHFPAQRPPQRTLQNGLALQRCLHATATRALPLIPIVVEQTGRGERAYDIYSRLLRERIVCVMGPIDDSVASLVIAQLLFLQSESNKKPIHMYINSPGGVVTAGLAIYDTMQYILNPICTWCVGQAASMGSLLLAAGTPGMRHSLPNSRIMIHQPSGGARGQATDIAIQAEEIMKLKKQLYNIYAKHTKQSLQVIESAMERDRYMSPMEAQEFGILDKVLVHPPQDGEDEPTLVQKEPVEAAPAAEPVPAST

SEQ ID NO: 480 - DNA, 9749 bp, Homo sapiens
gagcccggcccgggggacgggcggcgggatagcgggaccccggcggcgcggtgcgcttcagggcgcagcggcggccgcagaccgagccccgggcgcggcaagaggcggcgggagccggtggcggctcggcatcatgcgtcgagggcgtctgctggagatcgccctgggatttaccgtgcttttagcgtcctacacgagccatggggcggacgccaatttggaggctgggaacgtgaaggaaaccagagccagtcgggccaagagaagaggcggtggaggacacgacgcgcttaaaggacccaatgtctgtggatcacgttataatgcttactgttgccctggatggaaaaccttacctggcggaaatcagtgtattgtccccatttgccggcattcctgtggggatggattttgttcgaggccaaatatgtgcacttgcccatctggtcagatagctccttcctgtggctccagatccatacaacactgcaatattcgctgtatgaatggaggtagctgcagtgacgatcactgtctatgccagaaaggatacatagggactcactgtggacaacctgtttgtgaaagtggctgtctcaatggaggaaggtgtgtggccccaaatcgatgtgcatgcacttacggatttactggaccccagtgtgaaagagattacaggacaggcccatgttttactgtgatcagcaaccagatgtgccagggacaactcagcgggattgtctgcacaaaaacgctctgctgtgccacagtcggccgagcctggggccacccctgtgagatgtgtcctgcccagcctcacccctgccgccgtggcttcattccaaatatccgcacgggagcttgtcaagatgtggatgaatgccaggccatccccgggctctgtcagggaggaaattgcattaatactgttgggtcttttgagtgcaaatgccctgctggacacaaacttaatgaagtgtcacaaaaatgtgaagatattgatgaatgcagcaccattcctggaatctgtgaagggggtgaatgtacaaacacagtcagcagttacttttgcaaatgtccccctggtttttacacctctccagatggtaccagatgcatagatgttcgcccaggatactgttacacagctctgacaaacgggcgctgctctaaccagctgccacagtccataaccaaaatgcagtgctgctgtgatgccggccgatgctggtctccaggggtcactgtcgcccctgagatgtgtcccatcagagcaaccgaggatttcaacaagctgtgctctgttcctatggtaattcctgggagaccagaatatcctcccccaccccttggccccattcctccagttctccctgttcctcctggctttcctcctggacctcaaattccggtccctcgaccaccagtggaatatctgtatccatctcgggagccaccaagggtgctgccagtaaacgttactgattactgccagttggtccgctatctctgtcaaaatggacgctgcattccaactcctgggagttgccggtgtgagtgcaacaaagggttccagctggacctccgtggggagtgtattgatgttgatgaatgtgagaaaaacccctgtgctggtggtgagtgtattaacaaccagggttcgtacacctgtcagtgccgagctggatatcagagcacactcacgcggacagaatgccgagacattgatgagtgtttacagaatggccggatctgcaataatggacgctgcatcaacacagatggcagttttcattgcgtgtgtaatgcgggctttcatgttacacgagatgggaagaactgtgaagatatggatgaatgcagcataaggaacatgtgccttaatggaatgtgtatcaatgaagatggcagttttaaatgtatttgcaaacctggattccagctggcatcagatggacgttattgcaaagacattaacgagtgtgaaacccctgggatctgcatgaatgggcgttgcgtcaacactgatggctcctacagatgtgaatgcttccctggactggctgtgggtctggatggccgtgtgtgtgttgacacacacatgcggagcacatgctatggtggatacaagagaggccagtgtatcaaacctttgtttggtgctgtcactaaatctgaatgctgttgcgccagcactgagtatgcatttggggaaccttgccagccgtgtcctgcacagaattcagcggaatatcaggcactctgcagcagtgggccaggaatgacgtcagcaggcagtgatataaatgaatgtgcactagatcctgatatttgcccaaatggaatctgtgaaaaccttcgtgggacctataaatgtatatgcaattcaggatatgaagtggattcaactgggaaaaactgcgttgatattaatgaatgtgtactgaacagtctcctttgtgacaatggacaatgtagaaatactcctggaagttttgtctgtacctgccccaagggatttatctacaaacctgatctaaaaacatgtgaagacattgatgaatgcgaatcaagtccttgcattaatggagtctgcaagaacagcccaggctcttttatttgtgaatgttcttctgaaagtactttggatccaacaaaaaccatctgcatagaaaccatcaagggcacttgctggcagactgtcattgatgggcgatgtgagatcaacatcaatggagccaccttaaagtcccagtgctgctcctccctcggtgctgcgtggggaagcccgtgcaccctatgccaagttgatcccatatgtggtaaagggtactcaagaattaaaggaacacaatgtgaagatatagatgaatgtgaagtgttcccaggagtgtgtaaaaatggcctgtgtgttaacactagggggtcattcaagtgtcagtgtcccagtggaatgactttggatgccacaggaaggatctgtcttgatatccgcctggaaacctgcttcctgaggtacgaggacgaggagtgcaccctgcctattgctggccgccaccgcatggacgcctgctgctgctccgtcggggcagcctggggtactgaggaatgcgaggagtgtcccatgagaaatactcctgagtacgaggagctgtgtccgagaggacccggatttgccacaaaagaaattacaaatggaaagcctttcttcaaagatatcaatgagtgcaagatgatacccagcctctgcacccacggcaagtgcagaaacaccattggcagctttaagtgcaggtgtgacagcggctttgctcttgattctgaagaaaggaactgcacagacattgacgaatgccgcatatctcctgacctctgtggcagaggccagtgtgtgaacacccctggggactttgaatgcaagtgtgacgaaggctatgaaagtggattcatgatgatgaagaactgcatggatattgatgagtgtcagagagatcctctcctatgccgaggtggtgtttgccataacacagagggaagttaccgctgtgaatgcccgcctggccatcagctgtcccccaacatctccgcgtgtatcgacatcaatgaatgtgagctgagtgcacacctgtgccccaatggccgttgcgtgaacctcatagggaagtatcagtgtgcctgcaaccctggctaccattcaactcccgataggctattttgtgttgacattgatgaatgcagcataatgaatggtggttgtgaaaccttctgcacaaactctgaaggcagctatgaatgtagctgtcagccgggatttgcactaatgcctgaccagagatcatgcaccgacatcgatgagtgtgaagataatcccaatatctgtgatggtggtcagtgcacaaatatccctggagagtacaggtgcttgtgttatgatggattcatggcatctgaagacatgaagacttgtgtagatgtcaatgagtgtgacctgaatccaaatatctgcctaagtgggacctgtgaaaacacgaaaggctcatttatctgccactgtgatatgggctactccggcaaaaaaggaaaaactggctgtacagacatcaatgaatgtgaaattggagcacacaactgtggcaaacatgctgtatgtaccaatacagcaggaagcttcaaatgtagctgcagtcccgggtggattggagatggcattaagtgcactgatctggacgaatgttccaatggaacccatatgtgcagccagcatgcagactgcaagaataccatgggatcttaccgctgtctgtgcaaggaaggatacacaggtgatggcttcacttgtacagaccttgatgagtgctctgagaacctgaatctctgtggcaatggccagtgcctcaatgcaccaggaggataccgctgtgaatgcgacatgggcttcgtgcccagtgctgacgggaaagcctgtgaagatattgatgagtgctcccttccgaacatctgtgtctttggaacttgccacaacctccctggcctgttccgctgtgagtgtgagataggctacgaactggacagaagcggcgggaactgcacagatgtgaatgaatgcctggatccaaccacgtgcatcagtgggaactgtgtcaacactccaggcagctatatctgtgactgcccacctgattttgaactgaacccaactcgagttggctgtgttgatacccgctctggaaattgctatttggatattcgacctcgaggagacaatggagatacagcctgcagcaatgaaattggagttggtgtttccaaagcttcctgctgctgttctctgggtaaagcctggggtactccttgtgagatgtgtcctgctgtgaacacatccgagtacaaaattctttgtcctggaggggaaggtttccgaccaaatcctatcaccgttatattggaagatattgatgagtgccaggagctaccagggctgtgccaaggaggaaaatgtatcaacacctttgggagtttccagtgccgctgtccaaccggctactacctgaatgaagatacacgagtgtgtgatgatgtgaatgaatgtgagactcctggaatctgtggtccagggacatgttacaacaccgttggcaactacacctgtatctgtcctccagactacatgcaagtgaatgggggaaataattgcatggatatgagaagaagtttgtgctacagaaactactatgctgacaaccagacctgtgatggagaattgttattcaacatgaccaagaagatgtgctgctgttcctacaacattggccgggcgtggaacaagccctgtgaacagtgtcccatcccaagtacagatgagtttgctacactctgtggaagtcaaaggccaggctttgtcatcgacatttataccggtttacccgttgatattgatgagtgccgggagatcccaggggtctgtgaaaatggagtgtgtatcaacatggttggcagcttccgatgtgaatgtccagtgggattcttctataatgacaagttgttggtttgtgaagatattgacgagtgtcagaacggcccagtgtgccagcgcaacgccgaatgcatcaacactgcaggcagctaccgctgtgactgtaagcccggctaccgcttcacctccacaggacagtgcaatgatcgtaatgaatgtcaagaaatccccaatatatgcagtcatgggcagtgcattgacacagttggaagcttttattgcctttgccacactggttttaaaacaaatgatgaccaaaccatgtgcttggacataaatgaatgtgaaagagatgcctgtgggaatggaacttgccggaacacaattggttccttcaactgccgctgcaatcatggtttcatcctttctcacaacaatgactgtatagatgttgatgaatgtgcaagtggaaatgggaatctttgcagaaatggccaatgcattaatacagtggggtctttccagtgccagtgcaatgaaggctatgaggtggctccagatgggaggacctgtgtggatatcaatgaatgtcttctagaacccagaaaatgtgcaccaggtacctgtcaaaacttggatgggtcctacagatgcatttgcccacctggatacagtcttcaaaatgagaagtgtgaagatattgatgagtgtgtcgaagagccagaaatttgtgccctgggcacatgcagtaacactgaaggcagcttcaaatgtctgtgtccagaagggttttccttgtcctccagtggaagaaggtgccaagatttgcgaatgagctactgttatgcgaagtttgaaggaggaaagtgttcatcacccaaatccagaaatcactccaagcaggaatgctgctgtgccttgaagggagaaggctggggagacccctgcgagctctgccccacggaacctgatgaggccttccgccagatatgtccttatggaagtgggatcatcgtgggacctgatgattcagcagttgatatggacgaatgcaaagaacccgatgtctgtaaacatggacagtgcatcaatacagatggttcctatcgctgcgagtgtccctttggttatattctagcagggaatgaatgtgtagatactgatgaatgttctgttggcaatccttgtggaaatggaacctgcaagaatgtgattggaggttttgaatgcacctgcgaggagggatttgagcccggtccaatgatgacatgtgaagatataaatgaatgtgcccagaatcctctgctctgtgccttccgatgtgtgaacacttatgggtcatatgaatgcaaatgtcccgtgggatatgtgctcagagaagaccgtaggatgtgcaaagatgaggatgagtgtgaagagggaaaacatgactgtactgaaaaacaaatggaatgcaagaacctcattggcacatatatgtgcatctgtggacccgggtatcagcggagacctgatggagaaggctgtgtagatgagaatgaatgtcagacgaagccagggatctgtgagaatgggcgctgcctcaacacccgtgggagctacacctgtgagtgtaatgatgggtttaccgccagccccaaccaggacgagtgccttgacaatcgggaagggtactgcttcacagaggtgctacaaaacatgtgtcagatcggctccagcaacaggaaccccgtcaccaaatcggaatgctgctgtgacggagggagaggctggggtccccactgtgagatctgccctttccaggggactgtggctttcaagaaactctgtccccatggccgaggattcatgaccaatggagcagatatcgatgaatgcaaggttattcacgatgtttgccgaaatggggaatgtgtcaatgacagaggatcatatcattgcatttgtaaaactgggtacactccagatataactgggacttcctgtgtagatctgaacgagtgcaaccaggctcccaaaccctgcaattttatctgcaaaaacacagaagggagttaccagtgttcatgcccgaaaggctacattctgcaagaggatggaaggagctgcaaagatcttgatgagtgtgcaaccaagcaacacaactgccagttcctatgtgttaacaccattggcggcttcacatgcaaatgtcctcccggatttacccaacaccatacgtcctgcattgataacaatgaatgcacctctgacatcaatctgtgcgggtctaagggcatttgccagaacactcctggaagcttcacctgtgaatgccagcggggattctcacttgatcagaccggctccagctgtgaagacgtggacgagtgtgagggtaaccaccgctgccagcatggctgccagaacatcattgggggctacaggtgcagctgcccccagggctacctccagcactaccagtggaaccagtgtgttgatgaaaacgaatgcctcagcgctcacatctgcggaggagcctcctgtcacaacaccctggggagctacaagtgcatgtgtcccgccggcttccagtatgaacagttcagtggaggatgccaagacatcaatgaatgtggctctgcgcaggccccctgcagctatggctgttccaataccgagggcggttacctgtgtggctgtccacctggttacttccgcataggccaagggcactgtgtttctggaatgggcatgggccgaggaaacccagagccacctgtcagtggtgaaatggatgacaattcactctccccagaggcttgttacgagtgtaagatcaatggctaccccaaacggggcaggaaacggagaagcacaaacgaaactgatgcctccaatatcgaggatcagtctgagacagaagccaatgtgagtcttgcaagttgggatgttgagaagacagccatctttgctttcaatatttcccacgtcagtaacaaggttcgaatcctagaactccttccagctcttacaactctgacgaatcacaacagatacttgatcgaatctggaaatgaagatggcttctttaaaatcaaccaaaaggaagggatcagctacctccacttcacaaagaagaagccagtggctggaacctattcattacaaatcagtagtactccactttataaaaagaaagaacttaaccaactagaagacaaatatgacaaagactacctcagtggtgaactgggtgataatctgaagatgaaaatccaggttttgcttcattaattcaccatccagagaccaaataattaaaagaaaaacaaatatagataggtagaactatattttcccccaatcagaatcatcatatcataggtacaatctttcaccaagtaaatttgtataaataagcactattctttgtattaccaaagcaaggtacaggtgactaccctagttcaaaacaaccactttctcaggcttctcatgtgtgtagctaagctaccttgtcatatgtgttgattcttgaaaactgggacgtgtatttccattgggggttggccatttatgctgacatgccatccttccagcaaacgtacgggaatgtgctttcaattgatggactactctattttttgcaaatttgtaaactttgcttctccaaatacaagtactaggttgtccatttatggtacctatttggtgctagtaaattttcaaactagatttataaatgcactgtaatatgtacacaacttagaaaccaaattacaagtattcagttccaatacttcattaatttcaatcaaccaaagttagttcagtagcttatctcagttatgagtataatacattacatgtaaattaagtgtgtgtatactgtaatcgtgctattttttatcattgaaacatttataaactagaataataatgcccttaatgtgagggtttgtaatggtgcttattaagaccaaagacttgttaaatgtatacaccaagtggtaatgaaatttcggtgactggcccacacgtgcatagaggtctgggaggaccaggaaacagcctcagtggccagaggatcaccagtgcatccttcatcacagcatgtgcaatatgccaagattaccctcggtcattcctgtcaacaaggggtcaatgtcataaatgtcacaataaaacaatctcttcttttttttagtttaccccttggctttgtgttcttgcatggatttggggttggaggggccattccggaggctaaataaagtctcctggatttaaatta

SEQ ID NO: 481 - protein, 2871 aa, Homo sapiens
MRRGRLLEIALGFTVLLASYTSHGADANLEAGNVKETRASRAKRRGGGGHDALKGPNVCGSRYNAYCCPGWKTLPGGNQCIVPICRHSCGDGFCSRPNMCTCPSGQIAPSCGSRSIQHCNIRCMNGGSCSDDHCLCQKGYIGTHCGQPVCESGCLNGGRCVAPNRCACTYGFTGPQCERDYRTGPCFTVISNQMCQGQLSGIVCTKTLCCATVGRAWGHPCEMCPAQPHPCRRGFIPNIRTGACQDVDECQAIPGLCQGGNCINTVGSFECKCPAGHKLNEVSQKCEDIDECSTIPGICEGGECTNTVSSYFCKCPPGFYTSPDGTRCIDVRPGYCYTALTNGRCSNQLPQSITKMQCCCDAGRCWSPGVTVAPEMCPIRATEDFNKLCSVPMVIPGRPEYPPPPLGPIPPVLPVPPGFPPGPQIPVPRPPVEYLYPSREPPRVLPVNVTDYCQLVRYLCQNGRCIPTPGSCRCECNKGFQLDLRGECIDVDECEKNPCAGGECINNQGSYTCQCRAGYQSTLTRTECRDIDECLQNGRICNNGRCINTDGSFHCVCNAGFHVTRDGKNCEDMDECSIRNMCLNGMCINEDGSFKCICKPGFQLASDGRYCKDINECETPGICMNGRCVNTDGSYRCECFPGLAVGLDGRVCVDTHMRSTCYGGYKRGQCIKPLFGAVTKSECCCASTEYAFGEPCQPCPAQNSAEYQALCSSGPGMTSAGSDINECALDPDICPNGICENLRGTYKCICNSGYEVDSTGKNCVDINECVLNSLLCDNGQCRNTPGSFVCTCPKGFIYKPDLKTCEDIDECESSPCINGVCKNSPGSFICECSSESTLDPTKTICIETIKGTCWQTVIDGRCEININGATLKSQCCSSLGAAWGSPCTLCQVDPICGKGYSRIKGTQCEDIDECEVFPGVCKNGLCVNTRGSFKCQCPSGMTLDATGRICLDIRLETCFLRYEDEECTLPIAGRHRMDACCCSVGAAWGTEECEECPMRNTPEYEELCPRGPGFATKEITNGKPFFKDINECKMIPSLCTHGKCRNTIGSFKCRCDSGFALDSEERNCTDIDECRISPDLCGRGQCVNTPGDFECKCDEGYESGFMMMKNCMDIDECQRDPLLCRGGVCHNTEGSYRCECPPGHQLSPNISACIDINECELSAHLCPNGRCVNLIGKYQCACNPGYHSTPDRLFCVDIDECSIMNGGCETFCTNSEGSYECSCQPGFALMPDQRSCTDIDECEDNPNICDGGQCTNIPGEYRCLCYDGFMASEDMKTCVDVNECDLNPNICLSGTCENTKGSFICHCDMGYSGKKGKTGCTDINECEIGAHNCGKHAVCTNTAGSFKCSCSPGWIGDGIKCTDLDECSNGTHMCSQHADCKNTMGSYRCLCKEGYTGDGFTCTDLDECSENLNLCGNGQCLNAPGGYRCECDMGFVPSADGKACEDIDECSLPNICVFGTCHNLPGLFRCECEIGYELDRSGGNCTDVNECLDPTTCISGNCVNTPGSYICDCPPDFELNPTRVGCVDTRSGNCYLDIRPRGDNGDTACSNEIGVGVSKASCCCSLGKAWGTPCEMCPAVNTSEYKILCPGGEGFRPNPITVILEDIDECQELPGLCQGGKCINTFGSFQCRCPTGYYLNEDTRVCDDVNECETPGICGPGTCYNTVGNYTCICPPDYMQVNGGNNCMDMRRSLCYRNYYADNQTCDGELLFNMTKKMCCCSYNIGRAWNKPCEQCPIPSTDEFATLCGSQRPGFVIDIYTGLPVDIDECREIPGVCENGVCINMVGSFRCECPVGFFYNDKLLVCEDIDECQNGPVCQRNAECINTAGSYRCDCKPGYRFTSTGQCNDRNECQEIPNICSHGQCIDTVGSFYCLCHTGFKTNDDQTMCLDINECERDACGNGTCRNTIGSFNCRCNHGFILSHNNDCIDVDECASGNGNLCRNGQCINTVGSFQCQCNEGYEVAPDGRTCVDINECLLEPRKCAPGTCQNLDGSYRCICPPGYSLQNEKCEDIDECVEEPEICALGTCSNTEGSFKCLCPEGFSLSSSGRRCQDLRMSYCYAKFEGGKCSSPKSRNHSKQECCCALKGEGWGDPCELCPTEPDEAFRQICPYGSGIIVGPDDSAVDMDECKEPDVCKHGQCINTDGSYRCECPFGYILAGNECVDTDECSVGNPCGNGTCKNVIGGFECTCEEGFEPGPMMTCEDINECAQNPLLCAFRCVNTYGSYECKCPVGYVLREDRRMCKDEDECEEGKHDCTEKQMECKNLIGTYMCICGPGYQRRPDGEGCVDENECQTKPGICENGRCLNTRGSYTCECNDGFTASPNQDECLDNREGYCFTEVLQNMCQIGSSNRNPVTKSECCCDGGRGWGPHCEICPFQGTVAFKKLCPHGRGFMTNGADIDECKVIHDVCRNGECVNDRGSYHCICKTGYTPDITGTSCVDLNECNQAPKPCNFICKNTEGSYQCSCPKGYILQEDGRSCKDLDECATKQHNCQFLCVNTIGGFTCKCPPGFTQHHTSCIDNNECTSDINLCGSKGICQNTPGSFTCECQRGFSLDQTGSSCEDVDECEGNHRCQHGCQNIIGGYRCSCPQGYLQHYQWNQCVDENECLSAHICGGASCHNTLGSYKCMCPAGFQYEQFSGGCQDINECGSAQAPCSYGCSNTEGGYLCGCPPGYFRIGQGHCVSGMGMGRGNPEPPVSGEMDDNSLSPEACYECKINGYPKRGRKRRSTNETDASNIEDQSETEANVSLASWDVEKTAIFAFNISHVSNKVRILELLPALTTLTNHNRYLIESGNEDGFFKINQKEGISYLHFTKKKPVAGTYSLQISSTPLYKKKELNQLEDKYDKDYLSGELGDNLKMKIQVLLH

SEQ ID NO: 482 - DNA, 1637 bp, Homo sapiens
ctggggtttggctgtccggacggtgcagcggcgaggccggccgcgaagatgccagtggcggtgatggcggaaagcgcctttagtttcaaaaagttgctggatcagtgcgagaaccaggagctcgaggcccctggaggaattgctacacccccagtgtatggtcagcttctagctttatatttgctccataatgacatgaataatgcaagatatctttggaaaagaataccacctgctataaaatctgcaaattctgaacttgggggaatttggtcagtaggacaaagaatctggcagagagatttccctgggatctatacaaccatcaacgctcaccagtggtctgagacggtccagccaattatggaagcacttagagatgcaacaaggagacgcgcctttgccctggtctctcaagcgtatacttcaatcatcgccgatgattttgcagcctttgttggacttcctgtagaagaggctgtgaaaggcatattagaacaaggatggcaagctgattccaccacaagaatggttctgcccagaaagccagttgcaggggccctggatgtttcctttaacaagtttattcccttatcagagcctgctccagttcccccaatacccaatgaacagcagttagccagactgacggattatgtggctttccttgaaaactgatttatcactctgagttcaagattcatcttcagaatcctgtatactgacaaacgtagaaatgtaaagtttgtattttcaatttattggatggcttaagcacctcagcattccttactatgtgataaaatacatatagaatataagatatactatatacattttgtccataaacgttatgctgaatagttgttgaaacagttctcattttgtagtatttaataatctggatggagcctgtcagtattacagttagttttctagtgactcataaaataagatttcctgtttcatgtagaatagtgtttgtcaactgtcttttctctgtcccagcacatgccgtactcttatatgtaccattggttgataattataatgattcatttggacttgaagaaagattgtccccaggcacagtatctgaatcactggggattatgattcaccctctttggagaacatgctctcttttcaccccccacctcctgagagccactaatgtaagatacagaaacatagctgaggaacaaatagaccatttccatactaaaccagtttgttaactttagattttttccaatagtgtgagtatatccattgctggcagtggagggcttgccatgaaaatgcaacttatttaagacatttatgagacatattaacttgtgctgtcgccttttagaaggagaaacttaagtgtggaatgcattatatgggcaaagaagctatgaagatacatgatacactttgtacaactatcctgcagcccattggttgcttatatttatcgcttggctcaagttctgccctttggagaaatactgagcaagtctttcattctctgtgtgacagccctctgaatatttgaagttgtttgttgtaacttaaggttataacagcccttagttcatttactctgcatttgttcaataaatatttaactgaaaaaaaaaaaaaaaaaa

SEQ ID NO: 483 - protein, 209 aa, Homo sapiens
MPVAVMAESAFSFKKLLDQCENQELEAPGGIATPPVYGQLLALYLLHNDMNNARYLWKRIPPAIKSANSELGGIWSVGQRIWQRDFPGIYTTINAHQWSETVQPIMEALRDATRRRAFALVSQAYTSIIADDFAAFVGLPVEEAVKGILEQGWQADSTTRMVLPRKPVAGALDVSFNKFIPLSEPAPVPPIPNEQQLARLTDYVAFLEN

SEQ ID NO: 484 - DNA, 1436 bp, Homo sapiens
cagctggagtgcgttctgccgaagcttgtggttgcacgcccatcgtcttaggggctaccttccgtgaccatgtccaagtctctgaagaagttggtggaggagagccgggagaagaaccagcccgaggtggacatgagtgaccggggcatctccaacatgctggatgtcaacggcctctttaccttatcccatatcacacaactggtcctcagccataacaagctaacaatggtgccaccgaacatcgcagaactgaagaatttggaggtgctcaacttttttaataaccaaatcgaggagctgcccacacagatcagtagccttcagaaactcaaacacctgaaccttggcatgaacaggctgaacactttgccacgaggcttcggctccctgccagctcttgaggttctggacttgacgtacaacaacttgagcgaaaattctcttcctggaaacttcttctacctgaccaccctgcgtgcactctatctaagtgacaacgattttgaaatcctgccgccagatattgggaagctcacaaagttgcagatactcagccttagggataacgacctgatctcgctgcctaaggaaatcggggagcttacccagcttaaagagctccacattcaggggaaccgcctcaccgttctgcccccagaactaggaaacttggatttaactggccagaagcaggtattcaaagcagagaacaatccctgggtgacccccattgcagaccagttccagcttggcgtgtcccatgtttttgagtatatccgttctgagacatacaaatacctctacggcagacacatgcaggccaacccagaaccaccgaagaagaataatgacaaatcgaaaaagatcagccggaaacccctggcagccaagaacagataaggaagggattggcatcggctggccttccagcaccttctctctccaacacttcattctctcttgccctgtctctcaaataaacccaatgctgcgtgtgaggccttttttatttttcttttcactctctttctaatgcttcccaccttaccttttagattcttttgctaggtgggagattgttataaggtctttaaaccatttccatttgtttctttaacattaccaaaagcagggaacaaagctcttattcaactgcgaattccatagtgggctctggcttttcttgaatagatatcacaaggttgcttattatcaaaagaataattaaaatcatgtaaccatttaaatgtcactgttaacacttttcactctttctgttgattcacctaactcattattttgctttattaaaagtcttccttcaccaccgagatatgctaatttaacttacaaatgattttaataaaatcttgagtttgtatcacatgttacttattgactcagaataaaagaacagtctgatcttggggtat

SEQ ID NO: 485 - protein, 277 aa, Homo sapiens
MSKSLKKLVEESREKNQPEVDMSDRGISNMLDVNGLFTLSHITQLVLSHNKLTMVPPNIAELKNLEVLNFFNNQIEELPTQISSLQKLKHLNLGMNRLNTLPRGFGSLPALEVLDLTYNNLSENSLPGNFFYLTTLRALYLSDNDFEILPPDIGKLTKLQILSLRDNDLISLPKEIGELTQLKELHIQGNRLTVLPPELGNLDLTGQKQVFKAENNPWVTPIADQFQLGVSHVFEYIRSETYKYLYGRHMQANPEPPKKNNDKSKKISRKPLAAKNR

SEQ ID NO: 486 - DNA, 1033 bp, Homo sapiens
cagcggcggcggcggaagtggccggcgagcccggtccccgccggcaccatgcttcccttgtcactgctgaagacggctcagaatcaccccatgttggtggagctgaaaaatggggagacgtacaatggacacctggtgagctgcgacaactggatgaacattaacctgcgagaagtcatctgcacgtccagggacggggacaagttctggcggatgcccgagtgctacatccgcggcagcaccatcaagtacctgcgcatccccgacgagatcatcgacatggtcaaggaggaggtggtggccaagggccgcggccgcggaggcctgcagcagcagaagcagcagaaaggccgcggcatgggcggcgctggccgaggtgtgtttggtggccggggccgaggtgggatcccgggcacaggcagaggccagccagagaagaagcctggcagacaggcgggcaaacagtgagcgcccacccagaccggctgctgcgccccctcctgccagggtggcgattccgctccacagtctcggacggatctgctcagaaaggaagaggcaggcgccagggggaacccccttcgtgttttgtgaccctcccttttaggtgaagcccctttttcttgctaaaaccggcaattctccggttagaaatgttacttggtgttttttggttttgtgaaacggccgtcccaaagctggctggattcctagaagagtctgtgttgaaggcatctttcaacccctcgctctggttctcagggcagcattttccaggcgggtttgttttgcatttcttggagcctctccgagcagcaaccagacgggagatttttattttaagctgttcatgctgggactgacagcctgcagggtttccttgggcgcggccccaaaattgccttcaaaacaaacccgggacggttgaaagccttcgaaccgtgcaggggatgcctcgggccctggcccttcgcttcctctcttgtgttatggaaataaaaacaaataaaactacaaaaaaaaaaaaaaaaaa

SEQ ID NO: 487 - protein, 139 aa, Homo sapiens
MLPLSLLKTAQNHPMLVELKNGETYNGHLVSCDNWMNINLREVICTSRDGDKFWRMPECYIRGSTIKYLRIPDEIIDMVKEEVVAKGRGRGGLQQQKQQKGRGMGGAGRGVFGGRGRGGIPGTGRGQPEKKPGRQAGKQ

SEQ ID NO: 488 - DNA, 5581 bp, Homo sapiens
agctcctgtgacagacggagctggagcggcggggcggcggcggagtccggcggccgggagagcgagtgagcgagcggaggagcagcgacacgggagtctagggagcgagaaggagaaggaggggagcgctcgggcgcgagcgagagaaaccgcgagcgccgagcttggactcgagccccggaacggctgaggagcccgcccgctcccctcccctccccctccccgggcccgggcccagcgcgccatcctcccccctccttccctccctccctccttcctccctcccctctccctccccctcccccgccggtggatgggagtgaaggacggaagaggcccggcggaggcggcggtgcagcgctccggtggaatgaatcttacttgttgaatatcttctggttactagttggattcatttgtgaaagaatcattttcccctgtgtggaagacacttagtggcatatttaaattataagtccacggatcaaaaagctttttgatttcccaaaggagggacataccactatatcagataagcttgacattacagccaagatggtgctgtcccagagacaacgagatgaactaaatcgagctatagcagattatcttcgttcaaatggctatgaagaggcatattcagtttttaaaaaggaagctgaattagatgtgaatgaagaattagataaaaagtatgctggtcttttggaaaaaaaatggacatctgttattagattacaaaagaaggttatggaattagaatcaaagctaaatgaagcaaaagaagaatttacgtcaggtggacctcttggtcagaaacgagacccaaaagaatggattccccgtccgccagaaaaatatgcattgagtggtcacaggagtccagtcactcgagtcattttccatcctgtgttcagtgttatggtctctgcttcagaggatgctacaattaaggtgtgggattatgagactggagattttgaacgaactcttaaaggacatacagactctgtacaggacatttcattcgaccacagcggcaagcttctggcttcctgttctgcagatatgaccattaaactatgggattttcagggctttgaatgcatcagaaccatgcacggccatgaccacaatgtttcttcagtagccatcatgcccaatggagatcatatagtgtctgcctcaagggataaaactataaaaatgtgggaagtgcaaactggctactgtgtgaagacattcacaggacacagagaatgggtacgtatggtacggccaaatcaagatggcactctgatagccagctgttccaatgaccagactgtgcgtgtatgggtcgtagcaacaaaggaatgcaaggctgagctccgagagcatgagcatgtggtagaatgcatttcctgggctccagaaagctcatattcctccatctctgaagcaacaggatctgagactaaaaaaagtggtaaacctgggccattcttgctgtctggatccagagacaagactattaagatgtgggatgtcagtactggcatgtgccttatgaccctcgtgggtcatgataactgggtacgtggagttctgttccattctggggggaagtttattttgagttgtgctgatgacaagaccctacgcgtatgggattacaagaacaagcgatgcatgaagaccctcaatgcgcatgaacactttgttacctccttggatttccacaagacggcaccctatgtcgtcactggcagcgtagatcaaacagtaaaagtgtgggagtgccgttgattgtgtctccttcggcccctcctccctcttttcctctggatgcactctgatgataccatggttaccccattgagctctgtttaaataaatattgtcctttcatgtaaattattctggatgtagattgagcttattaaatgttacacacaaagtattcatgcatggtgaatccaaattgtatactgtaaatttacatacgttgtctagaagtaccatagggtttaaaaacctgggctggcattggtcacaccaggcctaagaaggcagaagttgaatcaattgaactagggcactaaactgaatagttgacagtgtcattttatgttggattattaattcctgtttttctttctgctatctgttggtgcctgacttgatggcctcatttggggaaaagtggtggttattagggcttttcctgaaatgtgtatctatgtaacatcacttaagtgtgcttaataaatctcctgtaaggattttagatgataaggctacaattcagaatcttctgaaccatctatgtaatgaatggggattatacattggaatttttgtcatgacacatttgccaaatcagtaggatatatttgttttggcagcctatcacgcagaggctagtggtatatttatgtaagaaaatgactgtaaatctcaagaaaaatctcagcagctaatagcaactcatttatttcattttggtcttaatgctttgtaaacaggtcaaaaaatactgtcatactctaagcttctattttccacactggacatacttctagttgtattctccatactattagactgtgtagtgatgtgacttccaagtagaatttaatctccccattgagtgtgtcatggtacaaatcactattcgtttttggtgttttttagggatgtgcaatgtgcattacataatgacagaaatactgagaaggttctgtgtgcccatttgaaaggagtgggaggaatacagcagtttgtttttcaacatgaatctgatattgatttaaactgtgtttcacttacaagttttaaaaaaatgacagggtttaatggagcgtgcataaaaatgtactgttttcaccttttgtttatatgtaaatgtttgtaagtatatgggcctatctgtaagtgggtaagtctgtatgtgtgtatcatacacatcaacctccatgtccttagtcctgggtttttgaaaaagtgctaaaacggacaagtagaataaatgttgctgtggaatgccatgctttagaacaaaccctttttgatcttaatgcttctgaaaactaggtctgactctggggatttttttccagccgaaggaaaatcacttccgttatgtccccctctaatttagccgctcgacattttacacaacccggatatgttgtatattttgacccaaagttacaggtaggtttaagagaatttttagccatgacttttggagcactattccattgtcagttattaataaagaattccattgcttagctaaccaacaggttttttttgtttccaagagagttatttgaaaagttaacagaacaatgagataacagtgacagtttaacaaagataaaattctgaactgcgttttattcatttgtgtactatgtgattttttaaatgtcccctttagtatttaatggaaaattggttcctgcaaaagacaaagggtgagagttagcgtcctgtagatacacacagagactaggccgtatattaactagaagcagctttatgtctagcttgtgtctttttgtttgtttgcttgtttgtttttagattcctgagagatgtctctggaagggaaagttttgagaactaatggctatttttgaggacaaaaattacatcttaagctaattccttaaatacatacagtaggtgaattttcaggacaatattgcctcacaaccctgcttacattgaaaagtctttttcccttagctcttctgactggatttttctacaaaactatggaaaatatctttgttcttgtttgctgctattttctgtcctattttgagaaatataaatacatagaaatggtgcatcttaacatttgtttgtacatgtataaatgtcttgtattttaattcatttttagcatgaattgtttaagggtaagccacaacatctagaaatcactcatagatattgaacaataaaggagaatggtaccgatgcaggaggaagcaagcgtgtcttcccctgcagcacacagcgacttgcgttgacaaaggaggaggaaacgattactctgtaaacaaagttatccttacttgggagattgccacagcctgctgctgagttgagttaccagacatcctccatgtgagaagcagcgaacattgaatctcagggatggcccacaactgggtccacatgtaatgagccctgtttaataacgaaggggtgggggagagcagtccgtctacaacctggaatcagatttgcaaaatttcctgcactgctgtctgacactgtcctgttgatgccctttctgactgtgttctctgttttctctgtctgctgtctaaccctgtgccttgcctgggataaggacaatgatgaggttactggtttggattgtaagtagaggacttttattaattggtttagaggttcactgctgctttgtcactttctcaatcaaattggccacttaagaaataaagagctggtagaattgcatcctcagatgattattgactgtgtgtgtgtgtgaaaacagacattccagtgccacccaaatatatatctgtaacgtgcccaagaaatcctagctgcgctcttgagagtgcatgccatggagactggtttagacaccgcgtggagcctagttgcctgttgtcacggcatcttgcactttaggagactaagaccgtcctggttcgtctgtgtgtggtgtgaccaatggtgtgcccagagcactactctcaaaatcactagtgttagcaagtcgtcccgggctggggagcgttcgccgtagtctttggaagctttggctttagatttaccaagccccgcctccccgctgccagtgccctgctctcccgttcgcctctttctgtttctgtgtgaactttcccggtaatatcactcgttaaataggttttctttaaacttaattaaggaaaaactatttaaaggtaaaggatattttgttgacatcggtggctcgatcatccttaagcaactgaagttaaaattgttgaaggaaaaggcacttaaattggttactttcatgtccagctgtatataagtccagtgtgttcatctagatgacgcaaagaatctcctggtagagaagcgacatgtaaaaaactggtggaaaaaggttttggattttttttccagtggggtggggggagggcaagctggatttacaggtcacggctggactgaatgggcctttttatcttcccactgtatcatggaagtagctgcttgcttgtactgtccatccttcaggcatccctaaagctcactctgaagatgttagagacaaacacaaactcttcgagttaaagttgatcctgacactgacatgaaggcaagccttgatttcgtatgaacgttgctgaagtggtaattgaggaaaacagttccccagattgttaagagttcactgaagatattgacacaattttaaaaaatcagtaaaggaatgtatataatattgctctcgtgttttacagtaagatttgttgctctcagactgtgtaaaacaaaatttattcatgttttctgcatattaaaaaatcttattgtaccaactggtaaaccg

SEQ ID NO: 489 - protein, 410 aa, Homo sapiens
MVLSQRQRDELNRAIADYLRSNGYEEAYSVFKKEAELDVNEELDKKYAGLLEKKWTSVIRLQKKVMELESKLNEAKEEFTSGGPLGQKRDPKEWIPRPPEKYALSGHRSPVTRVIFHPVFSVMVSASEDATIKVWDYETGDFERTLKGHTDSVQDISFDHSGKLLASCSADMTIKLWDFQGFECIRTMHGHDHNVSSVAIMPNGDHIVSASRDKTIKMWEVQTGYCVKTFTGHREWVRMVRPNQDGTLIASCSNDQTVRVWVVATKECKAELREHEHVVECISWAPESSYSSISEATGSETKKSGKPGPFLLSGSRDKTIKMWDVSTGMCLMTLVGHDNWVRGVLFHSGGKFILSCADDKTLRVWDYKNKRCMKTLNAHEHFVTSLDFHKTAPYVVTGSVDQTVKVWECR

SEQ ID NO: 490 - DNA, 5640 bp, Homo sapiens
agcatcctgaggttagcattacacttctcccagtggagcccatgacttctgatcaggacgctaaggttgtggctgaaccgcagacgcagagagtccaggagggcaaggacagcgctcatctgatgaatggtcctatatctcaaaccacttctcagacaagttccatcccacctttgagtcaggtaccagcaactaaggtttcagagctgaaccctaatgcagaagtgtggggggctcctgtgttacatctggaagcaagcagtgctgctgacggtgtgagtgctgcatgggaggaggtggctggccaccacgcagaccgtggcccgcagggatcggatgccaatggtgatggtgaccagggccatgagaatgccgcattgccagacccgcaggagtcggacccagcagacatgaacgctctcgctctgggtccctcagaatatgactctctgcctgaaaatagcgagacaggaggaaatgagtctcaaccagacagccaggaagacccccgagaagtacttaaaaaaacattggaattctgcttatctagggagaaccttgctagtgacatgtatcttatatcacagatggatagtgaccagtatgtgccaatcacaacggtggctaacctcgaccacatcaagaagctcagcactgatgtggacttgattgtggaagtgctaagatctttacctttagtccaagtggatgaaaagggagaaaaagtaaggccaaatcaaaatcgctgcatagtaatattgcgtgaaatatctgaatctacccccgtggaagaagtagaagcactatttaaaggagataatttaccaaaatttataaactgtgaatttgcatataatgataattggtttattacatttgaaacagaagctgatgcacaacaggcttacaaataccttcgagaagaagtcaaaacttttcaaggaaaaccaattaaggcacggataaaagcaaaggcaatagctataaacacatttttgccaaagaatggatttagacccctggacgtgagcctgtatgcccagcagcgctacgcgacgtcgttctacttccctcccatgtacagcccccagcagcagttccccctgtacagcctgatcactccccagacgtggtcagcaacgcacagctatcttgacccacccttggtaactccatttccaaatactggatttataaatgggtttacgtctccagcgttcaagcctgcggcgtctcctctgacttctctcagacagtatcctcctcgaagcaggaatcctagtaaatctcatctgcggcatgcgattcctagtgcagagaggggacctgggttattagaaagtccttcaatatttaacttcactgcagatcgattaattaatggtgtccggagtccacaaacaaggcaagcaggtcaaactagaacacggattcaaaacccttcagcatatgccaagagagaggctgggcctgggcgtgtggagccaggcagtctcgaatcctctcctggtttagggaggggaaggaagaattcctttggctaccggaagaaaagggaggagaagtttacaagcagccagacacagtctccaacgccaccaaagcctccgtcgccaagcttcgagctggggctgtccagcttccctccattacctggagctgccggcaatttgaagacagaggacttgtttgaaaacaggctatctagcttgataataggaccatccaaagaaaggaccctcagtgcagacgcaagcgtgaacacccttcctgtagtggtctccagagagccctcggtgccggcttcttgtgctgtatcagcaacgtacgagcgatccccctccccagctcatttacccgatgatcccaaggtggcggagaaacagagggaaacccacagtgtggacagacttccttccgccctcactgcgaccgcgtgtaaatcggtgcaggtgaacggagccgccacggaattgcgaaagcccagctacgcagagatttgtcagagaacgagtaaagagcctccttcttccccattgcaaccccaaaaagaacaaaagccaaacactgttggttgtgggaaggaggaaaagaagctggcagagcccgcagagagataccgggagcccccagccctcaagtccacacctggagcccccagagaccagaggcggccggcggggggccggccctcgccctcggccatggggaagcgtctcagccgagagcagagcactccccccaagtctcctcagtgaaaaccgtacgtctgggaggggtcgcagagcgctgtgttaaccacaaacgagacactctcccactcagtgcgagggcgagccgctggttaggagcttgcagtgtctgaggcctgtgggatcctcaagttggttttcttctgtgagttggattctccccctcttgaaaaaaaatcgatttttcaggatttaattaatacaaaccttattttaggttggtgcttaactggaggtgatgcataagtctgatttttttttccaagatagaaaaagcatttatcctaacaaattggtattttttattaagcctccatgtggctctgaatgcaagctatatatagtgagtttttctaaattaagggaactctgctttttttttttttttttaagtaactggtctgtaagtgcatatctctagaacgtccccgcagatgaatgagggccagtggccttggcagaggcaggtgtggcctcgtagaggcagtgctggccgcgccagggcatcagtgctgatgtgggagctgtgcttccacctaagccgttggtaggggactgtggcatttaagaatgtagagagcgcatcctttttgatctcctgggcggagtgaacctgcaggggccaccccagaaaccttggttctgatgcactgcaagcaagtaaccagcttctcactccagtttcaagtggctattatgtaatataaattcaaagcacattgtgaatagaacctacatgaaaacatacactttgttgcccactgacatgttaccagaagttgtaccatgatgttgttttgacccctgtgagctgatggccccggccctgctctgtgcacatttctgtccgtgttccccagcactctggttggagagagtccacatcttcagctccgtgtggacatctccctgtacctctgcatcagcacatggatttaagagttatgtaatcgtgagagaatggtgtttgtggtttttccccctctttggctggtggaggataaagttcctgctcttttacctccaagacgagggcctcattgattcacttccagaagtgctgcacttctgaagaacaaggatgcactaaagttagcaagtttataataaagttaaatataaattattttgttttaaaatgcctcaaatttttctttattctaagcagcaaacattaaaataagaatatttcctgctaaatgtaaccatacactttattccacaaaatgttatttaacaagactgagggttttttttaagaaaaaattatttccatccaatatttaaagacttgaattttatttaaacttgaaaatgactttgccttaacttttgtataagacagcttagagtccatggagcccggccctgggttggcgtgagtgggtcagagttactcagttactgcgtggatctcctgtcgctagttttactgagtaagcatactgtagtacaagagctagtagtagtttttgtaatataccttaaagatcttcaacagttgatcttttttcagaatgttggaaaatcctgtaaatgcaaatagtcaatactgtattaaatacgtgcacttggagtgtgcttcgcttgtacagttgtaaataatcagaacatatgaaaaaggtaccctacagagaaaattctgatacagattattgatatattataaatgttgctgttgagcgggatgtagataaactaaatgttgtggtttgaatattattttgatttgttgagattttcttttttctcttacatcggtgtgttgaactgattctgcctctttgctgcaaaagggaattggaaagtcttattaaaagcctccagatgttttcatactcttttaaaatgtatgtaaatgcatactaatcatatctaatgtgaaagagttttaaagtatatagagagcaaaaactggcaggatcgtaagtgaaggtgactagtaatctaatttaaatcacctgcagctaagcatgattgaccctgccagaggaaaacatgcctatttgaccatttcctttaaagcagttgccattattcaaatacagagaaatagccacagggctagtgtttttcaaatgcattttaaagaacatggggatttttttttgtagttgtcagttcactgaccaaaaaaaaaaaaaaaatcagaaataattgatctgtgaaacccaaactctcaatactcagaaagctgggaggcaacctcgaggcctgggcctacgagctgcatcttcgctacggaagggccagggcgccatcagccattcccaaaacacaaggcctgcccgtccgccagtgagtccttggtttttaataatgagaagtcctttcccccaaggtgtgagcattgcagcgcagtgtgtgtgtgtggttagagccagcttagtccttcactttgtcgaccgaagtgggagctcaacagctgcatgaggagggcagcgcgtgcattagccagtcgccactggagggctctgctgccctccggtcaatacactgtagttactgcctagccagcagcagtcttctgcatcaagaactgaaaccttgctcggaggtgatttttatagcatcctttttaattaaaggtgaaatacagattgctatataatgtctgaaaaaacctgatactacttcaagagtttctgctcagaagaaaatgagagttatcataataggaagctgtggcggtccatgccaactgtgctgtgtcacatacagcgatgagagtggctttcatactttttttttttttaagttaacaccctcctttacccccagcagtatctcaggttatagaatcagagatgcagcagtgacaaatggcattttaacttgtaaaatcgtgtgatgatgcttatcattttgaaatagaagaataaaaacctggtcccgtttcaccagacatgaatttcaagtggagtcgtcgttctctgagagtgagtgtcttgacattttcacccaggccctcctgtcatcacatcaccggctgtcactggcgggtggccgtaaacgtcctgcgttgctatattaggatctctgcagttcaggcttcaaaaccagttcagtgtatccgggcgacgggtagtggtggtgcatgcctgtctgtgtgccccgctggcgagctgtagttgcggcttgcgtgcctcgcggcccactacagggctgcagacaatcgaggcgagggcgctggccgccagcagctcacagcgcgggggtcatgtggtcgctcctcgagggtttcgtttttgttctgcttcattaagactggaatcaagcttacatgtaaactattggtaatttaagtttccttttgtgtcattcagtgtaaaactgtctaatttgaaaaaaaatgtaggttatgaaaataaagatttaggcactgttc

SEQ ID NO: 491 - protein, 751 aa, Homo sapiens
HPEVSITLLPVEPMTSDQDAKVVAEPQTQRVQEGKDSAHLMNGPISQTTSQTSSIPPLSQVPATKVSELNPNAEVWGAPVLHLEASSAADGVSAAWEEVAGHHADRGPQGSDANGDGDQGHENAALPDPQESDPADMNALALGPSEYDSLPENSETGGNESQPDSQEDPREVLKKTLEFCLSRENLASDMYLISQMDSDQYVPITTVANLDHIKKLSTDVDLIVEVLRSLPLVQVDEKGEKVRPNQNRCIVILREISESTPVEEVEALFKGDNLPKFINCEFAYNDNWFITFETEADAQQAYKYLREEVKTFQGKPIKARIKAKAIAINTFLPKNGFRPLDVSLYAQQRYATSFYFPPMYSPQQQFPLYSLITPQTWSATHSYLDPPLVTPFPNTGFINGFTSPAFKPAASPLTSLRQYPPRSRNPSKSHLRHAIPSAERGPGLLESPSIFNFTADRLINGVRSPQTRQAGQTRTRIQNPSAYAKREAGPGRVEPGSLESSPGLGRGRKNSFGYRKKREEKFTSSQTQSPTPPKPPSPSFELGLSSFPPLPGAAGNLKTEDLFENRLSSLIIGPSKERTLSADASVNTLPVVVSREPSVPASCAVSATYERSPSPAHLPDDPKVAEKQRETHSVDRLPSALTATACKSVQVNGAATELRKPSYAEICQRTSKEPPSSPLQPQKEQKPNTVGCGKEEKKLAEPAERYREPPALKSTPGAPRDQRRPAGGRPSPSAMGKRLSREQSTPPKSPQ

SEQ ID NO: 492 - DNA, 2528 bp, Homo sapiens
gagttccagcagtccgcgagctgccgtcggctccgcggggggggcgggccgggcaccccggggcgcggaggagcgctcctcgcttctctccttcccccctgccgcactccgccggaccctcccgccggcccgcgccgctgcactcgccctctcctctcgccccccggcaaactttcggcccctccccgcccctcgcccgttattcgtcgtggctcaagcccggccacgccgccccaagggctcctcccgacctcccggcctgccgctccggccactgcgggatccagaaacatgtcgaccacacttctgtccgccttctacgatgtcgacttcttgtgcaagacagagaaatccctggccaacctcaacctgaacaacatgctggacaagaaggcggtggggacgcctgtggccgccgcccccagctcgggcttcgcgccgggattcctccgacggcactcggccagcaacctgcatgcactcgcccaccccgcgcccagccccggcagctgctcgcccaagttcccgggcgccgctaacggcagcagctgcggcagcgcggcggccggcggtccgacctcctacggcacccttaaggagccgtcggggggcggcggcacagccctgctcaacaaggagaacaaattccgggaccgctcgtttagcgagaacggcgatcgcagccagcacctcctgcacctgcagcagcagcagaaggggggcggcggctcccagatcaactccacgcgctacaagaccgagctgtgccggcccttcgaggagagcggcacgtgcaagtacggcgaaaagtgccagttcgcgcatggcttccacgagctgcgcagcctgactcgccatccgaagtacaagaccgagctgtgccgcacctttcataccatcggcttctgcccctatgggccgcgctgccacttcatccacaacgcggacgagcggcggcccgcgccgtcggggggcgcctccggggacctgcgtgcctttggcacgcgcgatgcgttgcacctgggcttcccgcgggagccgcggcccaagttgcaccacagcctcagcttctcgggcttcccgtcgggccaccatcagcccccgggcggcctcgagtcgccgctgctgctcgacagccccacgtcgcgcacgccgccgccgccctcctgctcttcggcctcgtcctgctcctcctccgcctcctcctgttcctcggcctccgcggcctccacgccctcgggcgccccgacatgctgcgcctccgcggcggccgcggctgcggccgctctgctgtacggcaccgggggcgccgaggacctgctggcgccgggggccccgtgcgcggcctgctcgtcggcctcgtgcgccaacaacgccttcgccttcggtccggagctcagcagcctcatcacgccgctcgccatccagacccacaactttgccgccgtggccgccgccgcctactaccgcagtcagcagcagcagcagcagcagggcctggcgccccccgcgcagccgccggcgccgcccagcgcgaccctccccgccggggccgccgcacctccctcgccgcccttcagcttccagctgccgcgccgcctgtccgactcgcccgtgttcgacgcgccccccagccccccggactcgctgtcggaccgcgacagctacctaagcggctccctgagctccggcagcctcagcggctctgagtctcccagcctcgaccctggccgccgcctgccaatcttcagccgcctctccatctccgacgactgaggcaagagggcgccagtgaggaggaagggaaggcggttcagagatgttggaggacacccctcgccatctcgcccttgctgggggcacgggagtggggggggtgacatgggccctaggcagactgcaagcccgaccgagcacttggactcgaactctgtgccgggaggggcccccacccctcctttttcggtttcctcttgtctttttttttttatttttattacgaagtttcattctttttgagcaaaaaagtcgaactttttctgttgaacaaaatattcacaacagggcagttgtgatacgaatagaacaaaaaaaaaaaaaaaacacttaaactttgttaggactccgatgagtttgggacttcaggaaaaatcaacccagcaccagcagctaccaaccaccattccatctcttcacttgaacagcattagttaagtccagatgtgggaacccttctcttggaagaagttcctaattgtgtctcagaccggtgtaaacaaaccagccagccgccaccttgctaaacctataagctttttaaaatccaatatattctgccaagaatatgccttgatagttagccctcagcccataggtgttttttgttttttaacagaattatatatgtctgggggtgaaaaaacccttgcattccaaaggtccatactggttacttggtttcattgccaccacttagtggatgttcagtttagaaccattttgtctgctccctctggaagccttgcgca

SEQ ID NO: 493 - protein, 494 aa, Homo sapiens
MSTTLLSAFYDVDFLCKTEKSLANLNLNNMLDKKAVGTPVAAAPSSGFAPGFLRRHSASNLHALAHPAPSPGSCSPKFPGAANGSSCGSAAAGGPTSYGTLKEPSGGGGTALLNKENKFRDRSFSENGDRSQHLLHLQQQQKGGGGSQINSTRYKTELCRPFEESGTCKYGEKCQFAHGFHELRSLTRHPKYKTELCRTFHTIGFCPYGPRCHFIHNADERRPAPSGGASGDLRAFGTRDALHLGFPREPRPKLHHSLSFSGFPSGHHQPPGGLESPLLLDSPTSRTPPPPSCSSASSCSSSASSCSSASAASTPSGAPTCCASAAAAAAAALLYGTGGAEDLLAPGAPCAACSSASCANNAFAFGPELSSLITPLAIQTHNFAAVAAAAYYRSQQQQQQQGLAPPAQPPAPPSATLPAGAAAPPSPPFSFQLPRRLSDSPVFDAPPSPPDSLSDRDSYLSGSLSSGSLSGSESPSLDPGRRLPIFSRLSISDD

SEQ ID NO: 494 - DNA, 3111 bp, Homo sapiens
ggagtgcggggcgcccggcgccaggggagccgccacagccatggattgcaaagatagaccagcttttccagttaagaagttaatacaagcccgtctgccgtttaagcgcctgaatcttgtcccaaaggggaaagccgatgacatgtcagacgatcagggtacttctgtgcaaagtaaaagccccgatttagaggcctctttggacaccttggaaaacaactgtcatgtgggttctgacatagactttagaccgaaacttgtcaacgggaagggtcccttagataactttttaagaaatagaatcgaaaccagtattggccagagcacagtcatcattgatttgacagaggactcgaatgagcagccagacagtcttgtggaccacaataaactaaattctgaagcctctccctccagggaggcaataaatggccagcgagaagacactggggatcagcaggggttgttgaaggccattcagaacgacaagttggcatttcctggagagaccctttcagacattccttgcaaaacagaggaggagggtgttggctgtggaggtgcagggaggagaggcgactcccaggaatgttcgccacggagctgcccggagctgacgagtggcccgagaatgtgccccagaaaggagcaggacagttggagtgaagctgggggcatcctgttcaaagggaaggtgcctatggtggtcttgcaggacatcttggctgtgagaccaccgcaaatcaagtcccttccagccacaccccaaggcaagaacatgacccctgagagtgaggtgctggaatctttccccgaagaagactctgtactcagccattcgtccctgagctctccctcttccaccagctcgcccgaggggccgcctgctcccccaaagcagcacagcagtaccagtcccttccccacctccacgcccctccgcagaataactaagaaattcgtcaaaggctctacagagaagaacaagctcagactgcaaagagatcaggagcgtctgggcaagcagctcaagttacgtgcagaaagggaagaaaaggagaagctgaaagaggaggccaagcgggccaaggaggaggccaagaagaagaaggaggaagagaaggagcttaaggaaaaggagaggcgggagaagcgggagaaggatgagaaggagaaggcggagaagcagcggctcaaggaggagcggcgcaaggagagacaggaagccctggaggctaaacttgaggaaaaaaggaaaaaggaagaagagaaacggttaagagaagaagagaagcgcattaaagcagagaaggccgaaatcacgaggttcttccagaaaccaaagactccacaggcccccaagaccctggccggctcctgtgggaagtttgccccctttgaaattaaagagcacatggtcctggcccctcggcgtcggaccgctttccatccagacctctgcagtcagctggaccagctcctccagcagcagagcggcgagttctccttcttgaaagacctcaaaggccggcagcccctgaggtccggacccacgcacgtttccacccggaatgcagatatttttaacagtgatgtcgtcatcgtggagcgtgggaagggcgacggtgttcccgagaggaggaagtttggcaggatgaagctcctgcagttctgtgagaaccaccggcctgcctactggggtacctggaataagaagacggcactcatccgcgcgcgagacccctgggcccaggacacgaagctcctggactatgaggtggacagtgatgaggagtgggaagaagaggagcctggggagtccctgtcccacagtgagggggatgatgatgacgacatgggagaggatgaagatgaggacgatggtttctttgtgccccatgggtacctgtctgaggacgaaggtgtgacagaggagtgtgccgaccctgagaaccataaggtccgccagaaactgaaggccaaggagtgggacgagttcctggctaaggggaagcgctttcgcgtcctgcaacctgtgaagatcggctgcgtgtgggcggctgacagagactgcgcaggcgatgacctgaaggtactgcagcagttcgcagcctgcttcctggagaccctgccggcccaggaggagcagacgcccaaggcctccaagcgggagaggagagacgagcagatcctggcccagctgctgccgctcctgcacggcaatgtgaacgggagcaaggtcatcatccgggagttccaggagcactgccgccggggactgctcagcaaccacaccggcagcccgcggacgccctccaccacctacctgcacacccccacccccagcgaggatgccgccatcccctctaagtcccggctcaagcggctcatttccgagaactcagtgtatgagaagcggcctgacttcaggatgtgctggtacgtgcacccgcaggtgctacagagcttccagcaggagcacctgcccgtgccgtgccagtggagctatgtgacatcggtgccctcggcccccaaagaggacagtggcagcgtcccctccacggggcccagccagggcactcccatctcgctgaagaggaagtcagcgggcagcatgtgcatcacccaattcatgaagaagcgcaggcacgacggccagattggtgctgaagacatggacggcttccaggcagacacggaggaggaggaagaggaggagggcgactgtatgatcgtggatgtcccggatgctgtggaggtccaagccccgtgtggagccgcttccggagctgggggtggtgtgggggtggacaccggcaaggccaccctgaccgcgagcccactgggtgcatcctgagagcaggggtgacgtatgtagaacgcttagggtgtcctccccacagagcagatacttgaaccgactcaattcctgtgtaaagagcactttgtcctgcttcacggacctccccaaagtgtgcagagttctatataggatgctggattagttcctttgatatttgtaaaaattcccccaagagccgcatatgaatctgccctttaataaagcattattgagattgctggcctattggggaagctgcgggcacagga

SEQ ID NO: 495 - protein, 938 aa, Homo sapiens
MDCKDRPAFPVKKLIQARLPFKRLNLVPKGKADDMSDDQGTSVQSKSPDLEASLDTLENNCHVGSDIDFRPKLVNGKGPLDNFLRNRIETSIGQSTVIIDLTEDSNEQPDSLVDHNKLNSEASPSREAINGQREDTGDQQGLLKAIQNDKLAFPGETLSDIPCKTEEEGVGCGGAGRRGDSQECSPRSCPELTSGPRMCPRKEQDSWSEAGGILFKGKVPMVVLQDILAVRPPQIKSLPATPQGKNMTPESEVLESFPEEDSVLSHSSLSSPSSTSSPEGPPAPPKQHSSTSPFPTSTPLRRITKKFVKGSTEKNKLRLQRDQERLGKQLKLRAEREEKEKLKEEAKRAKEEAKKKKEEEKELKEKERREKREKDEKEKAEKQRLKEERRKERQEALEAKLEEKRKKEEEKRLREEEKRIKAEKAEITRFFQKPKTPQAPKTLAGSCGKFAPFEIKEHMVLAPRRRTAFHPDLCSQLDQLLQQQSGEFSFLKDLKGRQPLRSGPTHVSTRNADIFNSDVVIVERGKGDGVPERRKFGRMKLLQFCENHRPAYWGTWNKKTALIRARDPWAQDTKLLDYEVDSDEEWEEEEPGESLSHSEGDDDDDMGEDEDEDDGFFVPHGYLSEDEGVTEECADPENHKVRQKLKAKEWDEFLAKGKRFRVLQPVKIGCVWAADRDCAGDDLKVLQQFAACFLETLPAQEEQTPKASKRERRDEQILAQLLPLLHGNVNGSKVIIREFQEHCRRGLLSNHTGSPRTPSTTYLHTPTPSEDAAIPSKSRLKRLISENSVYEKRPDFRMCWYVHPQVLQSFQQEHLPVPCQWSYVTSVPSAPKEDSGSVPSTGPSQGTPISLKRKSAGSMCITQFMKKRRHDGQIGAEDMDGFQADTEEEEEEEGDCMIVDVPDAVEVQAPCGAASGAGGGVGVDTGKATLTASPLGAS

SEQ ID NO: 496 - DNA, 1824 bp, Homo sapiens
gacccagacatggagctgcgggaagaagcctggtctccggggccgctggattctgaggaccagcagatggccagtcacgagaacccagtggacatcctcatcatggatgatgacgacgtccccagctggcctcccaccaagctgtccccgccccagtctgcgcccccagccggcccgcctccccggccgcggccgcccgccccctacatctgcaacgagtgtggcaagagctttagccactggtccaagctgacgcggcaccagcgcacgcacaccggcgagcggcccaacgcctgcgccgactgcggcaagaccttctcgcagagctcgcacctggtgcagcaccggcgcatccacacgggcgagaagccctacgcctgcttggagtgcggcaagcgcttcagctggagctccaacctcatgcagcaccagcgcatccacacgggcgagaagccctacacctgccccgactgcggccgcagcttcactcagagcaagagcctggccaagcaccggcgctcgcacagcggcctcaagcccttcgtgtgcccgcgctgcggccgcggcttcagccagcccaagagcctcgcgcgtcacctgcggctgcacccggagctgtcggggcctggcgtggcggccaaggtgctggcggctagcgtccggcgggccaaggggcccgaagaggcggtggcggcggacggcgagatcgccatccccgtgggcgatggcgagggcatcatcgtggtgggcgcgccgggcgagggggccgcggccgcggcagccatggcgggcgcgggggcaaaggccgcggggccccggtcgcggcgcgccccggcccccaagccgtacgtgtgtctggagtgcgggaagggcttcgggcacggggccgggctcctggcgcaccagcgggcccagcacggggacgggctcggggcggcggggggcgaggagccggcccacatctgcgtggagtgcggggagggcttcgtgcagggcgccgcgctccggagacacaagaagatccacgcggtgggcgcgccctcggtctgcagcagctgcggacagagctactaccgcgcgggcggggaggaggaggacgacgacgacgaggccgcgggcgggcggtgccccgagtgccgcgctggggagggccggtaggggaggggcccgggggggggcgggcagggcccctcgggcttggcgggagcgacgacgtgcaagaccaagagacccagggagaagcggacggggtgcgatggaccccgcggcatccccggctccccgccctcctctgtccctgcgccgtccgtgggggggcactggggcgtattagggcccgttcacttctccgcctcgagactctgccccctcagcctggcccgcccttcctaagttatcggcctgcgagccggagagacaatggagagaactgcagaggccgagtggcgaccaggccccaagcggaaggccattttccctgctcttcctcagttgtccggggcgggggtggggggtgctgcgaggaatggagaaaccaggccctttagaggatcccagagagggaagagaaccaggggcccttttctcttttagaattttcttttaatcagcccaccttttgactccccgcccgccccaatccattatttttttctgccttccgggtcccatccttagagctcgagtcgttccttcccctcctggattccgggtaggagaggcagcgccgcaggaggcgggtgcccgtttgtcccaggcctgggcgtggtggaggaaggggtgctggaacaataaacggcactatccaaaaaaaaaaaaaaaaaa

SEQ ID NO: 497 - protein, 885 aa, Homo sapiens
  misc_feature (2)..(2): Xaa can be any naturally occurring amino acid
  misc_feature (4)..(4): Xaa can be any naturally occurring amino acid
  misc_feature (306)..(306): Xaa can be any naturally occurring amino acid
PXVXSKHLKDSMCNEFSQIFQLCQFVMENSQNAPLVHATLETLLRFLNWIPLGYIFETKLISTLIYKFLNVPMFRNVSLKCLTEIAGVSVSQYEEQFVTLFTLTMMQLKQMLPLNTNIRLAYSNGKDDEQNFIQNLSLFLCTFLKEHDQLIEKRLNLRETLMEALHYMLLVSEVEETEIFKICLEYWNHLAAELYRESPFSTSASPLLSGSQHFDVPPRRQLYLPMLFKVRLLMVSRMAKPEEVLVVENDQGEVVREFMKDTDSINLYKNMRETLVYLTHLDYVDTERIMTEKLHNQVNGTEWSWXNLNTLCWAIGSISGAMHEEDEKRFLVTVIKDLLGLCEQKRGKDNKAIIASNIMYIVGQYPRFLRAHWKFLKTVVNKLFEFMHETHDGVQDMACDTFIKIAQKCRRHFVQVQVGEVMPFIDEILNNINTIICDLQPQQVHTFYEAVGYMIGAQTDQTVQEHLIEKYMLLPNQVWDSIIQQATKNVDILKDPETVKQLGSILKTNVRACKAVGHPFVIQLGRIYLDMLNVYKCLSENISAAIQANGEMVTKQPLIRSMRTVKRETLKLISGWVSRSNDPQMVAENFVPPLLDAVLIDYQRNVPAAREPEVLSTMAIIVNKLGGHITAEIPQIFDAVFECTLNMINKDFEEYPEHRTNFFLLLQAVNSHCFPAFLAIPPTQFKLVLDSIIWAFKHTMRNVADTGLQILFTLLQNVAQEEAAAQSFYQTYFCDILQHIFSVVTDTSHTAGLTMHASILAYMFNLVEEGKISTSLNPGNPVNNQIFLQEYVANLLKSAFPHLQDAQVKLFVTGLFSLNQDIPAFKEHLRDFLVQIKEFAGEDTSDLFLEEREIALRQADEEKHKRQMSVPGIFNPHEIPEEMCD

SEQ ID NO: 498 - DNA, 1444 bp, Homo sapiens
ggggggtctgcgtcttcccgagccagtgtgctgagctctccgcgtcgcctctgtcgcccgcgcctggcctaccgcggcactcccggctgcacgctctgcttggcctcgccatgccggtggacctcagcaagtggtccgggcccttgagcctgcaagaagtggacgagcagccgcagcacccgctgcatgtcacctacgccggggcggcggtggacgagctgggcaaagtgctgacgcccacccaggttaagaatagacccaccagcatttcgtgggatggtcttgattcagggaagctctacaccttggtcctgacagacccggatgctcccagcaggaaggatcccaaatacagagaatggcatcatttcctggtggtcaacatgaagggcaatgacatcagcagtggcacagtcctctccgattatgtgggctcggggcctcccaagggcacaggcctccaccgctatgtctggctggtttacgagcaggacaggccgctaaagtgtgacgagcccatcctcagcaaccgatctggagaccaccgtggcaaattcaaggtggcgtccttccgtaaaaagtatgagctcagggccccggtggctggcacgtgttaccaggccgagtgggatgactatgtgcccaaactgtacgagcagctgtctgggaagtagggggttagcttggggacctgaactgtcctggaggccccaagccatgttccccagttcagtgttgcatgtataatagatttctcctcttcctgccccccttggcatgggtgagacctgaccagtcagatggtagttgagggtgacttttcctgctgcctggcctttataattttactcactcactctgatttatgttttgatcaaatttgaacttcattttggggggtattttggtactgtgatggggtcatcaaattattaatctgaaaatagcaacccagaatgtaaaaaagaaaaaactggggggaaaaagaccaggtctacagtgatagagcaaagcatcaaagaatctttaagggaggtttaaaaaaaaaaaaaaaaaaaaagattggttgcctctgcctttgtgatcctgagtccagaatggtacacaatgtgattttatggtgatgtcactcacctagacaaccagaggctggcattgaggctaacctccaacacagtgcatctcagatgcctcagtaggcatcagtatgtcactctggtccctttaaagagcaatcctggaagaagcaggagggagggtggctttgctgttgttgggacatggcaatctagaccggtagcagcgcctcgctgacagcttgggaggaaacctgagatctgtgttttttaaattgatcgttcttcatgggggtaagaaaagctggtctggagttgctgaatgttgcattaattgtgctgtttgcttgtagttgaataaaaacccg

SEQ ID NO: 499 - protein, 187 aa, Homo sapiens
MPVDLSKWSGPLSLQEVDEQPQHPLHVTYAGAAVDELGKVLTPTQVKNRPTSISWDGLDSGKLYTLVLTDPDAPSRKDPKYREWHHFLVVNMKGNDISSGTVLSDYVGSGPPKGTGLHRYVWLVYEQDRPLKCDEPILSNRSGDHRGKFKVASFRKKYELRAPVAGTCYQAEWDDYVPKLYEQLSGK

SEQ ID NO: 500 - DNA, 3509 bp, Homo sapiens
cctgcggctggggctgggggcggcggcggcggcgacggggcggcgggcggcgcggggcggtccggcgggttcaaagaggaaaacatggcggaaaacaaaggcggcggcgaggctgagagcggcggcgggggcagcggcagcgcgccggtaactgccggggccgccgggcccgccgcgcaggaggcggagccgcctctcaccgcggtgctggtggaggaggaggaggaggaaggcggcagggccggcgctgagggcggcgcggccgggcccgacgacgggggggtggccgcggcctcctcgggctcggcccaggctgcttcatctcctgcggcctcagtgggcactggagttgccgggggcgcagtatcgacgccggctccagctccagcctcggctcccgctccgggtccctcggcagggccgcctcctggaccgccagcctcgctcctggacacctgcgccgtgtgtcagcagagcttgcagagccggcgtgaggcggagcccaagctgctgccctgtcttcactccttctgcctgcgctgcctgcccgagccggagcgccagctcagcgtgcccatcccggggggcagcaacggcgacatccagcaagttggtgtaatacggtgcccagtatgccgccaagaatgcagacagatagaccttgtggataattattttgtgaaagacacatctgaagctcctagcagttctgatgaaaaatcagaacaggtatgtactagttgtgaagacaatgcaagtgcagttggcttttgtgtagaatgtggagagtggctatgtaagacatgtatcgaagcacatcaaagagtaaaatttactaaagatcacttgatcaggaagaaagaagatgtctcagagtctgttggagcatctggtcaacgccctgttttctgccctgtacacaaacaagaacagttgaaacttttctgtgaaacatgtgatagattgacatgtagagactgtcagctattggaacacaaagaacataggtatcagtttttggaagaagcttttcaaaatcagaagggtgcaattgagaatctactggcgaaacttcttgagaagaagaattatgttcattttgcagctactcaggtgcagaataggataaaagaagtaaatgagactaacaaacgtgtagaacaggaaattaaagtggccattttcacccttatcaatgaaattaataagaaaggaaaatctctcttacaacagctagagaatgttacaaaggaaagacagatgaagttactacagcagcagaatgacatcacaggcctttcccggcaggtgaagcatgttatgaacttcacaaattgggcaattgcaagtggcagcagcacagcactactatacagcaagcgactgattactttccagttgcgtcatattttgaaagcacggtgtgatcctgtccctgctgctaatggagcaatacgtttccattgtgatcccaccttctgggcaaagaatgtagtcaatttaggtaatctagtaatagagagtaaaccagctcctggttatactcctaatgttgtagttgggcaagttcctccagggacaaaccacattagtaaaacccctggacagattaacttagcacagcttcgactccagcacatgcaacaacaagtatatgcacagaaacatcagcagttgcaacagatgaggatgcagcaaccaccagcacctgtaccaactacaacaacaacaacacaacagcatcctagacaagcagcccctcagatgttacaacaacagcctcctcgattgatcagtgtgcaaacaatgcaaagaggcaacatgaactgtggagcttttcaagcccatcagatgagactggctcagaatgctgccagaataccagggatacccaggcacagcggccctcaatattccatgatgcagccacacctccaaagacaacactcaaacccagggcatgctggaccctttcccgtagtatcggtacacaacaccacaatcaacccaacgagccctactacagcaactatggcaaatgcaaaccgaggtcccaccagcccatctgttacagcaatagagctaatcccctcagttaccaatccagaaaaccttccatcgctgccagatattccacccatacagttggaagatgctggctcaagtagtttagataatctactaagtagatacatctcaggcagtcacctacccccacagcctacaagcaccatgaatccttctccaggtccctctgccctttctccgggatcatcaggtttatccaattctcacacacctgtgagacccccaagtacttctagtactggcagtcgaggcagctgtgggtcatcaggaagaactgctgagaagacaagtcttagtttcaaatctgatcaggtgaaggtcaagcaagaacctgggactgaagatgaaatatgtagcttttcaggaggtgtaaaacaagaaaaaacagaggatggcaggaggagtgcttgcatgttgagcagtcctgagagtagcttgacaccacctctctcaaccaacctgcatctagaaagtgaattggatgcattggcaagcctggaaaaccatgtgaaaactgaacctgcagatatgaatgaaagctgcaaacagtcagggctcagcagccttgttaatggaaagtccccaattcgaagcctcatgcacaggtcggcaaggattggaggagatggcaacaataaagatgatgacccaaatgaagactggtgtgctgtctgccaaaacggaggagatctcttgtgctgcgaaaaatgtccaaaggtctttcatctaacttgtcatgttccaacactacttagctttccaagtggggactggatatgcacattttgtagagatattggaaagccagaagttgaatatgattgtgataatttgcaacatagtaagaaggggaaaactgcgcaggggttaagccccgtggaccaaaggaaatgtgaacgtcttctgctttacctctattgccatgaattaagtattgaattccaggagcctgttcctgcttcgataccaaactactataaaattataaagaaaccaatggatttatccaccgtgaaaaagaagcttcagaaaaaacattcccaacactaccaaatcccggatgactttgtggccgatgtccgtttgatcttcaagaactgtgaaaggtttaatgaaatgatgaaagttgttcaagtttatgcagacacacaagagattaatttgaaggctgattcagaagtagctcaggcagggaaagcagttgcattgtactttgaagataaactcacagagatctactcagacaggaccttcgcacctttgccagagtttgagcaggaagaggatgatggtgaggtaactgaggactctgatgaagactttatacagccccgcagaaaacgcctaaagtcagatgagagaccagtacatataaagtaaaatgacatggatttaaatgaattgtttaaaaaaaaaaaaaa

SEQ ID NO: 501 - protein, 1127 aa, Homo sapiens
MAENKGGGEAESGGGGSGSAPVTAGAAGPAAQEAEPPLTAVLVEEEEEEGGRAGAEGGAAGPDDGGVAAASSGSAQAASSPAASVGTGVAGGAVSTPAPAPASAPAPGPSAGPPPGPPASLLDTCAVCQQSLQSRREAEPKLLPCLHSFCLRCLPEPERQLSVPIPGGSNGDIQQVGVIRCPVCRQECRQIDLVDNYFVKDTSEAPSSSDEKSEQVCTSCEDNASAVGFCVECGEWLCKTCIEAHQRVKFTKDHLIRKKEDVSESVGASGQRPVFCPVHKQEQLKLFCETCDRLTCRDCQLLEHKEHRYQFLEEAFQNQKGAIENLLAKLLEKKNYVHFAATQVQNRIKEVNETNKRVEQEIKVAIFTLINEINKKGKSLLQQLENVTKERQMKLLQQQNDITGLSRQVKHVMNFTNWAIASGSSTALLYSKRLITFQLRHILKARCDPVPAANGAIRFHCDPTFWAKNVVNLGNLVIESKPAPGYTPNVVVGQVPPGTNHISKTPGQINLAQLRLQHMQQQVYAQKHQQLQQMRMQQPPAPVPTTTTTTQQHPRQAAPQMLQQQPPRLISVQTMQRGNMNCGAFQAHQMRLAQNAARIPGIPRHSGPQYSMMQPHLQRQHSNPGHAGPFPVVSVHNTTINPTSPTTATMANANRGPTSPSVTAIELIPSVTNPENLPSLPDIPPIQLEDAGSSSLDNLLSRYISGSHLPPQPTSTMNPSPGPSALSPGSSGLSNSHTPVRPPSTSSTGSRGSCGSSGRTAEKTSLSFKSDQVKVKQEPGTEDEICSFSGGVKQEKTEDGRRSACMLSSPESSLTPPLSTNLHLESELDALASLENHVKTEPADMNESCKQSGLSSLVNGKSPIRSLMHRSARIGGDGNNKDDDPNEDWCAVCQNGGDLLCCEKCPKVFHLTCHVPTLLSFPSGDWICTFCRDIGKPEVEYDCDNLQHSKKGKTAQGLSPVDQRKCERLLLYLYCHELSIEFQEPVPASIPNYYKIIKKPMDLSTVKKKLQKKHSQHYQIPDDFVADVRLIFKNCERFNEMMKVVQVYADTQEINLKADSEVAQAGKAVALYFEDKLTEIYSDRTFAPLPEFEQEEDDGEVTEDSDEDFIQPRRKRLKSDERPVHIK

SEQ ID NO: 502 - DNA, 3458 bp, Homo sapiens
cctgcggctggggctgggggcggcggcggcggcgacggggcggcgggcggcgcggggcggtccggcgggttcaaagaggaaaacatggcggaaaacaaaggcggcggcgaggctgagagcggcggcgggggcagcggcagcgcgccggtaactgccggggccgccgggcccgccgcgcaggaggcggagccgcctctcaccgcggtgctggtggaggaggaggaggaggaaggcggcagggccggcgctgagggcggcgcggccgggcccgacgacgggggggtggccgcggcctcctcgggctcggcccaggctgcttcatctcctgcggcctcagtgggcactggagttgccgggggcgcagtatcgacgccggctccagctccagcctcggctcccgctccgggtccctcggcagggccgcctcctggaccgccagcctcgctcctggacacctgcgccgtgtgtcagcagagcttgcagagccggcgtgaggcggagcccaagctgctgccctgtcttcactccttctgcctgcgctgcctgcccgagccggagcgccagctcagcgtgcccatcccggggggcagcaacggcgacatccagcaagttggtgtaatacggtgcccagtatgccgccaagaatgcagacagatagaccttgtggataattattttgtgaaagacacatctgaagctcctagcagttctgatgaaaaatcagaacaggtatgtactagttgtgaagacaatgcaagtgcagttggcttttgtgtagaatgtggagagtggctatgtaagacatgtatcgaagcacatcaaagagtaaaatttactaaagatcacttgatcaggaagaaagaagatgtctcagagtctgttggagcatctggtcaacgccctgttttctgccctgtacacaaacaagaacagttgaaacttttctgtgaaacatgtgatagattgacatgtagagactgtcagctattggaacacaaagaacataggtatcagtttttggaagaagcttttcaaaatcagaagggtgcaattgagaatctactggcgaaacttcttgagaagaagaattatgttcattttgcagctactcaggtgcagaataggataaaagaagtaaatgagactaacaaacgtgtagaacaggaaattaaagtggccattttcacccttatcaatgaaattaataagaaaggaaaatctctcttacaacagctagagaatgttacaaaggaaagacagatgaagttactacagcagcagaatgacatcacaggcctttcccggcaggtgaagcatgttatgaacttcacaaattgggcaattgcaagtggcagcagcacagcactactatacagcaagcgactgattactttccagttgcgtcatattttgaaagcacggtgtgatcctgtccctgctgctaatggagcaatacgtttccattgtgatcccaccttctgggcaaagaatgtagtcaatttaggtaatctagtaatagagagtaaaccagctcctggttatactcctaatgttgtagttgggcaagttcctccagggacaaaccacattagtaaaacccctggacagattaacttagcacagcttcgactccagcacatgcaacaacaagtatatgcacagaaacatcagcagttgcaacagatgaggatgcagcaaccaccagcacctgtaccaactacaacaacaacaacacaacagcatcctagacaagcagcccctcagatgttacaacaacagcctcctcgattgatcagtgtgcaaacaatgcaaagaggcaacatgaactgtggagcttttcaagcccatcagatgagactggctcagaatgctgccagaataccagggatacccaggcacagcggccctcaatattccatgatgcagccacacctccaaagacaacactcaaacccagggcatgctggaccctttcccgtagtatcggtacacaacaccacaatcaacccaacgagccctactacagcaactatggcaaatgcaaaccgaggtcccaccagcccatctgttacagcaatagagctaatcccctcagttaccaatccagaaaaccttccatcgctgccagatattccacccatacagttggaagatgctggctcaagtagtttagataatctactaagtagatacatctcaggcagtcacctacccccacagcctacaagcaccatgaatccttctccaggtccctctgccctttctccgggatcatcaggtttatccaattctcacacacctgtgagacccccaagtacttctagtactggcagtcgaggcagctgtgggtcatcaggaagaactgctgagaagacaagtcttagtttcaaatctgatcaggtgaaggtcaagcaagaacctgggactgaagatgaaatatgtagcttttcaggaggtgtaaaacaagaaaaaacagaggatggcaggaggagtgcttgcatgttgagcagtcctgagagtagcttgacaccacctctctcaaccaacctgcatctagaaagtgaattggatgcattggcaagcctggaaaaccatgtgaaaactgaacctgcagatatgaatgaaagctgcaaacagtcagggctcagcagccttgttaatggaaagtccccaattcgaagcctcatgcacaggtcggcaaggattggaggagatggcaacaataaagatgatgacccaaatgaagactggtgtgctgtctgccaaaacggaggagatctcttgtgctgcgaaaaatgtccaaaggtctttcatctaacttgtcatgttccaacactacttagctttccaagtggggactggatatgcacattttgtagagatattggaaagccagaagttgaatatgattgtgataatttgcaacatagtaagaaggggaaaactgcgcaggggttaagccccgtggaccaaaggaaatgtgaacgtcttctgctttacctctattgccatgaattaagtattgaattccaggagcctgttcctgcttcgataccaaactactataaaattataaagaaaccaatggatttatccaccgtgaaaaagaagcttcagaaaaaacattcccaacactaccaaatcccggatgactttgtggccgatgtccgtttgatcttcaagaactgtgaaaggtttaatgaagctgattcagaagtagctcaggcagggaaagcagttgcattgtactttgaagataaactcacagagatctactcagacaggaccttcgcacctttgccagagtttgagcaggaagaggatgatggtgaggtaactgaggactctgatgaagactttatacagccccgcagaaaacgcctaaagtcagatgagagaccagtacatataaagtaaaatgacatggatttaaatgaattgtttaaaaaaaaaaaaaa

SEQ ID NO: 503 - protein, 1110 aa, Homo sapiens
MAENKGGGEAESGGGGSGSAPVTAGAAGPAAQEAEPPLTAVLVEEEEEEGGRAGAEGGAAGPDDGGVAAASSGSAQAASSPAASVGTGVAGGAVSTPAPAPASAPAPGPSAGPPPGPPASLLDTCAVCQQSLQSRREAEPKLLPCLHSFCLRCLPEPERQLSVPIPGGSNGDIQQVGVIRCPVCRQECRQIDLVDNYFVKDTSEAPSSSDEKSEQVCTSCEDNASAVGFCVECGEWLCKTCIEAHQRVKFTKDHLIRKKEDVSESVGASGQRPVFCPVHKQEQLKLFCETCDRLTCRDCQLLEHKEHRYQFLEEAFQNQKGAIENLLAKLLEKKNYVHFAATQVQNRIKEVNETNKRVEQEIKVAIFTLINEINKKGKSLLQQLENVTKERQMKLLQQQNDITGLSRQVKHVMNFTNWAIASGSSTALLYSKRLITFQLRHILKARCDPVPAANGAIRFHCDPTFWAKNVVNLGNLVIESKPAPGYTPNVVVGQVPPGTNHISKTPGQINLAQLRLQHMQQQVYAQKHQQLQQMRMQQPPAPVPTTTTTTQQHPRQAAPQMLQQQPPRLISVQTMQRGNMNCGAFQAHQMRLAQNAARIPGIPRHSGPQYSMMQPHLQRQHSNPGHAGPFPVVSVHNTTINPTSPTTATMANANRGPTSPSVTAIELIPSVTNPENLPSLPDIPPIQLEDAGSSSLDNLLSRYISGSHLPPQPTSTMNPSPGPSALSPGSSGLSNSHTPVRPPSTSSTGSRGSCGSSGRTAEKTSLSFKSDQVKVKQEPGTEDEICSFSGGVKQEKTEDGRRSACMLSSPESSLTPPLSTNLHLESELDALASLENHVKTEPADMNESCKQSGLSSLVNGKSPIRSLMHRSARIGGDGNNKDDDPNEDWCAVCQNGGDLLCCEKCPKVFHLTCHVPTLLSFPSGDWICTFCRDIGKPEVEYDCDNLQHSKKGKTAQGLSPVDQRKCERLLLYLYCHELSIEFQEPVPASIPNYYKIIKKPMDLSTVKKKLQKKHSQHYQIPDDFVADVRLIFKNCERFNEADSEVAQAGKAVALYFEDKLTEIYSDRTFAPLPEFEQEEDDGEVTEDSDEDFIQPRRKRLKSDERPVHIK

SEQ ID NO: 504 - DNA, 3226 bp, Homo sapiens
cctcagggttggagacttcggggccaagatggcgacgggaacgggcaaacacaagctgctaagcactggccccacagagccatggtccatccgagagaagctatgtttagcatcttctgtcatgagaagtggcgatcaaaattgggtatcagttagcagagcaatcaagccctttgcagaacctggccgccctccagactggttctctcaaaaacattgtgcttcccagtactcggagcttttagagaccactgagacaccaaaacggaaacgaggtgaaaagggagaagtggtggaaactgttgaagatgttattgttcggaaattgactgctgagcgagttgaagaactaaagaaagtgataaaggaaacccaggagagatatagacggctaaagagagatgcagaactaattcaagctggacacatggacagcagactggatgagctttgcaatgacattgcaacgaaaaagaaattggaagaagaggaggctgaagtaaagaggaaggctacagatgctgcataccaggctcgtcaagcagtaaaaacacccccccggaggttacccactgtgatggttcgctctcctatagattctgcctccccaggaggtgattatccacttggggacttgactccaaccactatggaagaggctacctctggggtaacccccgggactttgccgagtaccccagtcacctcgtttcctgggattcctgacacccttcctccaggctctgcacccttagaagcccccatgaccccagtaacagatgattcaccccagaaaaagatgcttggacagaaagcaactccacccccctcccctctgctgtcagagctcttgaagaagggcagcctcctgcctactagccccagactggtcaatgagagtgaaatggctgtggcttctggccacctgaacagtacaggtgtcctcctggaggtaggcggggtccttcccatgatacatggtggggagatacagcaaacacccaatactgttgcagcctcccctgctgcatcaggtgctcccactctttcccggcttttagaagctggtcctacacagttcaccacacctcttgcttccttcactactgttgccagtgagcctccagttaaacttgtgccaccccctgtagagtctgtgtcccaagctaccattgtcatgatgcctgcgctgccagcaccatcctctgctccggctgtctccactactgaaagtgtagctccagtgagtcaacccgacaactgtgttcccatggaggctgtgggggatccacatactgtgactgtttccatggacagcagtgaaatatccatgatcatcaattctatcaaagaagagtgttttcgatcaggggtagcagaggctcctgttggatcaaaggctcccagcatagatgggaaggaagaattagatctggctgagaagatggatattgctgtgtcttacacaggtgaagagctggattttgagactgttggagacatcattgccatcattgaggacaaggtagatgatcatcctgaagtgctggatgtggcagcagtggaagcagcactgtcattttgtgaagaaaatgatgatcctcagtccctgcctggcccctgggagcatcctatccagcaggagcgggacaagccagtacctctccctgcaccagaaatgacggtcaagcaagagagactggactttgaggaaacggaaaacaagggaatacatgaactggtggacatcagggagcccagtgcagagatcaaggtggaacctgcagaaccagagccagtcatttcaggagccgaaatagtagctggagttgttccagccacaagtatggagccaccagaactcaggagtcaggacttagatgaggaactgggaagtactgcagctggagagattgttgaagcagatgttgccattgggaaaggcgatgagactccacttacaaatgtgaagacagaggcatcccctgaaagcatgttgtctccatcacatggctcaaatcccattgaagatcctttagaggcagagactcagcacaagtttgaaatgtcagactcattgaaagaagaatcagggactatttttggaagccagataaaggatgccccaggtgaggatgaggaggaagatggtgtcagtgaagcggccagcctagaggagcctaaggaagaggatcaaggagaaggctacttgtcagaaatggataatgaacctcctgtgagcgagagtgatgatggcttcagcatacacaatgctacactgcagtcacacacactggcagactccatccccagcagccctgcttcttcacagttctctgtctgtagtgaggatcaggaagctattcaggcacagaaaatttggaagaaagccatcatgcttgtatggagagctgcagctaatcataggtatgccaatgtcttcctgcagcctgttacagatgacatagcacctggctaccacagcattgtgcagaggcctatggatttgtcaactattaagaaaaacatagaaaatggactgatccgaagcacagctgaatttcagcgtgacattatgctgatgtttcagaatgctgtaatgtacaatagctcagaccatgatgtctatcacatggcagtggagatgcagcgagatgtcttggaacagatccagcaattcttggccacgcagttgattatgcaaacatccgagtctgggatcagtgctaaaagtcttcgagggagagattctacccgcaaacaggatgcttcagagaaggacagtgtcccaatgggctctcctgccttccttctctctctctttgatggaggaaccaggggacgccgctgtgccattgaagcagatatgaagatgaaaaagtgaagcctcagagttaccctctttgagccgaacctaaaataaaagtaaacaagatagagcttgggcttgcgggcccagttccagaggtggaagttacagaagaggaggtacctgggccacacgacatgagctggaaaatctctcttagagagttggagtagcacaattgcctgttttagggcagaaaccatgggctatgttaatgtcctaatgtgtagctagcagatcgtagctagtttgtattgtcttgtcaattgtacagactttttaaaaaaaacaaccaccagtgaaatgtgtgtgtatacaataaactgaaaaaaaaaactaaaaaaaaaaaaaaaaaaa

SEQ ID NO: 505 - protein, 920 aa, Homo sapiens
MRSGDQNWVSVSRAIKPFAEPGRPPDWFSQKHCASQYSELLETTETPKRKRGEKGEVVETVEDVIVRKLTAERVEELKKVIKETQERYRRLKRDAELIQAGHMDSRLDELCNDIATKKKLEEEEAEVKRKATDAAYQARQAVKTPPRRLPTVMVRSPIDSASPGGDYPLGDLTPTTMEEATSGVTPGTLPSTPVTSFPGIPDTLPPGSAPLEAPMTPVTDDSPQKKMLGQKATPPPSPLLSELLKKGSLLPTSPRLVNESEMAVASGHLNSTGVLLEVGGVLPMIHGGEIQQTPNTVAASPAASGAPTLSRLLEAGPTQFTTPLASFTTVASEPPVKLVPPPVESVSQATIVMMPALPAPSSAPAVSTTESVAPVSQPDNCVPMEAVGDPHTVTVSMDSSEISMIINSIKEECFRSGVAEAPVGSKAPSIDGKEELDLAEKMDIAVSYTGEELDFETVGDIIAIIEDKVDDHPEVLDVAAVEAALSFCEENDDPQSLPGPWEHPIQQERDKPVPLPAPEMTVKQERLDFEETENKGIHELVDIREPSAEIKVEPAEPEPVISGAEIVAGVVPATSMEPPELRSQDLDEELGSTAAGEIVEADVAIGKGDETPLTNVKTEASPESMLSPSHGSNPIEDPLEAETQHKFEMSDSLKEESGTIFGSQIKDAPGEDEEEDGVSEAASLEEPKEEDQGEGYLSEMDNEPPVSESDDGFSIHNATLQSHTLADSIPSSPASSQFSVCSEDQEAIQAQKIWKKAIMLVWRAAANHRYANVFLQPVTDDIAPGYHSIVQRPMDLSTIKKNIENGLIRSTAEFQRDIMLMFQNAVMYNSSDHDVYHMAVEMQRDVLEQIQQFLATQLIMQTSESGISAKSLRGRDSTRKQDASEKDSVPMGSPAFLLSLFDGGTRGRRCAIEADMKMKK

SEQ ID NO: 506 - DNA, 1643 bp, Homo sapiens
gagcctaggactgagggcgatggctgctgtggccgtggctgttcgcgaggactcgggatccgggatgaaggcggagcttccccctgggcctggggcagtggggagggaaatgaccaaagaagaaaagctgcagcttcggaaggaaaagaaacagcagaagaagaaacggaaggaagaaaagggggcagaaccagagactggctctgctgtatctgcagcccaatgtcaaggcccaaccagagaactgccagaatcgggcattcagttgggcactcctcgggagaaagttccagctggtcggagtaaggccgaacttcgggctgagcgtcgagccaagcaggaggccgagcgggccctgaaacaggcaagaaaaggggaacaaggaggaccacctcctaaggccagccccagcacagctggagaaaccccctcaggagtgaagcgtctccctgagtaccctcaggttgatgacctacttctgagaaggcttgttaaaaaaccagagcgtcaacaggttcctacacgaaaggattatggatccaaagtcagtctcttctctcacctaccccagtacagcagacaaaactctctgacccagtttatgaccatcccatcctctgtgatccacccagccatggtgcgactcggcctgcagtactcccagggcctggtcagtggctccaatgcccggtgtattgccctgcttcgtgccttgcagcaggtgattcaggattacacaacaccgcctaatgaagaactctccagggatctagtgaataaactaaaaccctacatgagcttcctgactcagtgccgtcccctgtcagcgagcatgcacaacgccatcaagttccttaacaaggaaatcaccagtgtgggcagttccaagcgggaagaggaggccaagtcagaacttcgagcagccattgatcggtatgtgcaagagaagattgtgctagcagctcaggcaatttcacgctttgcttaccagaagatcagtaatggagatgtgatcctggtatatggatgctcatctctggtatcacgaattcttcaggaggcttggacagagggccggcggtttcgggtggtagtggtggacagccggccatggctggaaggaaggcacacactacgttctctagtccatgctggtgtcccagcctcctacctgctgattcctgcagcctcctatgtgctcccagaggtttccaaggtgctattgggagctcatgcactcttggccaatgggtctgtgatgtcacgggtagggacagcacagttagccctggtggctcgagcccataatgtaccagtgctggtttgctgtgaaacatacaagttctgtgagcgtgtgcagactgatgcctttgtctctaatgagctagatgaccctgatgatctgcaatgtaagcggggagaacatgttgcgctggctaactggcagaaccacgcatccctacggttgttgaatctagtctatgatgtgactcccccagagcttgtggatctggtgatcacggagctggggatgatcccttgcagttctgtacctgttgttctacgagtcaagagcagtgaccagtgacgggggaaacacagggttaataaatgccatactccctaaaaaaaaaaaaaaaaaa

SEQ ID NO: 507 - protein, 522 aa, Homo sapiens
MAAVAVAVREDSGSGMKAELPPGPGAVGREMTKEEKLQLRKEKKQQKKKRKEEKGAEPETGSAVSAAQCQGPTRELPESGIQLGTPREKVPAGRSKAELRAERRAKQEAERALKQARKGEQGGPPPKASPSTAGETPSGVKRLPEYPQVDDLLLRRLVKKPERQQVPTRKDYGSKVSLFSHLPQYSRQNSLTQFMTIPSSVIHPAMVRLGLQYSQGLVSGSNARCIALLRALQQVIQDYTTPPNEELSRDLVNKLKPYMSFLTQCRPLSASMHNAIKFLNKEITSVGSSKREEEAKSELRAAIDRYVQEKIVLAAQAISRFAYQKISNGDVILVYGCSSLVSRILQEAWTEGRRFRVVVVDSRPWLEGRHTLRSLVHAGVPASYLLIPAASYVLPEVSKVLLGAHALLANGSVMSRVGTAQLALVARAHNVPVLVCCETYKFCERVQTDAFVSNELDDPDDLQCKRGEHVALANWQNHASLRLLNLVYDVTPPELVDLVITELGMIPCSSVPVVLRVKSSDQ

SEQ ID NO: 508 - DNA, 2591 bp, Homo sapiens
gcggccgcctccccctccccctccccctctttcttctcctccctcgtcgccgccgccgccgccgccgcctcagccttcgcctcagcgccgcccgctcgccgcgcgcggcgggatggacgatcaatccaggatgctgcagactctggccggggtgaacctggctggccactcggtgcaggggggcatggccctgccgcctcccccgcacggccacgaaggggcggacggcgacggcaggaagcaggacatcggcgacatcctccaccagatcatgaccatcaccgaccagagcttggacgaggcgcaagcaaagaaacatgccctgaactgtcacagaatgaaaccagcgctcttcagcgtcctgtgtgagatcaaagagaaaacaggtctcagcatcagaggagcccaggaggaggaccctcccgatccccagctaatgagactggacaatatgcttttggcagaaggggtttcaggtcctgagaaaggtgggggatcggcggcagcagctgcagccgcggcagcctctggaggttcttcagataactctattgaacactcagattacagagccaaattgacccagatcagacaaatctatcacacagaactggagaaatatgaacaggcatgtaatgaatttactacacatgtgatgaaccttctccgagaacagagtagaacacgtcccatttctccaaaagagattgaaagaatggtgggcatcatccatcgaaaatttagttccattcagatgcagctcaaacaaagcacttgtgaagcagttatgattttaagatcaaggttccttgatgccagacggaaaaggcgtaacttcagtaaacaggccacagaaatcttgaatgaatatttttactcacacctcagcaacccctaccccagtgaagaagccaaagaggagctggccaagaaatgcagcatcacagtgtcacaggtatccaattggtttggcaacaaacgaatcaggtacaagaagaacattggcaagtttcaggaagaagccaacctctatgctgcaaagacggccgtgacagctgcacacgcagtagcagcagctgtgcagaacaaccagaccaattcgcccaccacaccaaattccggttcttctggttcttttaacctcccaaattctggggacatgttcatgaacatgcagagtctgaatggggattcttaccaagggtcccaagtcggagccaatgtgcaatcacaggtggataccctccgtcatgttatcaatcagacgggaggctacagtgatggccttggaggaaattcactgtacagtccacataatttaaatgctaatggaggctggcaggacgcaacaactccatcttctgtgacttctcctacagaaggcccaggaagtgtgcactcggatacctctaactaatctctggccacacttttcctgagctacatgccttgataagtgcattcagagcaataggaggaaaaggaaagcgtttttgtagcccaccatctacagctttactgtaaaaccttgtcttattcgagaacttggtaaatctgtttttaaggaatcataatcatttgtatttatacttaaaaacacacaatgttaaaaaaaataaagcactttatccaattaggccaagatttaacattgttgacagtcctgtagctattttatcataatttattatcaatattttacattaatggtttcacagttgccaattacttggccttaagggtaaaaagtacaatatacactaaacctcaaccgttaaagcagatgcaaaaattcacctcacctaaattgaacttcttgcatatttccattactgacttggattgtctttctttcatatcactaatggagttggaataaagagctgtttgcctatccctgttaatgatggttgtgtttaagaatcttcctcgtcacgtttgtgttcagatctcttatgttataattagatcagagactggtagcatcgtttctctctctgaaagcaccagtgcccagagtctgctcggtaataaaattatggatccagattgttctgagagacgaagatacttgctgctgatagaggtgaaaacgagattgatccgtctggggttttacggtgtgcactgggtgctgcacagacttgtcaaggtttgctacgtcctctgggcatctgcaaaaggccctgctctctggagtgttgtatatagtgtagcaaaagagtatttatacatcccaccaatcaaaacacagctttattacctcatgcgaactcatacaaaccaatagaatttcaacatgttctgtagcttagagtgctcacttactacctctgaacaatactcacgctgtagtttgtctctttcttatctttttgcatcttgtaattaactctttgtttcccttcataaaatgtaatgtacattgtaatcttttaaaagaaaaatcagggttgcacttgcaacttttaaaaaaccgagtgtggaaacattgggtcttaattcaacacaggatcggtaaaactgttgtaaatactgagaaacattttgaatgttcttcaatcttattactaatccatgcaaaaaaaaaa

SEQ ID NO: 509 - protein, 434 aa, Homo sapiens
MDDQSRMLQTLAGVNLAGHSVQGGMALPPPPHGHEGADGDGRKQDIGDILHQIMTITDQSLDEAQAKKHALNCHRMKPALFSVLCEIKEKTGLSIRGAQEEDPPDPQLMRLDNMLLAEGVSGPEKGGGSAAAAAAAAASGGSSDNSIEHSDYRAKLTQIRQIYHTELEKYEQACNEFTTHVMNLLREQSRTRPISPKEIERMVGIIHRKFSSIQMQLKQSTCEAVMILRSRFLDARRKRRNFSKQATEILNEYFYSHLSNPYPSEEAKEELAKKCSITVSQVSNWFGNKRIRYKKNIGKFQEEANLYAAKTAVTAAHAVAAAVQNNQTNSPTTPNSGSSGSFNLPNSGDMFMNMQSLNGDSYQGSQVGANVQSQVDTLRHVINQTGGYSDGLGGNSLYSPHNLNANGGWQDATTPSSVTSPTEGPGSVHSDTSN

SEQ ID NO: 510 - DNA, 4013 bp, Homo sapiens
gatgcggctgtggtggcggcggcggcggccgagcgcgggtggcggctgtggcggcggaggggggcgcgggccggcgatggcgcggcggccctgagggcgcggggcgggcggcggccggagggcgggtggcgcgggaggaagcggcggcggtggctccatggcccgggcgcgctgagggacccggcgctcgcctcagcccggcggcggcggcggccgaacaatgaagctcctgaagccgacctgggtcaaccacaatggcaagccgattttttcagttgatattcaccctgacgggaccaagttcgcaactggaggacaagggcaggattctgggaaggttgtgatctggaatatgtctccagtcctccaggaggatgacgagaaggatgaaaatattcccaagatgctttgccagatggacaatcacttagcatgtgtgaactgtgtgcggtggtcaaacagtgggatgtatttagcttctgggggagatgacaaactgattatggtgtggaagcgggctacgtacatcggccccagcaccgtgttcggctccagtggtaagcttgccaatgtggagcagtggcggtgtgtctctatcctccggaatcattcaggcgatgtgatggatgtagcatggtctccccacgatgcctggctagcctcatgcagcgtggataacactgtcgtcatctggaatgctgtaaagttcccagaaattctagctactctgagaggtcattctggcttggtcaaagggttgacatgggaccctgttggtaaatacatagcttctcaagctgatgaccgcagcctaaaggtgtggaggacgctggactggcagttggagaccagcatcaccaagccttttgatgagtgtggaggaacgacccatgtgttgcggctcagctggtcacctgatgggcattacctggtgtctgcccatgccatgaacaactcaggccccactgcccagatcatcgaacgggagggatggaagaccaacatggactttgttgggcaccggaaagctgtgactgtcgtgaaattcaacccaaaaatcttcaaaaagaagcagaagaatgggagttctgcgaagcctagctgcccgtactgctgctgtgctgttggcagcaaggaccgctcgctttctgtctggctcacatgtctgaaacggccgctggtggtcatccatgaactgtttgacaaatccatcatggatatttcctggactctgaatgggctgggcatcttggtatgctctatggacggctctgtggcattcctcgacttctcccaggatgagcttggcgatcccctgagcgaggaggagaagagccgcattcaccagtccacctatggcaagagcctagccatcatgaccgaggcccagctctccacagccgtcattgagaaccctgagatgctcaagtaccagcgaaggcagcagcagcagcagctggaccagaagagtgctgcgaccagggagatgggctcagccacctcagtcgcaggcgttgtcaacggggagagtcttgaagatatcaggaagaatcttttgaagaaacaagttgagactcggacagcagatggccggagaagaatcacgcctctctgcatagcacagctggacactggggacttctccacggcattctttaacagcatccccctctcgggctccctggcgggcaccatgctctcttctcatagcagtccacagctactgccactggactccagtacccctaactccttcggcgcctcgaagccttgcacagagcctgtggtggctgccagtgccagacctgcaggcgattctgtcaataaagacagtatgaatgctacctctactcctgctgcattgtcaccttctgtgttaacgaccccgtccaagatcgaacccatgaaagcgtttgactcccggttcacagagcggtccaaagccacaccaggtgctcctgccctgaccagcatgactccgacagctgtggaaaggttaaaagagcagaaccttgtgaaagagctgaggccccgagacctcctggagagcagcagtgacagcgatgagaaagtccctttggctaaggcttcctcactgtccaagcgaaaacttgagcttgaggtagagacagtagagaagaagaagaaagggcggcctcggaaggactctcgtctcatgcctgtgtctctgtctgtccagtctccagctgccctaaccgcagagaaggaggccatgtgtctgtctgcaccagcacttgcactgaagctgccaattccaagcccccagagagcattcaccctccaggtcagctccgatccttccatgtacattgaggtggagaatgaagtgacagtggtggggggcgtgaagctgagccgcctgaagtgcaaccgggaagggaaggagtgggagacggtactcaccagccggatcctcactgctgcgggcagctgtgacgtggtgtgtgtcgcctgtgaaaaaaggatgctgtcagtgttctccacctgtggtcgccgtctcctctctcccatcctcctgccatccccgatctctactttgcattgcacaggctcctacgtcatggcgctcaccgctgcagccacactctctgtctgggatgttcacagacaggtggttgtggtgaaagaagagtctctacactccatcctggcaggaagtgatatgacggtatcacagatcttgctgacgcagcatggaatcccagtaatgaacctgtccgatgggaaggcgtactgctttaatccgtcactttccacatggaacctggtttctgacaagcaggactcactggctcagtgtgcagactttaggagcagcctgccatcccaggacgccatgctgtgctcaggaccgttagccataatccagggccgcacctccaactcgggaaggcaggctgcccggctcttctccgtgcctcatgtggtgcagcaagagaccaccctggcctacctagagaaccaggtggcagcagcactcaccctgcagtccagccacgagtaccgccattggctcctcgtctacgcacggtacctcgtaaacgaagggtttgaataccgacttcgagaaatatgcaaggacttactgggtccggttcactactccactggaagccagtgggagtcaacagtagtgggtctgcggaagagggagctgctgaaggagctgctaccagtcatcgggcagaacctccgattccagcgcctcttcaccgagtgtcaggaacagctcgacatcctgagggacaagtagcctgccccagcctgccctggctgcagcaagggcagggccacactctcgccgctgatgacatgcaggaccgcctctcacctgaccaggctgtagggggaggagacactggcaggagatgtgctgtcctgcaccagcgccagcccagctccctgggcagatgtgccctgtgtcctgggtctgacattgcctcaggagggggaagctcatccctccctccaagcccccgatgcggagctagggctggagctctgcccaggtgccctggggccagcaaggcagtcccaggcctgccgtctccagcacggccccaaggtggacactagcccctgctgctgcaggcaccatgctgcttcagcagtgacgattgagccatttgtgagagagaatccggaagcgttaggtattacagcagactgacctaagacctatgtaaaaggaaagctgttccaacacacggactatttttgtactagaatttgctaacttgtaatattgaatttcctttggccgataatcaggatttccctataagtcacttggacattggtcacttgtaggaaatttaaactctaattatgacagctacactgaaaaataattgtactgaaattaacttgtctatcttcatttggttttaatttttaaatgtttgtaaaaagagactgttttgggggaatggggcaaaggggtgggcgatttcttttgtaagtgtaaaataaatgaacacgcattgaatacc

SEQ ID NO: 511 - protein, 1017 aa, Homo sapiens [sequence omitted]

SEQ ID NO: 512 - DNA, 1801 bp, Homo sapiens
agaggagtgggaccgatcgatagcgcagcggtcgcttggcgccctttcagcgtgcgcagtgaacgtgcgctcggagcggtagattgggcaggattcgcgcctccatttttccaggagagagcgggataccaagagaaccggaccagctgctggcagggaaactgtcttccttttctccaagatgtacagaaccaaagtgggcttgaaggaccgccagcagctctacaagctgatcattagccagctgctatatgacggctacatcagcatcgccaatggcctcatcaatgaaatcaagcctcagtctgtgtgtgcaccctcggagcagctcctgcatctcatcaaactcggaatggaaaacgatgacaccgcagttcagtatgcaattggtcgttcagatactgttgcccctggcacagggattgacctggaatttgatgcagatgttcagactatgtccccagaggcttctgagtacgaaacatgctatgtcacatcacataaaggaccatgccgtgtagctacctatagtagagatggacagttaatagctactgggtctgctgatgcttcgataaagatacttgacacagagaggatgttggccaaaagtgccatgccaatagaggtcatgatgaatgagaccgcacaacaaaatatggaaaaccacccagtgattcgaactctttatgaccatgtggatgaagtcacgtgccttgctttccacccaacagaacagatcctggcttctggttcaagggattatactcttaaattatttgattattccaaaccatcagcaaaaagagccttcaaatacattcaggaagctgaaatgttacgttccatctcttttcatccttctggagactttatacttgtcggaactcagcatcctactcttcgcctttatgatatcaacacctttcaatgttttgtctcttgcaatcctcaagatcaacacaccgatgctatatgttccgttaattacaattctagtgccaatatgtacgtaactggaagcaaggacggctgcatcaaattatgggatggtgtttcaaatcgatgcatcacaacttttgagaaagcacatgacggtgctgaagtttgttctgccattttttccaaaaattctaaatacattctctcaagtggaaaagactctgtagctaaactttgggaaatatcaacgggacgaacactggtcagatacacgggcgcgggtttaagtggacgccaggtgcaccggacacaggctgtgtttaaccacaccgaggactatgtgttgctgcccgacgagaggacgatcagtctttgctgctgggactcgaggacagccgagcggagaaacctgctgtcgttggggcacaacaatattgtacgctgcatagtgcactcccccaccaaccccgggttcatgacgtgcagcgatgacttcagagcgcggttttggtaccggagatcgaccactgactgagccaccctctccgtagggttctttctcgaggactctaccctcctcccccacgtcctgtctcagctgcagtcgtaagtccgtgcaccatccttgacgttttgctgccacctctgtccacattcttcttggatttgtataaaagaatctttttttaccttgatgtagaatcatggtggaaaaagttggaaacacagatctgtgcagttctacattcactgattattacagtgtgattttcatcggttttgtaagtacaggacttgccgtttcttttgatctcttgattgaaggaggatagggcattaaagtgcttttgacatgagg

SEQ ID NO: 513 - protein, 431 aa, Homo sapiens
MYRTKVGLKDRQQLYKLIISQLLYDGYISIANGLINEIKPQSVCAPSEQLLHLIKLGMENDDTAVQYAIGRSDTVAPGTGIDLEFDADVQTMSPEASEYETCYVTSHKGPCRVATYSRDGQLIATGSADASIKILDTERMLAKSAMPIEVMMNETAQQNMENHPVIRTLYDHVDEVTCLAFHPTEQILASGSRDYTLKLFDYSKPSAKRAFKYIQEAEMLRSISFHPSGDFILVGTQHPTLRLYDINTFQCFVSCNPQDQHTDAICSVNYNSSANMYVTGSKDGCIKLWDGVSNRCITTFEKAHDGAEVCSAIFSKNSKYILSSGKDSVAKLWEISTGRTLVRYTGAGLSGRQVHRTQAVFNHTEDYVLLPDERTISLCCWDSRTAERRNLLSLGHNNIVRCIVHSPTNPGFMTCSDDFRARFWYRRSTTD

SEQ ID NO: 514 - DNA, 3366 bp, Homo sapiens
ggttgcgcgtgtgccatggactcagccgcccggtgatattgacaataggagagagaaaggggcattgactgggacccaccgcgggtagcgaaaggtggctctggcagcggcggctccagctcctgcggctcctcctccttattctgtccccttctcttgctgccgctgcagatccagtcttcctccctcccttccccccctccccacgtcgtcgccgccgccgccgggtccggggcaacgagctgaggcgccgcccgccaggaatgtgagcgaggagccaccggcggagccgcaacggggtcggtgccgatttgatgggacgggcccgcgggggaggatcgtgaggccgccgccgccaccggaacgctgaggttcgggtccggccgtgaggcctagaggctccgccgccgcggaaccggagggaccccgtaccggacagccgtcgccccaggctccccgcagctgcccggacctccccctgcacgtcccggtcccgccgcccgcccccgctgcggccacctcgcccgtctcccgcccctccaagccacagatcatctttggattcttccccagaagcttcaagtagggatatgtcctcagcaccaactactcctccatcagtggataaagtagacggattttctcggaagtccgtcagaaaagccagacagaagaggtcgcaaagttcctcacagtttaggtctcaaggcaagcctattgagttaacacctctgccgctgctaaaagacgttccatcctcagagcagcctgaactgttcctaaagaaacttcagcagtgctgtgtcatttttgacttcatggacacgctatctgatcttaaaatgaaagaatacaagcgctccactcttaatgaactggtggactacattacaataagcagaggctgtttgacagagcagacttaccctgaagtagttagaatggtatcttgcaatatattcagaactctccctcctagtgacagcaatgaatttgatccagaagaagatgaacctacccttgaggcatcgtggccacacttacagcttgtatatgaatttttcatacgatttttggaaagccaagaattccaacccagcattgccaaaaaatatatagatcagaaatttgtattacagcttctggagctatttgacagcgaagaccctcgggaacgggactacttaaaaacagtcttacacagaatttatggcaagtttcttggtcttagagcatttatccgaaaacagattaacaatatttttctaaggtttgtttatgaaacagaacacttcaatggtgtagctgaactgctggaaatattaggaagtattatcaatggctttgctttacctcttaaggcagaacacaaacagtttctggtgaaagtattgatccctttacacactgtcaggagcttatcactcttccatgcacagctggcatattgtatagtacagtttctggagaaagatccttcactcacagaaccagttattagggggttaatgaaattttggcctaaaacatgtagtcaaaaagaggtcatgttccttggggaactggaagaaatattggatgtgattgaaccttcacaatttgttaaaatccaagaacctttgtttaaacaaatcgccaagtgtgtatctagcccccattttcaggtggcagaaagagcactctattattggaataatgaatacatcatgagtttgatagaagaaaactctaacgtcatccttcccatcatgttttccagcctttataggatttcaaaagaacattggaatccggctattgtggcgttggtgtacaatgtgttgaaggcatttatggaaatgaacagcaccatgtttgacgagctgacagccacatacaagtcagatcgtcagcgtgagaaaaagaaagaaaaggagcgtgaagaattgtggaaaaaattggaggatctggagttaaagagaggtcttagacgtgatggaataattccaacttaacaaaaacaatgacaacaacattactaacctgtggagtcacacgtttatgtagtagaagatggagcaacagttttctgtattgtgcaactttacagtagatttcacctttgtttcattattacagcagcactgtatatacctgtctctaagtaaaggaaaaaacaaaataaggacttcaatccaaagtttggacagtagatggacttctcagaactttgcaaacataatcattgttctcaccctcttttaaaaaaaaaaatcggtcttcaaagatctgttgatgaaattgctatgttaaaattccattatcgggagttccttatttatcactagcagagagtatgatacaattttcaaatgtgaacaatcttaaatttagcttgtctttctgctaagctgttaaatgtatttatagtaaaggaagaaaaaaagactgtcatttccttataagtttgtgtaacatcctcctctggataacttgactgtaatttaacatctttttcttttgcacatcttcctgagttgaatgtccacgtggaatggggtcatgaattataaaagtccctgataaaagttttgtttactggggtgaacatctttccagtaaccaggtagtcctggtactcctttagttttaaaattaggagttaagagagaagaggtgataaacatagtagggaagggaatatcggattcatgcatcagtttatggtgaatccaaatcaatgtcttgaatcctttgaaaacaggcactgggacatcacaggcttcagtacctgaccagtattagttgcatatatcattgaacacacataccagagatgttttagaaatgtgagaaaaacatccttttggaccatttgaaataagaaagacaaacactaaacaatacaaccatgaaattgatcaccgggattgcaaatctaattgggaaaagagttgagcaaacagcttggactgtttggagttgttgccttactttttaatatgtatttataaagtattccagcaaaagaggatgtagcctctgggaaaaaacaaacatgttacagtgttttttgtagattctcgttctatatctcatcacagcgccagccctgtttttagccggaaaggattcaggataaacattattatgcattctgaattggatgcatattcctaactactgtatttgttaccaaaagtggttctacaaatgctactgaaaaaaatctggaaattcctaatgtcctgagtattaataataaagtttaaaaatgcttttatatcaaaggtgcatcgtgaccaaattgtttaagaaaaaaaaacaaaaaaaacaaaatctagggctgtattttatatatatatatatatatatatatatatatat

SEQ ID NO: 515 - protein, 467 aa, Homo sapiens
MSSAPTTPPSVDKVDGFSRKSVRKARQKRSQSSSQFRSQGKPIELTPLPLLKDVPSSEQPELFLKKLQQCCVIFDFMDTLSDLKMKEYKRSTLNELVDYITISRGCLTEQTYPEVVRMVSCNIFRTLPPSDSNEFDPEEDEPTLEASWPHLQLVYEFFIRFLESQEFQPSIAKKYIDQKFVLQLLELFDSEDPRERDYLKTVLHRIYGKFLGLRAFIRKQINNIFLRFVYETEHFNGVAELLEILGSIINGFALPLKAEHKQFLVKVLIPLHTVRSLSLFHAQLAYCIVQFLEKDPSLTEPVIRGLMKFWPKTCSQKEVMFLGELEEILDVIEPSQFVKIQEPLFKQIAKCVSSPHFQVAERALYYWNNEYIMSLIEENSNVILPIMFSSLYRISKEHWNPAIVALVYNVLKAFMEMNSTMFDELTATYKSDRQREKKKEKEREELWKKLEDLELKRGLRRDGIIPT

SEQ ID NO: 516 - DNA, 6167 bp, Homo sapiens
ttctccaaggccttaaatctcagatacttgaatgcatctgcaaatagtctggagtctttaccatccgcctgcactggagaggagagtttgagtatgctgcagctgctttatctgaccaacaatctcctgacggatcagtgcatacctgtcctggtagggcacctgcacctgcgaatcttgcaccttgcaaacaatcagttacagacctttcctgcaagcaaactaaataaattggagcaattggaggaactgaacctaagtggcaacaagcttaaaaccattcccacaaccatagcaaactgtaaaaggctgcacacccttgttgcacactccaacaacatcagcattttcccagaaatactgcagttgcctcagatccagtttgtagacctaagttgcaacgacttgacagaaatcctgattccagaggctttgcctgctacattacaagaccttgacctgactggaaatacaaatctggttctggaacacaagacactggacatatttagccatatcacaaccctgaaaattgatcagaaacctttgccaaccacagattctacagttacgtcaaccttctggagccatggactggctgagatggcagggcagagaaataagctgtgtgtctcagcacttgctatggatagctttgcagagggggtgggagctgtgtatggcatgtttgatggagaccgaaatgaggagctcccgcgcctgctgcagtgtacgatggcagatgtgcttttagaagaggtacagcagtcaactaatgacacagttttcatggctaacaccttcttggtatctcacaggaaattaggaatggctggccagaagttgggctcctccgctctcctgtgctacatccgccctgacactgccgatccagcaagtagctttagcttgactgtagccaatgttggcacgtgccaagcagtcctgtgccgaggtgggaagccagtgcccctctctaaagtcttcagcctggagcaggacccagaggaggctcaaagggtgaaggaccaaaaagccatcatcacagaggacaacaaagtgaatggggtaacctgctgtacccggatgctgggctgtacatacctctacccttggatcctccccaagccccacatatcttccactccgctgaccattcaagatgagttgctgattctgggaaacaaagcattgtgggaacacttgtcctacacagaagctgtcaatgctgtacgtcacgtacaagacccattagcagctgctaagaagctgtgcacattagcgcagagctatggctgtcaggacaatgtaggggcgatggtagtttatttgaatattggtgaagaaggctgcacttgtgaaatgaatgggctcaccctcccaggtcctgtgggatttgcttcaaccaccactatcaaggatgcccctaagccagccactccatcctctagcagtgggattgcctctgagttcagcagtgagatgtccacctcagaggtgagcagtgaagtggggtccactgcttctgatgagcataatgctgggggcctggacactgccttgcttccgaggccagagcggcgctgcagcctccacccaacacccacctctgggctgtttcagcgccagccttcttctgctaccttctccagtaaccagtctgacaacggcctggacagtgatgatgaccagcccgttgagggggtcataaccaatggcagcaaggtagaggtggaagtagacatccactgctgcagggggagggatctggagaactcaccccctctcatagagagttctcctaccctgtgttctgaggaacatgctagagggtcgtgttttgggatccgaagacagaacagtgtgaatagtggcatgctcctgccaatgagcaaggacaggatggagttacagaagtctccctccacctcctgcctctatgggaagaaactctccaatggctctattgtgcccctagaggacagcctgaacctcattgaagtggccacagaagtgcccaagaggaaaactggctattttgctgcccccactcagatggaaccagaggaccagtttgttgtgcctcatgacctggaagaagaagtgaaggaacaaatgaaacagcaccaggacagccggctcgagcctgagccccatgaagaggatcggaccgagcccccggaggagttcgacacagcactatgactgccccactgggcacagtgtgggaggaggctgtgcagggttggggtagggacttgctagaggcattctgcctctacatttctttttgtttgttcgttttttttttgtttgtttgttttgagacggagtcttgctcagtcgctcaggctggagtgcaatggtggggtctcgggtcactgcagcctctgtccctgggttcaagccattctcctgtctcagcctcccgagtagctgggattacaggcacctgccattatgcccggctaagttttattttttttttttagagacggggtttcaccatgttggccaggctggtgttgaactcttgacctcaggtgatccaccctcctctgcctcccaaagtgctgtgattacaggcctcagccaccatgcccagccctgcgtctacatttctaaaccatagctgtgtggggttgaactcggagccaaaaagtgtgagagccatcaggggctggctctggataaactggtagccactatcagtgttaagtttcacatttaacctgcattggaattcccaggggtactgggaagaaagcagctgttctgtatcagtcctaccacctgccattaaccctttctctcctaggatcattttgagaatttgcctgcctgggcaggaaagggactatttctgtggaggaaaaaagtgaagattgattctctttactagttgctgctgatggatctctgtgacagagaaatcaccttatctcagactaatggggtgtgatgtgactagtcacatggcttttcattcttctctacgagaatacagcctatcaaaatgatgtctgttggaaatgtagaaccaatcaaacagataatttatgtatgtaatgtaatgagagcacttttcattgactgtgaactttttatttttgaatctgcactcgagccaatcttcttagaggcagcccggcaccttcatccataggcagagagagaactgggtgttggagacttattcgagggtataggaagggccctgtgaagttgatttaacttttggatgtcagactgtgaaagctcctgagaaacttggggtaataggatcttcttttggggatgaaaatggggaaggcgtgaggacctagactacttctccctagatcagaaaaagagaattaccccttgacaaatatgatacctgctaggtatttcccagggaaatttagggattggcctctttccctagcatgtggaggaattggcagacagcttcctaagggcggggagcgggggcccaaggccgacactgcttgcatccacgtgaccttaagttatggcagatgactctgaaacggactgaggccaatgagaacagatggatggagcactcaggttagacttgttccttctcctatgctggaggagagggatggttctctagaatgttggaggtgagttgagagctcgcctcttgaatgttgaacagtgtactcttctgaaaactgcatattcactttatgtggtttcagaatactgggctcaatactaacataagaaagacacttcattgagaaattcttaagcttacagaaaacctatactctttgcacattccacataaccctagcaaaatgcagtttcttcatacttctgtcactttttccattggaagatttgcttaggaaaattaattcctatttattcccacaaaatgttggcattgcttgattttacccaatggggaatgtgctttgaatttttggaacacttttacaattaaaaataaagtagggccatttttaatttgtttcatcagaaactatgttaaagagagggttaaatataaatatattttcgtgtgtatttttgggaagatttttgttcaaagcaatagtcaaaatcagatgacctgtccataataattatgtgtcttcatcttctcagaggccccatgctcatatgcacgtgtcattgggatacactcttgggggatttggtacactctaatggatgtctaatgttcaacccctcgagaatctgaacttgagtccccagattgtcaaactactggtcagctattgagaattttagaactcaggtctttgatttgaagtagggaacatagtggctcacacagagtttaggtgctgttagaaagatgggaacaagagtgttttgccaccttatttttatatgggaaattttttttaatgaagaaaaaatgaaaatgaaataacaggatgatagtgatgagtgatgtaaaacatcttacttagatggcagaaccttcgggttgtagaatagtgatgtctaaaaattaaagttattttgggaatacaccactttaatagtatagtcttataaaaattattcattatggtgaacccttcttgtctgctattcgtttcccaacctacttattggaaccacctcaaaacccagttctgaaatgaccttaccaaaagtaaatgtatttattttttagtcagcagaactctgtaattccaaatgttgttctgtgtggtagaattttttttcaggaaccattaggttgtattgaaaatctttgttataggcgataccaaaactgattattcttttttgcagtctgctttaattcatgtccttctgcagttgctctgtattaaaacagggtaaaaaggccatagcccattatgaaaaatataatacaaaactctttgacctatgaggtaacttacagacattgtgttttctaaacaggctgtcagtgaaagcccgtatctgtctccaggtgaatgtaatttacttccgagtactttacccagaggatgtattccccaggtgggcagagtacagttgatctctagcacagacagagattctggcctctgcatattctcaggtctctgtgtgtacctcccattgagtagagaagcttaagataatttctgagagaagaacactgctgattgtgggagcagtttaggagtccatggaagaaagaaaaatacatgtgtcttggcagccatggtgtatttttgtccaaatggattggaaggatatttgaatatttgaatgttggtatgacataaagctgcagtgcactatagagtcaagtcattgaattaccactcctgatacagggctttattgtactactgtgaagtgtatgtgtgcaatacattggtgagttcatttactggtgtacggaagagccagcaggagcagcgtggtcattgctgggtgctattacagttgcttgtagtgagtgctgttttccaggagatggagccagttgggtgtggcagatctactgaatatcaaatgatgctcttcttcccatgtagaccttcagcaaaagccggtacttggaagccacaggctcaccttctctatctatccaataattattaatgaagagacctccataagggagcagctggctgttatcgataaatgtaccaattattaaataattagtctccaagccattcagtgatgtcttcagcatcactataggactgtctagtgtcactttttacttccttctgggtggaggctttccgactcccaatcatgaaggcaagttaatctttccagttagtgacttttgccccatagttggggtaaacacttcctagattgagaaaaagcagctacagtcaatcctgctctgtttgcctcatttggtgatcagtcagtcacacataagttccttgtattctaaatttcatgcacttctcccagatgctatagggttttctctcactgttgccaatggatgtcatccagacagtgggctcatatcttacggttttgtgcaatcattgtcgtattgtagtcttaagactcattatagtgtatttttgatatttttgaaatgtgttaaattttttaattcagtaatgtgagccagagcatgttgcagcaaatctattgtttgtaaaaataacaataacaataataaataaaataaagtggaatctttttcatggctttgtttt

SEQ ID NO: 517 - protein, 734 aa, Homo sapiens
FSKALNLRYLNASANSLESLPSACTGEESLSMLQLLYLTNNLLTDQCIPVLVGHLHLRILHLANNQLQTFPASKLNKLEQLEELNLSGNKLKTIPTTIANCKRLHTLVAHSNNISIFPEILQLPQIQFVDLSCNDLTEILIPEALPATLQDLDLTGNTNLVLEHKTLDIFSHITTLKIDQKPLPTTDSTVTSTFWSHGLAEMAGQRNKLCVSALAMDSFAEGVGAVYGMFDGDRNEELPRLLQCTMADVLLEEVQQSTNDTVFMANTFLVSHRKLGMAGQKLGSSALLCYIRPDTADPASSFSLTVANVGTCQAVLCRGGKPVPLSKVFSLEQDPEEAQRVKDQKAIITEDNKVNGVTCCTRMLGCTYLYPWILPKPHISSTPLTIQDELLILGNKALWEHLSYTEAVNAVRHVQDPLAAAKKLCTLAQSYGCQDNVGAMVVYLNIGEEGCTCEMNGLTLPGPVGFASTTTIKDAPKPATPSSSSGIASEFSSEMSTSEVSSEVGSTASDEHNAGGLDTALLPRPERRCSLHPTPTSGLFQRQPSSATFSSNQSDNGLDSDDDQPVEGVITNGSKVEVEVDIHCCRGRDLENSPPLIESSPTLCSEEHARGSCFGIRRQNSVNSGMLLPMSKDRMELQKSPSTSCLYGKKLSNGSIVPLEDSLNLIEVATEVPKRKTGYFAAPTQMEPEDQFVVPHDLEEEVKEQMKQHQDSRLEPEPHEEDRTEPPEEFDTAL

SEQ ID NO: 518 - DNA, 1650 bp, Homo sapiens
gcggtagtcagggcagtttctaccgcaggcttaaggaggcttcgggctcctgggatttctgtccgcgctcctggccctcgtccttcgcgccagagcaggttcgcaaactcctcagacccttctgctcccggccgccgctttccgccggggcgagacccccaggttcaaaatgagcctgtttggaacaacctcaggttttggaaccagtgggaccagcatgtttggcagtgcaactacagacaatcacaatcccatgaaggatattgaagtaacatcatctcctgatgatagcattggttgtctgtcttttagcccaccaaccttgccggggaactttcttattgcaggatcatgggctaatgatgttcgctgctgggaagttcaagacagtggacagaccattccaaaagcccagcagatgcacactgggcctgtgcttgatgtctgctggagtgacgatgggagcaaagtgtttacggcatcgtgtgataaaactgccaaaatgtgggacctcagcagtaaccaagcgatacagatcgcacagcatgatgctcctgttaaaaccatccattggatcaaagctccaaactacagctgtgtgatgactgggagctgggataagactttaaagttttgggatactcgatcgtcaaatcctatgatggttttgcaactccctgaaaggtgttactgtgctgacgtgatataccccatggctgtggtggcaactgcagagaggggcctgattgtctatcagctagagaatcaaccttctgaattcaggaggatagaatctccactgaaacatcagcatcggtgtgtggctatttttaaagacaaacagaacaagcctactggttttgccctgggaagtatcgaggggagagttgctattcactatatcaaccccccgaaccccgccaaagataacttcacctttaaatgtcatcgatctaatggaaccaacacttcagctcctcaggacatttatgcggtaaatggaatcgcgttccatcctgttcatggcacccttgcaactgtgggatctgatggtagattcagcttctgggacaaagatgccagaacaaaactaaaaacttcggaacagttagatcagcccatctcagcttgctgtttcaatcacaatggaaacatatttgcatacgcttccagctacgactggtcaaagggacatgaattttataatccccagaaaaaaaattacattttcctgcgtaatgcagccgaagagctaaagcccaggaataagaagtagtggctggagactctggctcagccagagttgtttctctccactctgcctcatctctgtacgaatttgggtcccagccttgttgggttgtcagccatggacatggatttcaacccctggagaaaacgatgtcattgttcagcagctgagagcccaggcgtccgcggcgacttgccgtctctccattccactgcctgttgcagagtttttctgtaactaagggggttgaggttattgtagacgttagattgcgggcaccgccagggattttgcagcgcttcagtgtacgtgttagagaatattggaaaagcgtctgtgagccccgtgctgtattttgtaataaagtcttttgcagattgaaaaaaaaaaaaaaaaaa

SEQ ID NO: 519 - protein, 368 aa, Homo sapiens
MSLFGTTSGFGTSGTSMFGSATTDNHNPMKDIEVTSSPDDSIGCLSFSPPTLPGNFLIAGSWANDVRCWEVQDSGQTIPKAQQMHTGPVLDVCWSDDGSKVFTASCDKTAKMWDLSSNQAIQIAQHDAPVKTIHWIKAPNYSCVMTGSWDKTLKFWDTRSSNPMMVLQLPERCYCADVIYPMAVVATAERGLIVYQLENQPSEFRRIESPLKHQHRCVAIFKDKQNKPTGFALGSIEGRVAIHYINPPNPAKDNFTFKCHRSNGTNTSAPQDIYAVNGIAFHPVHGTLATVGSDGRFSFWDKDARTKLKTSEQLDQPISACCFNHNGNIFAYASSYDWSKGHEFYNPQKKNYIFLRNAAEELKPRNKK

SEQ ID NO: 520 - DNA, 2743 bp, Homo sapiens
gcgggccgttatccatttgtgttgttcgccagctaggcctggcctcgtcccgcttcgctcggtcggtctcgcgcgcccccatagccttgctagagggttagcgttagccttaagtgtgcgaatccgaggagcagcgacagactcgagaccacgctccttcctcgggaaggaggcggcacctcgcgtttgaggcccgcctgcgtttgaggcccgcctgcgcttgcggcccgcctgcgcttgaggcctgtctgcgtttgagatctcattgggcgtgattgaggaatttggggaggtttttgggcggtattgaggacgagggggtccgttagtcagcatagaatcctggagcgggaatccctcaccgtctaaatggcgtcgggggcgggacctccgggatctggcttccgcgggccgccgccggccctgaaacgtgagggatagctgagatgaggcagctactgggatggcccccatgcgcatttacatgcagtccgactgccgagctttcgaggcagcaggatttaccgtccacattcctcactactaaccaagcttttagaacagatctcacaagaacctagaggtcggtattttttcgatttaaatttgcctgttactgacgttaacgtctttcgcctagtgagcagtagccaacatgtcagggtgggagtcatattacaaaaccgagggcgatgaagaagcagaggaagaacaagaagagaaccttgaagcaagtggagactataaatattcaggaagagatagtttgatttttttggttgatgcctccaaggctatgtttgaatctcagagtgaagatgagttgacaccttttgacatgagcatccagtgtatccaaagtgtgtacatcagtaagatcataagcagtgatcgagatctcttggctgtggtgttctatggtaccgagaaagacaaaaattcagtgaattttaaaaatatttacgtcttacaggagctggataatccaggtgcaaaacgaattctagagcttgaccagtttaaggggcagcagggacaaaaacgtttccaagacatgatgggccacggatctgactactcactcagtgaagtgctgtgggtctgtgccaacctctttagtgatgtccaattcaagatgagtcataagaggatcatgctgttcaccaatgaagacaacccccatggcaatgacagtgccaaagccagccgggccaggaccaaagccggtgatctccgagatacaggcatcttccttgacttgatgcacctgaagaaacctgggggctttgacatatccttgttctacagagatatcatcagcatagcagaggatgaggacctcagggttcactttgaggaatccagcaagctagaagacctgttgcggaaggttcgcgccaaggagaccaggaagcgagcactcagcaggttaaagctgaagctcaacaaagatatagtgatctctgtgggcatttataatctggtccagaaggctctcaagcctcctccaataaagctctatcgggaaacaaatgaaccagtgaaaaccaagacccggacctttaatacaagtacaggcggtttgcttctgcctagcgataccaagaggtctcagatctatgggagtcgtcagattatactggagaaagaggaaacagaagagctaaaacggtttgatgatccaggtttgatgctcatgggtttcaagccgttggtactgctgaagaaacaccattacctgaggccctccctgttcgtgtacccagaggagtcgctggtgattgggagctcaaccctgttcagtgctctgctcatcaagtgtctggagaaggaggttgcagcattgtgcagatacacaccccgcaggaacatccctccttattttgtggctttggtgccacaggaagaagagttggatgaccagaaaattcaggtgactcctccaggcttccagctggtctttttaccctttgctgatgataaaaggaagatgccctttactgaaaaaatcatggcaactccagagcaggtgggcaagatgaaggctatcgttgagaagcttcgcttcacatacagaagtgacagctttgagaaccccgtgctgcagcagcacttcaggaacctggaggccttggccttggatttgatggagccggaacaagcagtggacctgacattgcccaaggttgaagcaatgaataaaagactgggctccttggtggatgagtttaaggagcttgtttacccaccagattacaatcctgaagggaaagttaccaagagaaaacacgataatgaaggttctggaagcaaaaggcccaaggtggagtattcagaagaggagctgaagacccacatcagcaagggtacgctgggcaagttcactgtgcccatgctgaaagaggcctgccgggcttacgggctgaagagtggtctgaagaagcaggagctgctggaagccctcaccaagcacttccaggactgaccagaggccgcgcgtccagctgcccttccgcagtgtggccaggctgcctggccttgtcctcagccagttaaaatgtgtttctcctgagctaggaagagtctacccgacataagtcgagggactttatgtttttgaggctttctgttgccatggtgatggtgtagccctcccactttgctgttctttactttactgcctgaataaagagccctaagtttgtactaaaaaaaaaaaaaaaaaaaaaaaaaaaaaaaaaaa

SEQ ID NO: 521 - protein, 609 aa, Homo sapiens
MSGWESYYKTEGDEEAEEEQEENLEASGDYKYSGRDSLIFLVDASKAMFESQSEDELTPFDMSIQCIQSVYISKIISSDRDLLAVVFYGTEKDKNSVNFKNIYVLQELDNPGAKRILELDQFKGQQGQKRFQDMMGHGSDYSLSEVLWVCANLFSDVQFKMSHKRIMLFTNEDNPHGNDSAKASRARTKAGDLRDTGIFLDLMHLKKPGGFDISLFYRDIISIAEDEDLRVHFEESSKLEDLLRKVRAKETRKRALSRLKLKLNKDIVISVGIYNLVQKALKPPPIKLYRETNEPVKTKTRTFNTSTGGLLLPSDTKRSQIYGSRQIILEKEETEELKRFDDPGLMLMGFKPLVLLKKHHYLRPSLFVYPEESLVIGSSTLFSALLIKCLEKEVAALCRYTPRRNIPPYFVALVPQEEELDDQKIQVTPPGFQLVFLPFADDKRKMPFTEKIMATPEQVGKMKAIVEKLRFTYRSDSFENPVLQQHFRNLEALALDLMEPEQAVDLTLPKVEAMNKRLGSLVDEFKELVYPPDYNPEGKVTKRKHDNEGSGSKRPKVEYSEEELKTHISKGTLGKFTVPMLKEACRAYGLKSGLKKQELLEALTKHFQD

SEQ ID NO: 522 - DNA, 5198 bp, Homo sapiens
ctcacttaaacacgtagttcccgcgaccccaacgtcccagaggcggggccggagtcggcggtggcgctccttggagccggctcccgctcctaccctgcaaacagacctcagctccgcggaagttgcgagacggggtttcaccatgttggtcgggctggtctggaaatcctgacttcaggtgatccacccgcctcggcctcccaaaatgctgggattacaagcgtgagccaccgcccctgacatgagccattgacttttaaagcaggagaataatttggatcagatttatatggaaacactcttctagcagcattatggggacttttccataagtctggatactgaggatttggaattaaagaaatcattcaccagacatcatggagcctatatatccttttgcacggccccagatgaataccaggtttccttcaagcaggatggtacctttccactttcctccatcaaaatgtgcactttggaacccaacgccaactggagatttcatctacttacatctcagttactacagaaatccaaagcttgtggtgactgagaagaccatccgacttgcttatcgtcatgctaacgagaataaaaaaaattcgtcatgctttttacttggttctctgacagcagacgaagatgaagaaggtgtaacattgacagtagatcgctttgatcctggtcgagaagtacctgaatgcctagaaataacccctactgcttctcttcctggggactttttgattccatgcaaagttcatactcaagaactttgttcaagagaaatgatagttcacagtgtagatgacttcagttcagctttaaaggctctacagtgccatatatgtagcaaagattccttggactgtggtaagctgctttccctaagagttcatatcacttccagggagagtttggacagtgtggaatttgacttgcattgggcagcagtaactctagcaaataactttaaatgcacacctgtgaagcccatccccattattccaacagctctggcaagaaacttgagcagtaatctgaatatttctcaagttcaagggacttataaatatggatatcttaccatggatgaaacacgcaaattgttacttttgttggaatctgatcccaaggtttattctctaccattggtgggaatttggctgtctggaattacacatatctatagtcctcaggtatgggcttgctgtttgcgatacatattcaattcttctgttcaagaaagggttttttcagaatctggaaatttcatcatagttctctattctatgacacataaggaacctgagttttatgaatgcttcccttgtgatggcaagatacctgactttcggtttcagttgctaaccagtaaggaaacattacatcttttcaaaaatgttgaacctcctgacaaaaatccaatccgttgtgaactgagcgctgaaagccaaaatgcagaaacagagtttttcagtaaggcttccaagaatttttcaattaagaggtcttcccaaaagttatcttctgggaagatgccaatacatgatcacgactctggtgttgaagatgaagatttttctccaagaccaattcctagtcctcatccagtgagtcagaagatttctaagatccaaccatcagttcctgaactttcacttgtgttggatggcaatttcatagaatcaaaccctctgcctactccattggaaatggtgaataatgaaaatcctcctttgattaaccacttggaacacttgaagccattgcaaccccagctttatgatgagaaacacagtccagaagttgaagctggagagccttccttgagaggaataccaaatcagttaaaccaggataaaccagctcttttgagacactgcaaagtaagacagccacctgcctataagaaagggaacccccataccaggaacagtattaaaccatcttctcataatgggccatctcatgatatatttgaaaagctccaaacagtttctgctggaaatgtacaaaacgaagagtatcctataagaccctccacacttaattctaggcagtcttctcttgccccgcagtcccaaccacacgattttgttttttcaccccataattcaggaagaccaatggaacttcagatacctactcccccactgccatcttactgttccacaaacgtttgcaggtgttgtcagcatcatagtcatattcaatatagtccgctaaattcttggcaaggagcaaacacagttggatccattcaagatgtccagtctgaagcccttcaaaagcattcattatttcacccaagtggatgtccagccctgtactgtaatgcattctgttcttcaagtagtcctatagccttgagacctcagggagatatgggcagttgttctccccacagcaatattgaaccatcgcctgtggcaagaccgccttcacatatggacttatgtaacccacagccttgcacagtgtgcatgcacacacccaagactgagtcagataatggaatgatgggactatctccagatgcatatcggttcctcacagaacaagacagacagctaagactacttcaggcacagattcagcgtttgttggaagcacagtctctgatgccctgttcccctaagacaactgctgttgaagacacagtgcaagctggaagacaaatggagttggtttctgtggaagcacagtcttcccctggcttgcacatgagaaaaggtgtaagcattgctgtgagcacaggtgctagcttgttttggaatgcagcaggtgaggatcaagagcctgactctcaaatgaagcaagatgataccaaaatttccagtgaggacatgaatttttctgtcgatattaataatgaagtcacaagtcttccaggtagtgcatcttcattaaaagcagttgatattcccagttttgaagagagcaacattgctgtggaagaagaatttaaccagccactttctgtatccaactcttctctagttgtgagaaaagaacctgatgtacctgtgttctttccaagtggccagctggcagaaagtgtaagcatgtgtttacagactggaccaacagggggtgccagtaacaattctgaaacatcagaggaaccaaaaattgagcatgtaatgcaacccttgcttcatcaaccatcagataaccagaaaatttaccaggatttattgggtcaagtaaaccacctattaaatagttcctccaaggaaactgagcagccgtctaccaaagcagtaattatcagtcatgaatgcaccagaacccaaaacgtttaccatacaaagaaaaaaacacatcattcaagactggtggacaaagattgtgtccttaatgcaactcttaagcaactaagaagccttggagtaaaaattgattctcccactaaagtgaagaaaaatgcacataacgtggatcacgccagtgtgttggcatgcatcagcccagaagcagtgatctctggattaaactgcatgtcatttgctaatgttggcatgagcggcttaagccccaatggtgtggatttgagcatggaggcaaatgctatagctctgaaatatttaaatgaaaatcagctgtcacaactgtctgtcactcgatcgaaccaaaataattgtgacccattcagccttctccatattaatacagacagaagcacagtggggcttagtttaatttcaccaaacaacatgtcatttgcaaccaaaaaatatatgaagagatatggactcctacaaagcagtgacaatagtgaagatgaagaggaacctcccgacaatgcagatagcaagagtgaatatttattgaatcagaaccttaggtccatacccgaacagcttggtggtcagaaagagccttctaagaatgaccatgaaataattaattgttctaactgtgaatctgtggggaccaacgcagatacgccagtattgagaaatattacaaatgaagttttgcagacaaaagcaaaacagcagttgactgaaaagccagctttcttagtaaagaaccttaaaccaagtcctgcagtgaaccttcgaaccgggaaagcagagttcactcaacatcctgagaaagaaaatgaaggggacattacaatttttcctgaaagtttgcaaccttctgaaacgctaaagcagatgaatagcatgaattcagtaggcaccttcttagatgtaaaacgtctcagacagttaccaaaattattttaaccttttaactccctgcccttttaatacagggacagggtgtctcctgaagatacttagggaaaacaggagcctaccacaaggctcctgatcattctggagtcactgtttcttggtagcagccaattgggaagagtgacttctgtgagatggctggctggtgataggactaagttctcattgttcaaatagagctgttcaacatcactgaaacctttaagaaaagccctgagatcagttattcctacaagtttaagtagtagacagatactatccagctctaagtctcaactgctcttttatactgtacttttttttttgagacggagttttgctcttgtagcccaggctggagtgcaatggcaggatctcagatcactgcaacctctgcctcctgggttcaagcgattttcctgcttcatcttcccaggtagctgggattacaggcatgtgccacaacgcctggctaattttgtatttttagtagagactggtttctccatgttggtcaggctggtctcaaactcccgacctcaggtgatccgcccgcctcggcctcctaaagtgctgggattacaggcgtgagccactgcccagctatactgtatatttaagaaggtccagcatgttgcatctctgcattatcctatatcataaaagaagcataagttatcatggtgttgggtaaattagcgaaatcaaccgcttcctaagtttaagggaaaagttatttttaaaaacaacttaataaaaacttacactcttatacaagagtgtatttccccttaattaggatgcatgttgattaaactcgagatacagctttttgcagtatggtgggttggttttggtgtaacatcttcaacatgtcacactggctatcaaagaataagaaaattattgagtatgagtgtgttttataaactttctgagtttttcagatgtcttaatattttt

SEQ ID NO: 523 - protein, 1287 aa, Homo sapiens
MEPIYPFARPQMNTRFPSSRMVPFHFPPSKCALWNPTPTGDFIYLHLSYYRNPKLVVTEKTIRLAYRHANENKKNSSCFLLGSLTADEDEEGVTLTVDRFDPGREVPECLEITPTASLPGDFLIPCKVHTQELCSREMIVHSVDDFSSALKALQCHICSKDSLDCGKLLSLRVHITSRESLDSVEFDLHWAAVTLANNFKCTPVKPIPIIPTALARNLSSNLNISQVQGTYKYGYLTMDETRKLLLLLESDPKVYSLPLVGIWLSGITHIYSPQVWACCLRYIFNSSVQERVFSESGNFIIVLYSMTHKEPEFYECFPCDGKIPDFRFQLLTSKETLHLFKNVEPPDKNPIRCELSAESQNAETEFFSKASKNFSIKRSSQKLSSGKMPIHDHDSGVEDEDFSPRPIPSPHPVSQKISKIQPSVPELSLVLDGNFIESNPLPTPLEMVNNENPPLINHLEHLKPLQPQLYDEKHSPEVEAGEPSLRGIPNQLNQDKPALLRHCKVRQPPAYKKGNPHTRNSIKPSSHNGPSHDIFEKLQTVSAGNVQNEEYPIRPSTLNSRQSSLAPQSQPHDFVFSPHNSGRPMELQIPTPPLPSYCSTNVCRCCQHHSHIQYSPLNSWQGANTVGSIQDVQSEALQKHSLFHPSGCPALYCNAFCSSSSPIALRPQGDMGSCSPHSNIEPSPVARPPSHMDLCNPQPCTVCMHTPKTESDNGMMGLSPDAYRFLTEQDRQLRLLQAQIQRLLEAQSLMPCSPKTTAVEDTVQAGRQMELVSVEAQSSPGLHMRKGVSIAVSTGASLFWNAAGEDQEPDSQMKQDDTKISSEDMNFSVDINNEVTSLPGSASSLKAVDIPSFEESNIAVEEEFNQPLSVSNSSLVVRKEPDVPVFFPSGQLAESVSMCLQTGPTGGASNNSETSEEPKIEHVMQPLLHQPSDNQKIYQDLLGQVNHLLNSSSKETEQPSTKAVIISHECTRTQNVYHTKKKTHHSRLVDKDCVLNATLKQLRSLGVKIDSPTKVKKNAHNVDHASVLACISPEAVISGLNCMSFANVGMSGLSPNGVDLSMEANAIALKYLNENQLSQLSVTRSNQNNCDPFSLLHINTDRSTVGLSLISPNNMSFATKKYMKRYGLLQSSDNSEDEEEPPDNADSKSEYLLNQNLRSIPEQLGGQKEPSKNDHEIINCSNCESVGTNADTPVLRNITNEVLQTKAKQQLTEKPAFLVKNLKPSPAVNLRTGKAEFTQHPEKENEGDITIFPESLQPSETLKQMNSMNSVGTFLDVKRLRQLPKLF

SEQ ID NO: 524 - DNA, 2501 bp, Homo sapiens
gaacctcctcgcgactttccaaggtatctttcagatgaaggcattgaagcttgcacaagctctccagacaaagtcaatgtaaatgacatcatcctgattgctctcaatatctgagaacaattggcaagaaattcctccccagtgacatcaatagtggaaaggtagaaaagctcgaaggtccatgtgttttgcaaattcaaaaaattcgcaatgttgctgcaccaaaggataatgaagaatctcaggctgcaccaaggatgctgcgattacagatgactgatggtcatataagttgcacagcagtagaatttagttatatgtcaaaaataagcctgaacacaccacctggaactaaagttaagctctcaggcattgttgacataaaaaatggattcctgctcttgaatgactctaacaccacagttcttggtggtgaagtggaacaccttattgagaaatgggagttacagagaagcttatcaaaacacaatagaagcaatattggaactgaaggtggaccaccgccttttgtgccttttggacagaagtgtgtatctcatgtccaagtggatagcagagaacttgatcgaagaaaaacattgcaagttacaatgcctgtcaaacctacaaatgataatgatgaatttgaaaagcaaaggacggctgctattgctgaagttgcaaagagcaaggaaaccaagacatttggaggaggtggtggtggtgctagaagtaatctcaatatgaatgctgctggtaaccgaaatagggaagttttacagaaagaaaagtcaaccaaatcagagggaaaacatgaaggtgtctatagagaactggttgatgagaaagctctgaagcacataacggaaatgggcttcagtaaggaagcatcgaggcaagctcttatggataatggcaacaacttagaagcagcactgaacgtacttcttacaagcaataaacagaaacctgttatgggtcctcctctgagaggtagaggaaaaggcagggggcgaataagatctgaagatgaagaggacctgggaaatgcaaggccatcagcaccaagcacattatttgatttcttggaatctaaaatgggaactttgaatgtggaagaacctaaatcacagccacagcagcttcatcagggacaatacagatcatcaaatactgagcaaaatggagtaaaagataataatcatctgagacatcctcctcgaaatgataccaggcagccaagaaatgaaaaaccgcctcgttttcaaagagactcccaaaattcaaagtcagttttagaaggcagtggattacctagaaatagaggttctgaaagaccaagtacttcttcagtatctgaagtatgggctgaagacagaatcaaatgtgatagaccgtattctagatatgacagaactaaagatacttcatatcctttaggttctcagcatagtgatggtgcttttaaaaaaagagataactctatgcaaagcagatcaggaaaaggtccctcctttgcagaggcaaaagaaaatccacttcctcaaggatctgtagattataataatcaaaaacgtggaaaaagagaaagccaaacatctattcctgactatttttatgacaggaaatcacaaacaataaataatgaagctttcagtggtataaaaattgaaaaacattttaatgtaaatactgattatcagaatccagttcgaagtaatagtttcattggtgttccaaatggagaagtagaaatgccactgaaaggaagacgaataggacctattaagccagcaggacctgtcacagctgtaccctgtgatgataaaatattttacaatagtgggcccaaacgaagatctgggccaattaagccagaaaaaatactagaatcatctattcctatggagtatgcaaaaatgtggaaacctggagatgaatgttttgcactttattgggaagacaacaagttttaccgggcagaagttgaagccctccattcttcgggtatgacagcagttgttaaattcattgactacggaaactatgaagaggtgctactgagcaatatcaagcccattcaaacagaggcatgggaggaagaaggcacctacgatcaaactctggagttccgtaggggaggtgatggccagccaagacgatccactcggccaacccaacagttttaccaaccaccccgggctcggaactaataggaaaagactctttgtgaagaaacgagccagtgactgaaacaccctggtggaaacctgttgacagaccttccactttctcttcagaataagtagctgtggtggatattattatttgaagaaagaaaaaacagattttagggtggaaaaaacagtcaactcacacaaagaatggaaaaaaatactgagttaaattaagcaaataccttttacaagtgaaaggaagaatttttcttctgccgtcaataaaaccattgtgctattattgtttaaaaaaaaaaaaaaaaa

SEQ ID NO: 525 - protein, 651 aa, Homo sapiens
MLRLQMTDGHISCTAVEFSYMSKISLNTPPGTKVKLSGIVDIKNGFLLLNDSNTTVLGGEVEHLIEKWELQRSLSKHNRSNIGTEGGPPPFVPFGQKCVSHVQVDSRELDRRKTLQVTMPVKPTNDNDEFEKQRTAAIAEVAKSKETKTFGGGGGGARSNLNMNAAGNRNREVLQKEKSTKSEGKHEGVYRELVDEKALKHITEMGFSKEASRQALMDNGNNLEAALNVLLTSNKQKPVMGPPLRGRGKGRGRIRSEDEEDLGNARPSAPSTLFDFLESKMGTLNVEEPKSQPQQLHQGQYRSSNTEQNGVKDNNHLRHPPRNDTRQPRNEKPPRFQRDSQNSKSVLEGSGLPRNRGSERPSTSSVSEVWAEDRIKCDRPYSRYDRTKDTSYPLGSQHSDGAFKKRDNSMQSRSGKGPSFAEAKENPLPQGSVDYNNQKRGKRESQTSIPDYFYDRKSQTINNEAFSGIKIEKHFNVNTDYQNPVRSNSFIGVPNGEVEMPLKGRRIGPIKPAGPVTAVPCDDKIFYNSGPKRRSGPIKPEKILESSIPMEYAKMWKPGDECFALYWEDNKFYRAEVEALHSSGMTAVVKFIDYGNYEEVLLSNIKPIQTEAWEEEGTYDQTLEFRRGGDGQPRRSTRPTQQFYQPPRARN

SEQ ID NO: 526 - DNA, 10697 bp, Homo sapiens
cacagtggtcctccgccggctacggcgctgcgtcactggtttgcaggcgctttcctcttggaagtggcgactgctgcgggcctgagcgctggtctcacgcgcctcgggagccaggttggcggcgcgatgaggcgcagcaaggctgacgtggagcggtacatcgcctcggtgcagggctccaccccgtcgcctcgacagaagtcaatgaaaggattctattttgcaaagctgtattatgaagctaaagaatatgatcttgctaaaaaatacatatgtacttacattaatgtgcaagagagggatcccaaagctcacagatttctgggtcttctttatgaattggaagaaaacacagacaaagccgttgaatgttacaggcgttcagtggaattaaacccaacacaaaaagatcttgtgttgaagattgcagaattgctttgtaaaaatgatgttactgatggaagagcaaaatactggcttgaaagagcagccaaacttttcccaggaagtcctgcaatttataaactaaaggaacagcttctagattgtgaaggtgaagatggatggaataaactttttgacttgattcagtcagaactttatgtaagacctgatgacgtccatgtgaacatccggctagtggaggtgtatcgctcaactaaaagattgaaggatgctgtggcccactgccatgaggcagagaggaacatagctttgcgttcaagtttagaatggaattcgtgtgttgtacagacccttaaggaatatctggagtctttacagtgtttggagtctgataaaagtgactggcgagcaaccaatacagacttactgctggcctatgctaatcttatgcttcttacgctttccactagagatgtgcaggaaagtagagaattactgcaaagttttgatagtgctcttcagtctgtgaaatctttgggtggaaatgatgaactgtcagctactttcttagaaatgaaaggacatttctacatgcatgctggttctctgcttttgaagatgggtcagcatagtagtaatgttcaatggcgagctctttctgagctggctgcattgtgctatctcatagcatttcaggttccaagaccaaagattaaattaataaaaggtgaagctggacaaaatctgctggaaatgatggcctgtgaccgactgagccaatcagggcacatgttgctaaacttaagtcgtggcaagcaagattttttaaaagagattgttgaaacttttgccaacaaaagcgggcagtctgcattatatgatgctctgttttctagtcagtcacctaaggatacatcttttcttggtagcgatgatattggaaacattgatgtacgagaaccagagcttgaagatttgactagatacgatgttggtgctattcgagcacataatggtagtcttcagcaccttacttggcttggcttacagtggaattcattgcctgctttacctggaatccgaaaatggctaaaacagcttttccatcatttgccccatgaaacctcaaggcttgaaacaaatgcacctgaatcaatatgtattttagatcttgaagtatttctccttggagtagtatataccagccacttacaattaaaggagaaatgtaattctcaccacagctcctatcagccgttatgcctgccccttcctgtgtgtaaacagctttgtacagaaagacaaaaatcttggtgggatgcggtttgtactctgattcacagaaaagcagtacctggaaacgtagcaaaattgagacttctagttcagcatgaaataaacactctaagagcccaggaaaaacatggccttcaacctgctctgcttgtacattgggcagaatgccttcagaaaacgggcagcggtcttaattctttttatgatcaacgagaatacatagggagaagtgttcattattggaagaaagttttgccattgttgaagataataaaaaagaagaacagtattcctgaacctattgatcctctgtttaaacattttcatagtgtagacattcaggcatcagaaattgttgaatatgaagaagacgcacacataacttttgctatattggatgcagtaaatggaaatatagaagatgctgtgactgcttttgaatctataaaaagtgttgtttcttattggaatcttgcactgatttttcacaggaaggcagaagacattgaaaatgatgccctttctcctgaagaacaagaagaatgcaaaaattatctgagaaagaccagggactacctaataaagattatagatgacagtgattcaaatctttcagtggtcaagaaattgcctgtgcccctggagtctgtaaaagagatgcttaattcagtcatgcaggaactcgaagactatagtgaaggaggtcctctctataaaaatggttctttgcgaaatgcagattcagaaataaaacattctacaccgtctcctaccaaatattcactatcaccaagtaaaagttacaagtattctcccaaaacaccacctcgatgggcagaagatcagaattctttactgaaaatgatttgccaacaagtagaggccattaagaaagaaatgcaggagttgaaactaaatagcagtaactcagcatcccctcatcgttggcccacagagaattatggaccagactcggtgcctgatggatatcaggggtcacagacatttcatggggctccactaacagttgcaactactggcccttcagtatattatagtcagtcaccagcatataattcccagtatcttctcagaccagcagctaatgttactcccacaaagggcccagtctatggcatgaataggcttccaccccaacagcatatttatgcctatccgcaacagatgcacacaccgccagtgcaaagctcatctgcttgtatgttctctcaggagatgtatggtcctcctgcattgcgttttgagtctcctgcaacgggaattctatcgcccaggggtgatgattactttaattacaatgttcaacagacaagcacaaatccacctttgccagaaccaggatatttcacaaaacctccgattgcagctcatgcttcaagatctgcagaatctaagactatagaatttgggaaaactaattttgttcagcccatgccgggtgaaggattaaggccatctttgccaacacaagcacacacaacacagccaactccttttaaatttaactcaaatttcaaatcaaatgatggtgacttcacgttttcctcaccacaggttgtgacacagccccctcctgcagcttacagtaacagtgaaagccttttaggtctcctgacttcagataaacccttgcaaggagatggctatagtggagccaaaccaattcctggtggtcaaaccattgggcctcgaaatacattcaattttggaagcaaaaatgtgtctggaatttcatttacagaaaacatggggtcgagtcagcaaaagaattctggttttcggcgaagtgatgatatgtttactttccatggtccagggaaatcagtatttggaacacccactttagagacagcaaacaagaatcatgagacagatggaggaagtgcccatggggatgatgatgatgacggtcctcactttgagcctgtagtacctcttcctgataagattgaagtaaaaactggtgaggaagatgaagaagaattcttttgcaaccgcgcgaaattgtttcgtttcgatgtagaatccaaagaatggaaagaacgtgggattggcaatgtaaaaatactgaggcataaaacatctggtaaaattcgccttctaatgagacgagagcaagtattgaaaatctgtgcaaatcattacatcagtccagatatgaaattgacaccaaatgctggatcagacagatcttttgtatggcatgcccttgattatgcagatgagttgccaaaaccagaacaacttgctattaggttcaaaactcctgaggaagcagcactttttaaatgcaagtttgaagaagcccagagcattttaaaagccccaggaacaaatgtagccatggcgtcaaatcaggctgtcagaattgtaaaagaacccacaagtcatgataacaaggatatttgcaaatctgatgctggaaacctgaattttgaatttcaggttgcaaagaaagaagggtcttggtggcattgtaacagctgctcattaaagaatgcttcaactgctaagaaatgtgtatcatgccaaaatctaaacccaagcaataaagagctcgttggcccaccattagctgaaactgtttttactcctaaaaccagcccagagaatgttcaagatcgatttgcattggtgactccaaagaaagaaggtcactgggattgtagtatttgtttagtaagaaatgaacctactgtatctaggtgcattgcgtgtcagaatacaaaatctgctaacaaaagtggatcttcatttgttcatcaagcttcatttaaatttggccagggagatcttcctaaacctattaacagtgatttcagatctgttttttctacaaaggaaggacagtgggattgcagtgcatgtttggtacaaaatgaggggagctctacaaaatgtgctgcttgtcagaatccgagaaaacagagtctacctgctacttctattccaacacctgcctcttttaagtttggtacttcagagacaagtaaaactctaaaaagtggatttgaagacatgtttgctaagaaggaaggacagtgggattgcagttcatgcttagtgcgaaatgaagcaaatgctacaagatgtgttgcttgtcagaatccggataaaccaagtccatctacttctgttccagctcctgcctcttttaagtttggtacttcagagacaagcaaggctccaaagagcggatttgagggaatgttcactaagaaggagggacagtgggattgcagtgtgtgcttagtaagaaatgaagccagtgctaccaaatgtattgcttgtcagaatccaggtaaacaaaatcaaactacttctgcagtttcaacacctgcctcttcagagacaagcaaggctccaaagagcggatttgagggaatgttcactaagaaggagggacagtgggattgcagtgtgtgcttagtaagaaatgaagccagtgctaccaaatgtattgcttgtcagaatccaggtaaacaaaatcaaactacttctgcagtttcaacacctgcctcttcagagacaagcaaggctccaaagagcggatttgagggaatgttcactaagaaggaaggacagtgggattgcagtgtgtgcttagtaagaaatgaagccagtgctaccaaatgtattgcttgtcagtgtccaagtaaacaaaatcaaacaactgcaatttcaacacctgcctcttcggagataagcaaggctccaaagagtggatttgaaggaatgttcatcaggaaaggacagtgggattgtagtgtttgctgtgtacaaaatgagagttcttccttaaaatgtgtggcttgtgatgcctctaaaccaactcataaacctattgcagaagctccttcagctttcacactgggctcagaaatgaagttgcatgactcttctggaagtcaggtgggaacaggatttaaaagtaatttctcagaaaaagcttctaagtttggcaatacagagcaaggattcaaatttgggcatgtggatcaagaaaattcaccttcatttatgtttcagggttcttctaatacagaatttaagtcaaccaaagaaggattttccatccctgtgtctgctgatggatttaaatttggcatttcggaaccaggaaatcaagaaaagaaaagtgaaaagcctcttgaaaatggtactggcttccaggctcaggatattagtggccagaagaatggccgtggtgtgatttttggccaaacaagtagcacttttacatttgcagatcttgcaaaatcaacttcaggagaaggatttcagtttggcaaaaaagaccccaatttcaagggattttcaggtgctggagaaaaattattctcatcacaatacggtaaaatggccaataaagcaaacacttccggtgactttgagaaagatgatgatgcctataagactgaggacagcgatgacatccattttgaaccagtagttcaaatgcccgaaaaagtagaacttgtaacaggagaagaagatgaaaaagttctgtattcacagcgggtaaaactatttagatttgatgctgaggtaagtcagtggaaagaaaggggcttggggaacttaaaaattctcaaaaacgaggtcaatggcaaactaagaatgctgatgcgaagagaacaagtactaaaagtgtgtgctaatcattggataacgactacgatgaacctgaagcctctctctggatcagatagagcatggatgtggttagccagtgatttctctgatggtgatgccaaactagagcagttggcagcaaaatttaaaacaccagagctggctgaagaattcaagcagaaatttgaggaatgccagcggcttctgttagacataccacttcaaactccccataaacttgtagatactggcagagctgccaagttaatacagagagctgaagaaatgaagagtggactgaaagatttcaaaacatttttgacaaatgatcaaacaaaagtcactgaggaagaaaataagggttcaggtacaggtgcggccggtgcctcagacacaacaataaaacccaatcctgaaaacactgggcccacattagaatgggataactatgatttaagggaagatgctttggatgatagtgtcagtagtagctcagtacatgcttctccattggcaagtagccctgtgagaaaaaatcttttccgttttggtgagtcaacaacaggatttaacttcagttttaaatctgctttgagtccatctaagtctcctgccaagttgaatcagagtgggacttcagttggcactgatgaagaatctgatgttactcaagaagaagagagagatggacagtactttgaacctgttgttcctttacctgatctagttgaagtatccagtggtgaggaaaatgaacaagttgtttttagtcacagggcaaaactctacagatatgataaagatgttggtcaatggaaagaaaggggcattggtgatataaagattttacagaattatgataataagcaagttcgtatagtgatgagaagggaccaagtattaaaactttgtgccaatcacagaataactccagacatgactttgcaaaatatgaaagggacagaaagagtatggttgtggactgcatgtgattttgcagatggagaaagaaaagtagagcatttagctgttcgttttaaactacaggatgttgcagactcgtttaagaaaatttttgatgaagcaaaaacagcccaggaaaaagattctttgataacacctcatgtttctcggtcaagcactcccagagagtcaccatgtggcaaaattgctgtagctgtattagaagaaaccacaagagagaggacagatgttattcagggtgatgatgtagcagatgcaacttcagaagttgaagtgtctagcacatctgaaacaacaccaaaagcagtggtttctcctccaaagtttgtatttggttcagagtctgttaaaagcatttttagtagtgaaaaatcaaaaccatttgcattcggcaacagttcagccactgggtctttgtttggatttagttttaatgcacctttgaaaagtaacaatagtgaaactagttcagtagcccagagtggatctgaaagcaaagtggaacctaaaaaatgtgaactgtcaaagaactctgatatcgaacagtcttcagatagcaaagtcaaaaatctctttgcttcctttccaacggaagaatcttcaatcaactacacatttaaaacaccagaaaaggcaaaagagaagaaaaaacctgaagattctccctcagatgatgatgttctcattgtatatgaactaactccaaccgctgagcagaaagcccttgcaaccaaacttaaacttcctccaactttcttctgctacaagaatagaccagattatgttagtgaagaagaggaggatgatgaagatttcgaaacagctgtcaagaaacttaatggaaaactatatttggatggctcagaaaaatgtagacccttggaagaaaatacagcagataatgagaaagaatgtattattgtttgggaaaagaaaccaacagttgaagagaaggcaaaagcagatacgttaaaacttccacctacatttttttgtggagtctgtagtgatactgatgaagacaatggaaatggggaagactttcaatcagagcttcaaaaagttcaggaagctcaaaaatctcagacagaagaaataactagcacaactgacagtgtatatacaggtgggactgaagtgatggtaccttctttctgtaaatctgaagaacctgattctattaccaaatccattagttcaccatctgtttcctctgaaactatggacaaacctgtagatttgtcaactagaaaggaaattgatacagattctacaagccaaggggaaagcaagatagtttcatttggatttggaagtagcacagggctctcatttgcagacttggcttccagtaattctggagattttgcttttggttctaaagataaaaatttccaatgggcaaatactggagcagctgtgtttggaacacagtcagtcggaacccagtcagccggtaaagttggtgaagatgaagatggtagtgatgaagaagtagttcataatgaagatatccattttgaaccaatagtgtcactaccagaggtagaagtaaaatctggagaagaagatgaagaaattttgtttaaagagagagccaaactttatagatgggatcgggatgtcagtcagtggaaggagcgcggtgttggagatataaagattctttggcatacaatgaagaattattaccggatcctaatgagaagagaccaggtttttaaagtgtgtgcaaaccacgttattactaaaacaatggaattaaagcccttaaatgtttcaaataatgctttagtttggactgcctcagattatgctgatggagaagcaaaagtagaacagcttgcagtgagatttaaaactaaagaagtagctgattgtttcaagaaaacatttgaagaatgtcagcagaatttaatgaaactccagaaaggacatgtatcactggcagcagaattatcaaaggagaccaatcctgtggtgttttttgatgtttgtgcggacggtgaacctctagggcggataactatggaattattttcaaacattgttcctcggactgctgagaacttcagagcactatgcactggagagaaaggctttggtttcaagaattccatttttcacagagtaattccagattttgtttgccaaggaggagatatcaccaaacatgatggaacaggcggacagtccatttatggagacaaatttgaagatgaaaattttgatgtgaaacatactggtcctggtttactatccatggccaatcaaggccagaataccaataattctcaatttgttataacactgaagaaagcagaacatttggactttaagcatgtagtatttgggtttgttaaggatggcatggatactgtgaaaaagattgaatcatttggttctcccaaagggtctgtttgtcgaagaataactatcacagaatgtggacagatataaaatcattgttgttcatagaaaatttcatctgtataagcagttggattgaagcttagctattacaatttgatagttatgttcagcttttgaaaatggacgtttccgatttacaaatgtaaaattgcagcttatagctgttgtcactttttaatgtgttataattgaccttgcatggtgtgaaataaaagtttaaacactggtgatttcaggtgtacttgtgtttatgtactcctgacgtattaaaatggaataatactaatcttgttaaaagcaatagacctcaaactattgaaggaatatgatatatgcaatttaattttaattccttttaagatatttggacttcctgcatggatatacttaccatttgaataaagggaccacaacttggataatttaattttaggtttgaaatatatttggtaatcttaactattggtgtactcatttatgcatagagactcgtttatgaatgggtagagccacagaacgtatagagttaaccaaagtgctcttctctagaatctttacacctcctgtgtggttacaagttaactttgtaagtagcgtaccttccttccttaaaatatctagcttcctgtgccctttcatagatattcgattaatttttacattttaaacaagttgactatttcctttaggggttttgtttcaaacttttctgtcatctgtctctactacctcagaaactgcagcttggttctgatgatagaaattgaatttttccttgtagttattgtgataaagtatgaatatttttagaaagtctataccatgttctttcgttaaagatttgctttatacaagattgttgcagtacctttttctggtaaattttgtagcagaaataaaatgacaattcctaagagccaaaa

SEQ ID NO: 527 - protein, 3224 aa, Homo sapiens
MRRSKADVERYIASVQGSTPSPRQKSMKGFYFAKLYYEAKEYDLAKKYICTYINVQERDPKAHRFLGLLYELEENTDKAVECYRRSVELNPTQKDLVLKIAELLCKNDVTDGRAKYWLERAAKLFPGSPAIYKLKEQLLDCEGEDGWNKLFDLIQSELYVRPDDVHVNIRLVEVYRSTKRLKDAVAHCHEAERNIALRSSLEWNSCVVQTLKEYLESLQCLESDKSDWRATNTDLLLAYANLMLLTLSTRDVQESRELLQSFDSALQSVKSLGGNDELSATFLEMKGHFYMHAGSLLLKMGQHSSNVQWRALSELAALCYLIAFQVPRPKIKLIKGEAGQNLLEMMACDRLSQSGHMLLNLSRGKQDFLKEIVETFANKSGQSALYDALFSSQSPKDTSFLGSDDIGNIDVREPELEDLTRYDVGAIRAHNGSLQHLTWLGLQWNSLPALPGIRKWLKQLFHHLPHETSRLETNAPESICILDLEVFLLGVVYTSHLQLKEKCNSHHSSYQPLCLPLPVCKQLCTERQKSWWDAVCTLIHRKAVPGNVAKLRLLVQHEINTLRAQEKHGLQPALLVHWAECLQKTGSGLNSFYDQREYIGRSVHYWKKVLPLLKIIKKKNSIPEPIDPLFKHFHSVDIQASEIVEYEEDAHITFAILDAVNGNIEDAVTAFESIKSVVSYWNLALIFHRKAEDIENDALSPEEQEECKNYLRKTRDYLIKIIDDSDSNLSVVKKLPVPLESVKEMLNSVMQELEDYSEGGPLYKNGSLRNADSEIKHSTPSPTKYSLSPSKSYKYSPKTPPRWAEDQNSLLKMICQQVEAIKKEMQELKLNSSNSASPHRWPTENYGPDSVPDGYQGSQTFHGAPLTVATTGPSVYYSQSPAYNSQYLLRPAANVTPTKGPVYGMNRLPPQQHIYAYPQQMHTPPVQSSSACMFSQEMYGPPALRFESPATGILSPRGDDYFNYNVQQTSTNPPLPEPGYFTKPPIAAHASRSAESKTIEFGKTNFVQPMPGEGLRPSLPTQAHTTQPTPFKFNSNFKSNDGDFTFSSPQVVTQPPPAAYSNSESLLGLLTSDKPLQGDGYSGAKPIPGGQTIGPRNTFNFGSKNVSGISFTENMGSSQQKNSGFRRSDDMFTFHGPGKSVFGTPTLETANKNHETDGGSAHGDDDDDGPHFEPVVPLPDKIEVKTGEEDEEEFFCNRAKLFRFDVESKEWKERGIGNVKILRHKTSGKIRLLMRREQVLKICANHYISPDMKLTPNAGSDRSFVWHALDYADELPKPEQLAIRFKTPEEAALFKCKFEEAQSILKAPGTNVAMASNQAVRIVKEPTSHDNKDICKSDAGNLNFEFQVAKKEGSWWHCNSCSLKNASTAKKCVSCQNLNPSNKELVGPPLAETVFTPKTSPENVQDRFALVTPKKEGHWDCSICLVRNEPTVSRCIACQNTKSANKSGSSFVHQASFKFGQGDLPKPINSDFRSVFSTKEGQWDCSACLVQNEGSSTKCAACQNPRKQSLPATSIPTPASFKFGTSETSKTLKSGFEDMFAKKEGQWDCSSCLVRNEANATRCVACQNPDKPSPSTSVPAPASFKFGTSETSKAPKSGFEGMFTKKEGQWDCSVCLVRNEASATKCIACQNPGKQNQTTSAVSTPASSETSKAPKSGFEGMFTKKEGQWDCSVCLVRNEASATKCIACQNPGKQNQTTSAVSTPASSETSKAPKSGFEGMFTKKEGQWDCSVCLVRNEASATKCIACQCPSKQNQTTAISTPASSEISKAPKSGFEGMFIRKGQWDCSVCCVQNESSSLKCVACDASKPTHKPIAEAPSAFTLGSEMKLHDSSGSQVGTGFKSNFSEKASKFGNTEQGFKFGHVDQENSPSFMFQGSSNTEFKSTKEGFSIPVSADGFKFGISEPGNQEKKSEKPLENGTGFQAQDISGQKNGRGVIFGQTSSTFTFADLAKSTSGEGFQFGKKDPNFKGFSGAGEKLFSSQYGKMANKANTSGDFEKDDDAYKTEDSDDIHFEPVVQMPEKVELVTGEEDEKVLYSQRVKLFRFDAEVSQWKERGLGNLKILKNEVNGKLRMLMRREQVLKVCANHWITTTMNLKPLSGSDRAWMWLASDFSDGDAKLEQLAAKFKTPELAEEFKQKFEECQRLLLDIPLQTPHKLVDTGRAAKLIQRAEEMKSGLKDFKTFLTNDQTKVTEEENKGSGTGAAGASDTTIKPNPENTGPTLEWDNYDLREDALDDSVSSSSVHASPLASSPVRKNLFRFGESTTGFNFSFKSALSPSKSPAKLNQSGTSVGTDEESDVTQEEERDGQYFEPVVPLPDLVEVSSGEENEQVVFSHRAKLYRYDKDVGQWKERGIGDIKILQNYDNKQVRIVMRRDQVLKLCANHRITPDMTLQNMKGTERVWLWTACDFADGERKVEHLAVRFKLQDVADSFKKIFDEAKTAQEKDSLITPHVSRSSTPRESPCGKIAVAVLEETTRERTDVIQGDDVADATSEVEVSSTSETTPKAVVSPPKFVFGSESVKSIFSSEKSKPFAFGNSSATGSLFGFSFNAPLKSNNSETSSVAQSGSESKVEPKKCELSKNSDIEQSSDSKVKNLFASFPTEESSINYTFKTPEKAKEKKKPEDSPSDDDVLIVYELTPTAEQKALATKLKLPPTFFCYKNRPDYVSEEEEDDEDFETAVKKLNGKLYLDGSEKCRPLEENTADNEKECIIVWEKKPTVEEKAKADTLKLPPTFFCGVCSDTDEDNGNGEDFQSELQKVQEAQKSQTEEITSTTDSVYTGGTEVMVPSFCKSEEPDSITKSISSPSVSSETMDKPVDLSTRKEIDTDSTSQGESKIVSFGFGSSTGLSFADLASSNSGDFAFGSKDKNFQWANTGAAVFGTQSVGTQSAGKVGEDEDGSDEEVVHNEDIHFEPIVSLPEVEVKSGEEDEEILFKERAKLYRWDRDVSQWKERGVGDIKILWHTMKNYYRILMRRDQVFKVCANHVITKTMELKPLNVSNNALVWTASDYADGEAKVEQLAVRFKTKEVADCFKKTFEECQQNLMKLQKGHVSLAAELSKETNPVVFFDVCADGEPLGRITMELFSNIVPRTAENFRALCTGEKGFGFKNSIFHRVIPDFVCQGGDITKHDGTGGQSIYGDKFEDENFDVKHTGPGLLSMANQGQNTNNSQFVITLKKAEHLDFKHVVFGFVKDGMDTVKKIESFGSPKGSVCRRITITECGQI

SEQ ID NO: 528 - DNA, 2002 bp, Homo sapiens
ctcttctcacatcagcgggtccaggcccaaccgacagactatgggggctccttcaccaggcgctgcgtggagtggctgctgggcctctacttcctcagccacatccccatcaccctgttcatggacctgcaggcggtcgtgccgcgcgagctctacccagtcgagtttagaaacctgctgaagtggtatgctaaggagttcaaagacccactgctacaggagcccccagcctggtttaagtcctttctgttttgcgagcttgtgtttcagctgcctttctttcccattgcaacgtatgccttcctcaaaggaagctgcaagtggattcgaactcctgcaatcatctactctgttcacaccatgacaaccttaattctgatactctccacatttctgtttgaggatttctccaaagccagtggtttcaagggacaaagacctgagactttgcatgaacggttaacccttgtgtctgtctatgccccctacttactcatcccattcatacttttaattttcatgttgcggagcccctactacaagtatgaagagaaaagaaaaaaaaaatgaaggaaacaaccactggcccagggtagagatgcctacagggtggttgcttgttggatacatacaggaacactgctcagaacccacgtcttcagcagcatttgaaacactggcagcaatgcacaagagcaagatggtgtcaggaaccatgtcaaaccctcaccttcttccattttttttttttttttgagacagtctcactctgttgccaggctggagtaaagggcagtggcatgatctcggctcactgcaacctccgcctcctgggctcaagccatcttccttagcctcccaagtagctagaactacaggtgtgtaccaacacgtatggctaatttgttttgttttttttgtgtgtgtggagacagggttttgccatgttgcccaggttggtctcgaacgcctaggctcaagtgatctgcccacctcagtctccctaagtgctgggattacagacgtgaaccactgggcccagcccaaaccttcaccttctaagggcactgggatgaacagaccgatcggcttgagggtgggcaaaggggtgtgggctaggttataaggaagtggtaccaaataactgtgttgcctgagttccaccgcaagattactaaaagcaggaccagaccagaaactgctaaagaacatggcctgtttgacatgttcatgagtcacctgacccacagcatatatgcttatgactaaaccctccactcctgattctcaagagtgtatcacctgtcagcaaaatgaatagtgggatattttgggccattttaaatgtgaaattttgcctctttaatgttaattcaaaactatatcaatgttttcttgttcccacctctaacccaaggaaaaaagagaaaacatactatgcaaaggaagtttaaacttaagttttccttaagggtcagcccaacaatgactttcagtcaaatggattaaactggaaaatgtttttgtttctgttgtaaacagatcatcctaggcgaaagttttttttgtttgtttgcttttaaattagtttatttctaaatcttagtcttccacatttctagaggccacctgacacaagtccctgtatctgaagtctagcatctcaaggctgatctggaagtgtgctagtatgctccctagtggataacttaatcttttaatacagttccgtcattcccatcttgttttcagaagagaaggtggctacagccaggcataacttatccactgtgtgcatagagggtctcttcacgttgatgcttggcattccatcagctttctctaagtctttgctcaagttcaaggttaaaatgatgttagacaacaggtcccagtcagtcccctctattttcacccattttgctcacaagccatattggcccgattagtggtactgtctgactcacgtgtgtgatccaaataaaggtagctgccgggaatt

SEQ ID NO: 529 - protein, 189 aa, Homo sapiens
LFSHQRVQAQPTDYGGSFTRRCVEWLLGLYFLSHIPITLFMDLQAVVPRELYPVEFRNLLKWYAKEFKDPLLQEPPAWFKSFLFCELVFQLPFFPIATYAFLKGSCKWIRTPAIIYSVHTMTTLILILSTFLFEDFSKASGFKGQRPETLHERLTLVSVYAPYLLIPFILLIFMLRSPYYKYEEKRKKK

SEQ ID NO: 530 - DNA, 1061 bp, Homo sapiens
taaattttatttttatgccctacttaatatttgcatcagtataatatatatcagtgagtcttacagaaagatatgcttccataatatgaaatagattattcaataattgagaaactttatgtgtaatcatgagagtataagagtctggattatctaacattgttagccctgtgtatgtacagttcaaaaagttcatttataaaagtagtttcctgttcctagtgtgatgtatcacaaattgtgctgaggttattttagtatgtgtgtttcattcccgtgcttctgttctgaagtcctggaatacagttttcagtgtaattaattcaactgcacttaacactaatgtccgtgttggtatagaaatgtctaaatcctatactctagttgaggaagatcttccataattttatggtattacacagggaaagctatgactgcaggatcagtctaactatactattaggtgcatgtattctcttttcactaacttatacttgtctatctagaatacaggtcttccagtcagctggtcatttaccaggtgtggacttaagttgctgggcttgcagtaagaattgccagccactcattgtgcgggtctgcgtggagctttaatcagaaaaagcctccactttctgtattatgttaacattggctcatgcatataactatctgctgctgatgtagttctccatcttcaagatttagagtcggttaaccaggtcattacatcttaatttaataacaagcattactgtagagtgattgtgtatagatctgttagctgtcagggtgtgttttttttaacctgttgtgtgcgtgtgggggttaggattagtaaggtgaactgttcaggaattctctgcactagctgtgcagaagagcagataactagcgctgctctggcattaatcccaggaaccactagcagtagtggggcgccgccaatctaacatgagcacaggtgcttcatgacaaacattactagcatgttcaactgcaccatgttctggcactgtattttgaatgacattaatttattaaataaattgtatatattc

SEQ ID NO: 531 - DNA, 706 bp, Homo sapiens
atgaaagtctaatgactaccttctcattgtataaaaaacacagttctttgaatagagagacccttttctccaatgctaccaatcacattccacttaccacagtttaacatacatcctctagtcacctttccgtacgaatatacatacacataaaaacactttttacataaataggatctcatattctgtagctttttaaaattttggtctcaaaaaaagataacaggtctttaaatttctttaatggttgaatatgattaaatactatgaaaatgccattatttattcccttaatttttttcctctcgctattacattgccaaagtaaacatcctattcagatgtctttgtgcatgtgtgtgaatatttctttagtctggagtccagtaaggtggatttttggatcaaagggtttgttctctgtccaccttcagtcttcccaaaggccttcataactgtattttcaccaagtgtatggagaatgttcatttccccatataaccatacctacacttgatagtttttatctgttgggcgaaaaagaaccttttcttattttgcatttccctgattataaaaaaaaatggtgagattggggttattttcatgtttattggccatttatagtttactgtggattgtttgtatcccttacctgctttctattgggttatgtgtggatatattggtttttatttgtccagca

SEQ ID NO: 532 - DNA, 2294 bp, Homo sapiens
gggcgtcgcgccctggggccggggccgggcggcaccgcggtgcgcaagcgcaaccgtcggtgggtcggggatcggtcgcctgagaggtatcacctcttctgggctcaagatggacaacaagaagcgcctggcctacgccatcatccagttcctgcatgaccagctccggcacgggggcctctcgtccgatgctcaggagagcttggaagtcgccatccagtgcctggagactgcgtttggggtgacggtagaagacagtgaccttgcgctccctcagactctgccggagatatttgaagcggctgccacgggcaaggagatgccgcaggacctgaggagccccgcgcgaaccccgccttccgaggaggactcagcagaggcagagcgcctcaaaaccgaaggaaacgagcagatgaaagtggaaaactttgaagctgccgtgcatttctacggaaaagccatcgagctcaacccagccaacgccgtctatttctgcaacagagccgcagcctacagcaaactcggcaactacgcaggcgcggtgcaggactgtgagcgggccatctgcattgacccggcctacagcaaggcctacggcaggatgggcctggcgctctccagcctcaacaagcacgtggaggccgtggcttactacaagaaggctctggagctggaccccgacaacgagacatacaagtccaacctcaagatagcggagctgaagctgcgggaggcccccagccccacgggaggcgtgggcagcttcgacatcgccggcctgctgaacaaccctggcttcatgagcatggcttcgaacctaatgaacaatccccagattcagcagctcatgtccggcatgatttcgggtggcaacaaccccttgggaactcccggcaccagcccctcgcagaacgacctggccagcctcatccaggcgggccagcagtttgcccagcagatgcagcagcagaacccagagttgatagagcagctcaggagccagatccggagtcggacgcccagcgccagcaacgacgaccagcaggagtgacgctgcctgctcccggtgtgaccgcgtccttccctggccgacccgaaggaagccttctggttgtctgccacttcctcctgttggactgcctgagagaggggaagagagagacctcggacctgcatgtcaagatggattttccccttttatctctgccctcctccactccctttttgtaactcccttacagcccccagacccttcttgaaacgagagccagcaagctgagcacagaccagcagcgacctcccttccagcccccagaaagctcggtcacttgagtgttttctagaatcctggggtgctcccgggccgctctcagagaagtggcaggtttcacgttcagccgtgtggcggatcgtgtggcttccaaagccttttacagcccccgccccccatcccgtggtctgtctgcaggaactctcccgtctgtgagaagcctctttccgagtcgacctcccggccaccccggccctgtgcctgctcggaagagctcactgccagctgcggcctgggcaccgcgggccatgtgtgtttgcatgaggaactctttagtggcagacacctaagagacggctgcggtcaccccacgcctccgcggctcaggagccgtcctgggtgcataggaccagtttctgtgacttttctccagttgggcatgttgacagacatgtttcccctcctcccaccctcattttctggtcctcgcgactgagagccaggggcgacatcatgaccttctgtcccggccgccttagccccgggcacagggaaggcagctgggccgtttctgtctgtgtcccatcctgctgtccttctgtcctggatgtttcatgggcccggggccccccagggaagcttacccctcctgtgctgggtggaggccacgggacacctcaggtgccacccaccttggccctaaaacagccaccaggaaagcagccggagagccggacagcaggcagcctgtctgggttcctgaggcctgggggtggcagacgagcccacggcgccgtggtcccagcagcagggttgtcagtcggagcatcctggggctccctggctcctggccgtctgtgaggtaggcgcagtaccgtgtatcgtaggtagcagtaggaacgggggccgccgcggccctgcagccgctcatggcggtgaggtgtgtgccaagcccacccggggtgcagggcgtgacgtgtggggaataaataggcgttgtgacctctaaaaaaaaaaaaaaaaa

SEQ ID NO: 533 - protein, 313 aa, Homo sapiens
MDNKKRLAYAIIQFLHDQLRHGGLSSDAQESLEVAIQCLETAFGVTVEDSDLALPQTLPEIFEAAATGKEMPQDLRSPARTPPSEEDSAEAERLKTEGNEQMKVENFEAAVHFYGKAIELNPANAVYFCNRAAAYSKLGNYAGAVQDCERAICIDPAYSKAYGRMGLALSSLNKHVEAVAYYKKALELDPDNETYKSNLKIAELKLREAPSPTGGVGSFDIAGLLNNPGFMSMASNLMNNPQIQQLMSGMISGGNNPLGTPGTSPSQNDLASLIQAGQQFAQQMQQQNPELIEQLRSQIRSRTPSASNDDQQE

SEQ ID NO: 534 - DNA, 1983 bp, Homo sapiens
ggagtcggcggctcagttgtccatgaccctgaaggtccaggagtacccgaccctcaaggtgccctacgagacgctgaacaaacgctttcgcgccgctcagaagaacattgaccgggagaccagccacgtcaccatggtggtggccgagctggagaggacgttgagcggctgccccgccgtggactccgtggtcagcctgctggacggcgtggtggagaagctcagcgtcctcaagaggaaggcggtggaatccatccaggccgaggacgagagcgccaagctgtgcaagctccggatcgagcacctcaaagagcatagcagcgaccagcccgcggcggccagcgtgtggaagaggaagcgcatggatcgcatgatggtggagcacctgctgcgttgcggctactacaacacggctgtcaagctggcgcgccagagcggcatcgagagctgcctggagttcagcctcagaatccaggagttcattgaactcatccggcagaataagagactggacgctgtgagacatgcaagaaagcacttcagccaagcagaagggagccagctggacgaggtgcgccaggccatgggcatgctggccttcccgcccgacacgcacatctccgtacaaggaccttctggaccctgcacggtggcggacctgcacggtggcggatctgatccagcagttccggtacgacaactaccgactacaccagctgggaaacaattctgtgttcaccctcaccctgcaggccggcctctcagccatcaagacaccacagtgctacaaggaggacggcagctccaagagccctgtctgccctgtgtgcagccgctccctgaacaagctggcgcacgcctgcccatggcccactgtgccaactcccgcctggtctgcaagatttctggcgacgtgatgaacgagaacaatccgcccatgatgctgcccaacggctacgtctacggctacaattctctgctttctatccgtcaagatgataaagtcgtgtgcccgagaaccaaagaagtcttccacttctcacaagccgagaaggtgtacatcatgtatgccccacgtcgtgaagcgcaccctcggggacgggctgcagtgggcggggaggcacgcttcctcctgtcccacgctccagcctgccgcggcgtttctgtttcttgcgaccaaagatccgtgagcaacgataaatactcttaggaagagagaaaataaggtttcataagtttgtacttgaaaacatttggattggtaggattttgtaacacgtcaaccatttgatgcttctgaaaagtactttcaacttgcgaaggaaactcttctttaaagactgacctaaacaccgagggaaacttaagaacgtttaaaatataggagtccgtgatttccctgtgttttcagtttctttccttctgtgaacgatgagacttggagaacgggctggtccttcaccacttcctgttggccctggctggccgggaaggtggcagcggcaccggagggacacttatggcttcattcgagagctgctgccaaaacgcctgcgcgccaccgtcgggggctggcttcgaggacgccgcctgctcgcgggtcgtgtccgcgggactgtgttcgtacgtgcatagtttcgatatcacatcgcggggctgtgttcggagtctgcgtcgtttcgtatacacaccctctgtgtgcgccttacttcctgcttcgagaatgtataacgtggaaatccacgggaccaaatttctgcagaggccttgccggatggttccataactgtagagtctaattgctatccattacagaaattaatcgttcagttgaaagaagtactgatgacttttcaaaacaaatgaaccaccgtagctgacagagaaccgtatcgtaagaggtttgtagttagtgcttatttttgcatgttgatgttgactagctaataaactgtaaatgtaaaaaaaaaaaaaaaaaaaaaa

SEQ ID NO: 535 - protein, 395 aa, Homo sapiens
MTLKVQEYPTLKVPYETLNKRFRAAQKNIDRETSHVTMVVAELERTLSGCPAVDSVVSLLDGVVEKLSVLKRKAVESIQAEDESAKLCKLRIEHLKEHSSDQPAAASVWKRKRMDRMMVEHLLRCGYYNTAVKLARQSGIESCLEFSLRIQEFIELIRQNKRLDAVRHARKHFSQAEGSQLDEVRQAMGMLAFPPDTHISVQGPSGPCTVADLHGGGSDPAVPVRQLPTTPAGKQFCVHPHPAGRPLSHQDTTVLQGGRQLQEPCLPCVQPLPEQAGARLPMAHCANSRLVCKISGDVMNENNPPMMLPNGYVYGYNSLLSIRQDDKVVCPRTKEVFHFSQAEKVYIMYAPRREAHPRGRAAVGGEARFLLSHAPACRGVSVSCDQRSVSNDKYS

SEQ ID NO: 536 - DNA, 2242 bp, Homo sapiens
ggaaaccagcaggcgttggggaggggtggcgggggaatagcggcggcagcagccccagccctcagagagacagcagaaagggagggagggagggtgctggggggacagccccccaccattcctaccgctatgggcccaacctcccactcccacctcccctccatcggccggggctaggacacccccaaatcccgtcgcccccttggcaccgacaccccgacagagacagagacacagccatccgccaccaccgctgccgcagcctggctggggagggggccagccccccaggccccctacccctctgaggtggccagaatggatttgtggccaggggcatggatgctgctgctgctgctcttcctgctgctgctcttcctgctgcccaccctgtggttctgcagccccagtgccaagtacttcttcaagatggccttctacaatggctggatcctcttcctggctgtgctcgccatccctgtgtgtgccgtgcgaggacgcaacgtcgagaacatgaagatcttgcgtctaatgctgctccacatcaaatacctgtacgggatccgagtggaggtgcgaggggctcaccacttccctccctcgcagccctatgttgttgtctccaaccaccagagctctctcgatctgcttgggatgatggaggtactgccaggccgctgtgtgcccattgccaagcgcgagctactgtgggctggctctgccgggctggcctgctggctggcaggagtcatcttcatcgaccggaagcgcacgggggatgccatcagtgtcatgtctgaggtcgcccagaccctgctcacccaggacgtgagggtctgggtgtttcctgagggaacgagaaaccacaatggctccatgctgcccttcaaacgtggcgccttccatcttgcagtgcaggcccaggttcccattgtccccatagtcatgtcctcctaccaagacttctactgcaagaaggagcgtcgcttcacctcgggacaatgtcaggtgcgggtgctgcccccagtgcccacggaagggctgacaccagatgacgtcccagctctggctgacagagtccggcactccatgctcactgttttccgggaaatctccactgatggccggggtggtggtgactatctgaagaagcctgggggcggtgggtgaaccctggctctgagctctcctcccatctgtccccatcttcctccccacacctacccacccagtgggccctgaagcagggccaaaccctcttccttgtctcccctctccccacttattctcctatttggaatcttcaacttctgaagtgaatgtggatacagcgccactcctgccccctcttggccccatccatggactcttgcctcggtgcagtctccactcttgacccccacctcctactgtcttgtctgtgggacagttgcctccccctcatctccagtgactcagcctacacaagggaggggaacattccatccccagtggagtctcttcctatgtggtcttctctacccctctaccccacattggccagtggactcatccattctttggaacaaatcccccccactccaaagtccatggattcaatggactcatccatttgtgaggaggacttctcgccctctggctggaagctgatacctgaagcactcccaggctcatcctgggagctttcctcagcaccttcaccttccctcccagtgtagcctcctgtcagtgggggctggacccttctaattcagaggtctcatgcctgcccttgcccagatgcccagggtcgtgcactctctgggataccagttcagtctccacatttctggttttctgtccccatagtacagttcttcagtggacatgaccccacccagccccctgcagccctgctgcaccatctcaccagacacaaggggaagaagcagacatcaggtgctgcactcacttctgccccctggggagttggggaaaggaacgaaccctggctggaggggataggagggcttttaatttatttctttttctgttgaggcttccccctctctgagccagttttcatttcttcctggtggcattagccactccctgcctctcactccagacctgttcccacaactggggaggtaggctgggagcaaaaggagagggtgggacccagttttgcgtggttggtttttattaattatctggataacagcaaaaaaactgaaaataaagagagagagagaaaaaaaaa

SEQ ID NO: 537 - protein, 283 aa, Homo sapiens
MDLWPGAWMLLLLLFLLLLFLLPTLWFCSPSAKYFFKMAFYNGWILFLAVLAIPVCAVRGRNVENMKILRLMLLHIKYLYGIRVEVRGAHHFPPSQPYVVVSNHQSSLDLLGMMEVLPGRCVPIAKRELLWAGSAGLACWLAGVIFIDRKRTGDAISVMSEVAQTLLTQDVRVWVFPEGTRNHNGSMLPFKRGAFHLAVQAQVPIVPIVMSSYQDFYCKKERRFTSGQCQVRVLPPVPTEGLTPDDVPALADRVRHSMLTVFREISTDGRGGGDYLKKPGGGG

SEQ ID NO: 538 - DNA, 2023 bp, Homo sapiens
ggactttggagcgtatggctccaaatcaactcattggctaaaacttgacggaaaatggtggttaggtggccagaatggatttgtggccaggggcatggatgctgctgctgctgctcttcctgctgctgctcttcctgctgcccaccctgtggttctgcagccccagtgccaagtacttcttcaagatggccttctacaatggctggatcctcttcctggctgtgctcgccatccctgtgtgtgccgtgcgaggacgcaacgtcgagaacatgaagatcttgcgtctaatgctgctccacatcaaatacctgtacgggatccgagtggaggtgcgaggggctcaccacttccctccctcgcagccctatgttgttgtctccaaccaccagagctctctcgatctgcttgggatgatggaggtactgccaggccgctgtgtgcccattgccaagcgcgagctactgtgggctggctctgccgggctggcctgctggctggcaggagtcatcttcatcgaccggaagcgcacgggggatgccatcagtgtcatgtctgaggtcgcccagaccctgctcacccaggacgtgagggtctgggtgtttcctgagggaacgagaaaccacaatggctccatgctgcccttcaaacgtggcgccttccatcttgcagtgcaggcccaggttcccattgtccccatagtcatgtcctcctaccaagacttctactgcaagaaggagcgtcgcttcacctcgggacaatgtcaggtgcgggtgctgcccccagtgcccacggaagggctgacaccagatgacgtcccagctctggctgacagagtccggcactccatgctcactgttttccgggaaatctccactgatggccggggtggtggtgactatctgaagaagcctgggggcggtgggtgaaccctggctctgagctctcctcccatctgtccccatcttcctccccacacctacccacccagtgggccctgaagcagggccaaaccctcttccttgtctcccctctccccacttattctcctatttggaatcttcaacttctgaagtgaatgtggatacagcgccactcctgccccctcttggccccatccatggactcttgcctcggtgcagtctccactcttgacccccacctcctactgtcttgtctgtgggacagttgcctccccctcatctccagtgactcagcctacacaagggaggggaacattccatccccagtggagtctcttcctatgtggtcttctctacccctctaccccacattggccagtggactcatccattctttggaacaaatcccccccactccaaagtccatggattcaatggactcatccatttgtgaggaggacttctcgccctctggctggaagctgatacctgaagcactcccaggctcatcctgggagctttcctcagcaccttcaccttccctcccagtgtagcctcctgtcagtgggggctggacccttctaattcagaggtctcatgcctgcccttgcccagatgcccagggtcgtgcactctctgggataccagttcagtctccacatttctggttttctgtccccatagtacagttcttcagtggacatgaccccacccagccccctgcagccctgctgcaccatctcaccagacacaaggggaagaagcagacatcaggtgctgcactcacttctgccccctggggagttggggaaaggaacgaaccctggctggaggggataggagggcttttaatttatttctttttctgttgaggcttccccctctctgagccagttttcatttcttcctggtggcattagccactccctgcctctcactccagacctgttcccacaactggggaggtaggctgggagcaaaaggagagggtgggacccagttttgcgtggttggtttttattaattatctggataacagcaaaaaaactgaaaataaagagagagagagaaaaaaaaaaaaaaaaaaaaaaaaaaaaaaaaaa

SEQ ID NO: 539 - DNA, 4017 bp, Homo sapiens
tttccttccctccctcggtcttccttcgcacgctgtttggtgattgtggcgctcgcgacagacagggaggcggtggcagaggacacttgtcatggccgcctctaaacctgtggaggcagcggtggtcgcagccgctgtaccgagctccgggagtggggtgggcggcggcgggactgcgggcccgggcacgggggggctgccgcgatggcagctggctctggcggtcggggcacccctgctgctgggcgcgggtgccatatacctgtggagtcggcagcaacggcgccgggaggccagaggccggggcgacgccagcggcctgaagcgcaacagcgaacggaagaccccggagggcagggccagtccggccccgggcagcggacaccctgaaggtcccggtgctcacttggacatgaactctcttgatagagcccaagcagccaagaataaaggcaataaatattttaaagcaggaaaatatgaacaagctattcagtgctatactgaggctattagcttgtgccctacagagaagaatgttgacctttctacattttatcaaaacagagctgctgcctttgaacagttgcaaaaatggaaagaagtggcacaagactgtacaaaagctgttgaacttaatcccaaatatgtgaaagctctctttagacgtgcaaaagcccatgagaagctagacaataagaaggaatgtttagaagatgtcactgctgtgtgtatattagaagggttccaaaatcaacaaagcatgctgttagccgataaagttcttaaactccttggaaaagagaaagccaaagaaaaatataagaatcgtgaacctctgatgccatctccacagtttatcaaatcttacttcagttctttcacggatgatatcatttcccagcccatgcttaaaggagagaaatctgatgaagataaagacaaggaaggggaggctttagaagtgaaagaaaattctggatacttaaaggccaaacagtatatggaagaagaaaactacgataaaatcataagtgaatgctcaaaagaaatagatgctgaaggcaaatacatggcagaagcattgctactacgagctaccttctacctgcttattggcaatgccaatgcagccaaaccagatttagataaagtcatcagtttgaaagaagctaatgtgaagcttcgagcaaatgctctcatcaaaagaggcagcatgtacatgcaacagcagcagcctttgctgtccactcaagattttaacatggctgctgacatcgatcctcagaatgcagatgtttatcaccaccgaggacagctgaaaatactccttgatcaagttgaagaagcagtggcagattttgatgaatgtattaggttaagacctgagtctgctctggcacaagcacagaaatgttttgcattgtaccgccaggcatatacgggaaacaactcttcacaaatccaagcagctatgaaaggttttgaagaggtcataaagaaatttccaaggtgtgccgaaggctatgcactatacgcccaggcattaacagatcaacaacagtttggtaaagctgatgaaatgtatgataaatgtattgatttggaaccagataatgctacaacatatgttcataaaggtttacttcaacttcagtggaagcaagatctggatagaggtttggaacttatcagcaaggctattgaaattgacaataaatgtgattttgcctatgaaaccatgggaactattgaagtacaaagaggaaacatggagaaagccattgacatgttcaacaaagctattaacctggccaaatcggaaatggagatggcccatctgtattcactttgcgatgccgcccatgcccagacagaagttgcaaagaaatacggattaaaaccaccaacattataaaacagggggaaagcagactgaccctctttttaaaagtttaccccctcttcaactgaaccctaaagacactgtcatgaactgtgttgaatggtggaaatcagtatttctgtttgtggtgttgttatttgttacatctgtttcatgtctaggtgttgtgggtgtggctgttgaaggaagtttgcagtcttgcagcttttattccctgtgcaacaaaagattagaacatgttaaagggatttttaaataaagttgcaaagagtacaaatgataattggccatgcaaataaaaactgatttgttgattttttttttaaggggggttggcagttgattatgttctggatgattccgtctatatatgtgtgaataatgtaagtattttacagcatgttgatttttaaattaacgtagtaaatgctgtaaaatagatttatattcagttaaccgctttcagttgattttttgaaagaaacaaaggttaaatgggggattaaagtaaaattgagagaccctttaaaccattgtcagcatgcacaatgcctctgattctgcagttttagaaacttggtggcacttattaatcctcttggcccctttccactctaatggatagtgtacattcttcttaaagtccacaacagcagattttcttgcagtaaattatgcagatgcaaaatattctaattgatatatgtgttggaagactgagtattgatgggggagtggaccagacaaagaggtaagatgaaacagtagtgtgtttataattgtctgtgactattttctataataattagtactatttaatggtgagcttttaaaaatgtaggatagagggtacagtggcactgtatatactatttatagtctcagctactagggaggctgaggcaagaggcttgagaccaggagctcgaggctgtaatgtgccatgatgattgcacctgcgaatagccactgcactccagcctgggcaatatagcaagaccccatcctttaaaaaattttagaacttttttaaaatcaaagtgcagattgcttgtatgtaaaacccaaataaaggtagagtaagtgtgatatatgggagtattaaaatagcttaaaatttctcgtgaaggacatgtggctaaagggtcaaaaaggatgtaagacttggagccagagcatagtatttcctgaaataacaagtttagtgctttaactatggctacatgtgcttaaggaattttgagccacttatttttgaagatgctgaggacatgtagagtgctttttgtagtgagctaaccttgatctctaaggactaactacccaggtccaggtcttcactaggggtactgacagtgtttaagctttactccacctccttacttagaaatcactttacgatttatttccattttccacttttatagaccatccttttgcttatatgctagatttttctggtgagggaagggttgtgttcttcaggggtcttttgttttgaaatactcaggatggggagaggtttatttaagaacgaattataattatggtttacactgttgggagtaaaggagcatttttacaccccttaagggtgcttaattctgttgaaaccaaaaagatttgtctacaaatgctatcttttttagaaactattagaaatgactccctttcaaagtcaatctttggaaaatattgaggaggtcactaattagttggtgcagttaatataattcaagatgatttggatgatgggaagtttgagaccgctgcattttgtttttaaattatgcaccttctgataacccccaaatacagaaatgttctacatctctgaatgacctctgactttaaaaaagtttttatttgcatggctgtatttacattaacactgacattttcttctactcttctcccttctttcatcttggggttgggtagagaaacacaaaggaaactgaagcatgtgccattctatactgtcattccaaattctcatggactattgcctgttgtgaaaatgtttgaaactgcactgaaagctgcatctgtctgtatctttcttttgtaaatgacctcacatgtaaattcaccaaataaatattacattc

SEQ ID NO: 540 - protein, 608 aa, Homo sapiens
MAASKPVEAAVVAAAVPSSGSGVGGGGTAGPGTGGLPRWQLALAVGAPLLLGAGAIYLWSRQQRRREARGRGDASGLKRNSERKTPEGRASPAPGSGHPEGPGAHLDMNSLDRAQAAKNKGNKYFKAGKYEQAIQCYTEAISLCPTEKNVDLSTFYQNRAAAFEQLQKWKEVAQDCTKAVELNPKYVKALFRRAKAHEKLDNKKECLEDVTAVCILEGFQNQQSMLLADKVLKLLGKEKAKEKYKNREPLMPSPQFIKSYFSSFTDDIISQPMLKGEKSDEDKDKEGEALEVKENSGYLKAKQYMEEENYDKIISECSKEIDAEGKYMAEALLLRATFYLLIGNANAAKPDLDKVISLKEANVKLRANALIKRGSMYMQQQQPLLSTQDFNMAADIDPQNADVYHHRGQLKILLDQVEEAVADFDECIRLRPESALAQAQKCFALYRQAYTGNNSSQIQAAMKGFEEVIKKFPRCAEGYALYAQALTDQQQFGKADEMYDKCIDLEPDNATTYVHKGLLQLQWKQDLDRGLELISKAIEIDNKCDFAYETMGTIEVQRGNMEKAIDMFNKAINLAKSEMEMAHLYSLCDAAHAQTEVAKKYGLKPPTL

SEQ ID NO: 541 - DNA, 4344 bp, Homo sapiens
ctgccggcggcccgggcgggctggcagctagagtgggtgcgatagccgcctccgcctctgcccgcctccgccgtcgcctcctccgcccgggccgttcgctgctgcgcggggagagcgaggcggggccgccggggccgccatggagcccgactcggtgattgaggacaagaccatcgagctcatgtgttctgtgccaaggtctttgtggctaggctgcgccaacctggtagagagcatgtgcgcactgagttgcctgcagagcatgcccagtgtcagatgtctccagataagtaatggaacatcatctgtgatcgtctccagaaagaggccatcagaaggaaactatcaaaaagaaaaagacttgtgtattaaatattttgaccagtggtctgaatcagatcaagtggaatttgtggaacatcttatttcacgaatgtgtcattatcagcatggacatattaactcttacctgaagcccatgttgcagcgggactttattaccgctttaccagagcaaggcttagatcacatagcagaaaacattctttcgtacctggatgccaggtctctgtgtgcagcagagctggtatgtaaagaatggcagcgagtgatctcagaaggaatgctttggaagaagctgattgaacgaatggtacgcactgatcccctatggaaaggactttcagagagcagagggtgggatcagtacctgtttaaaaacagacccacagatggccctccaaattcattttataggtcattatacccaaagattatccaggatatagagactatagaatctaactggcggtgtggacgacacaacttgcagaggattcagtgccgctctgaaaatagtaaaggtgtctactgtttacagtacgatgatgaaaaaattatcagtggcctacgagataattctattaagatatgggataaaaccagcctggaatgtttgaaagtgttaacaggacacacaggctctgtcctctgtctgcagtatgatgagcgtgtcattgtaactggctcttcagattctacggtgagagtgtgggatgtgaacacgggtgaagttcttaacacattgatccaccacaatgaggctgtattgcacttacgcttcagcaatggactgatggtgacctgttccaaggaccgctccattgctgtgtgggacatggcttctgcgaccgacatcactttacgccgtgtcctggttggccaccgggctgccgtcaatgtagtagactttgacgacaagtacatcgtgtctgcctctggtgacaggaccatcaaagtctggagcacgagcacctgtgaatttgttcgtactctcaatgggcacaagcggggcattgcctgtctccagtacagggatcgcctggttgttagtggatcatcagataataccattaggctctgggatattgaatgtggtgcctgtttaagagtcctagagggacatgaagaattggtccgatgcatccggtttgataacaagaggattgtcagtggggcctatgatgggaaaattaaagtttgggacttgcaagctgctcttgaccctcgagccccagcaagcacattgtgtttgcgcacattggtggaacattctggacgtgtgtttcggctccagtttgatgagtttcagatcatcagcagctcccatgatgacactattttgatttgggatttcttaaatgtgcctcccagtgcccagaatgagacccgttctccctccagaacatacacttacatctctagataacagtctgcactttcacccgtttcagggttttctagtcttgaactactggctacgtggctaccaaatgcctaagggagttcgttcacagctgagttatgaagctggaattggttctagacgctgggtagatgcaaagcagcctaactcttcaagtaccgacatttctcacctctgattccggctctcctttgagaaggagaccttagcttccccggcttcaagtagaacagaagcccgtttccttccctcatcagtgaaaaaatctaatgtttcaaatgtaaattgttcatagaaaaggaacatagaatctgttttacagaagtaaatcgaccgtcaagagaagacttggcctctaatttatattgctttgcactttggtttgatattaagaaacagcattcttcttcagtgaaattttgggtgccaaacacctacccagaatgtccagggctttcattttcaaaagttagcattctccttttgaccgtccaagtcattatgaattctgacttgttgtattaggaacatgttggacagtggaaaattttctctggattgttttagtaatatttttgggattatacttcctttctgtaccaatttcttttaatttaaagaactataagtcagttatattatctaccaacaggtaatatagctctttcttttattaactgttctctgtcccccaaccatctcctgatatttggtagagtaacacctttatacgtgtgcttgcctcctaatttaaaatactgtattcgcatgtagatataatgtacataacagtttaacctcaaagttgctggagtcagggccccctgtgcttgagacactaatacagagtgtgttcgcacttagccatgggctgggctcaagaacctgatacctgggttgatgtggattacctagaacccttcctgcagtattcatacagtgtttttattttgttgttgtcattgcgtgtgtgtggtttgtgtgtgtttttaatgagaatcttgttttaaaatgtaatttctaaggtttaacaccaaaatgttttatttgttgtggagtatatattatacaatagagaggtaccttaaacattttttgttcttattctttttctcataagtactcctgagtacaagtggtcacctcccatagtattcatttggcttcgctgtcaaaaatcattattctgtgcagtcgtggccctgggaaggggaaataagaaggccctgttgacgggctgtcttggctctggaattcatgcatcctggccttgccaaggttctggcagggcctgctggtgtgttggagcctgcagggcaggtcaggctggttcagaggcccatgctgaggggtgggtgctctgaagtggagtgaagcctcaagcccatgaatgccaccccagtcatctctggtgtcagctgctgctgtggccccagcaggttctcaaagctcccaagtcctccctacgacacagcccaaatgtgtaaatggcactgttgccctgacagtgcatggaaaggacgttggcatccaattggcactccttctcccttattcaatattaggtttgatttgcccttcgccattgtttccaaagatcaaggaatgtcaataacattttaaaggaccaataaacagcctcctataaagtaaacctcttcccgtggaagcacactctactactaaagggaaggcccctgggctctgatttgtcctttgcattgagaacggtgtggggatcagtgtgtgtgtatgtgatttgtttattgagttggctttgcttttttagtttttcttttaaaaataaaatccttccttcccatgttactaaattaatttatgtttttgagaggttgagtctcaaagtgtaaacaataaacctccattcataaggtggatgttgtaagcttgatggtggttgtgaaagtgatttagctttgaccacttttcatcctacagcttcaatatcaaactggttaggaaagcccagggggaagggagggggcaggggaggaggcaattctgaatgaatgaatggattttttgttgtttttgcatgtttaatatagaagttcccctcgttccttgggagatgatggcctttgaatatgcagacaacctttgaattgtgcctactaaattatagcaggggactttggcacccaaggagttctgactttctgggattataatagtaattcccagccatactctggactttattttgctaaccataactgagcaaatgtaaattactgctatattaatgttttaaagcactgggatagtctaattctaacttgtaattaattatgtttgccaattatctgtttgaaataaatttgtgtctgaacagctattgaaactgttaaattgtacagatattattcatgacagctttgtactgtggaatgtgcttaataaaaaacaaaaaagtttgacttttgtccagtaaattgctaagtaatgtcaataaatcgagtatgggtattatgcagtgcacctaatctggcttcatgcaattgttacttcagctactgattcaaagccaatactcttaataaagtgttgcaatactc

SEQ ID NO: 542 - protein, 542 aa, Homo sapiens
MEPDSVIEDKTIELMCSVPRSLWLGCANLVESMCALSCLQSMPSVRCLQISNGTSSVIVSRKRPSEGNYQKEKDLCIKYFDQWSESDQVEFVEHLISRMCHYQHGHINSYLKPMLQRDFITALPEQGLDHIAENILSYLDARSLCAAELVCKEWQRVISEGMLWKKLIERMVRTDPLWKGLSESRGWDQYLFKNRPTDGPPNSFYRSLYPKIIQDIETIESNWRCGRHNLQRIQCRSENSKGVYCLQYDDEKIISGLRDNSIKIWDKTSLECLKVLTGHTGSVLCLQYDERVIVTGSSDSTVRVWDVNTGEVLNTLIHHNEAVLHLRFSNGLMVTCSKDRSIAVWDMASATDITLRRVLVGHRAAVNVVDFDDKYIVSASGDRTIKVWSTSTCEFVRTLNGHKRGIACLQYRDRLVVSGSSDNTIRLWDIECGACLRVLEGHEELVRCIRFDNKRIVSGAYDGKIKVWDLQAALDPRAPASTLCLRTLVEHSGRVFRLQFDEFQIISSSHDDTILIWDFLNVPPSAQNETRSPSRTYTYISR

SEQ ID NO: 543 - DNA, 4322 bp, Homo sapiens
cgagggggagggcggagctgccggcggcccgggcgggctggcagctagagtgggtgcgatagccgcctccgcctctgcccgcctccgccgtcgcctcctccgcccgggccgttcgctgctgcgcggggagagcgaggcggggccgccggggccgccatggagcccgactcggtgattgaggacaagaccatcgagctcatgaacacttcagttatggaagatcaaaatgaagatgagtccccaaagaaaaatactctttggcagataagtaatggaacatcatctgtgatcgtctccagaaagaggccatcagaaggaaactatcaaaaagaaaaagacttgtgtattaaatattttgaccagtggtctgaatcagatcaagtggaatttgtggaacatcttatttcacgaatgtgtcattatcagcatggacatattaactcttacctgaagcccatgttgcagcgggactttattaccgctttaccagagcaaggcttagatcacatagcagaaaacattctttcgtacctggatgccaggtctctgtgtgcagcagagctggtatgtaaagaatggcagcgagtgatctcagaaggaatgctttggaagaagctgattgaacgaatggtacgcactgatcccctatggaaaggactttcagagagcagagggtgggatcagtacctgtttaaaaacagacccacagatggccctccaaattcattttataggtcattatacccaaagattatccaggatatagagactatagaatctaactggcggtgtggacgacacaacttgcagaggattcagtgccgctctgaaaatagtaaaggtgtctactgtttacagtacgatgatgaaaaaattatcagtggcctacgagataattctattaagatatgggataaaaccagcctggaatgtttgaaagtgttaacaggacacacaggctctgtcctctgtctgcagtatgatgagcgtgtcattgtaactggctcttcagattctacggtgagagtgtgggatgtgaacacgggtgaagttcttaacacattgatccaccacaatgaggctgtattgcacttacgcttcagcaatggactgatggtgacctgttccaaggaccgctccattgctgtgtgggacatggcttctgcgaccgacatcactttacgccgtgtcctggttggccaccgggctgccgtcaatgtagtagactttgacgacaagtacatcgtgtctgcctctggtgacaggaccatcaaagtctggagcacgagcacctgtgaatttgttcgtactctcaatgggcacaagcggggcattgcctgtctccagtacagggatcgcctggttgttagtggatcatcagataataccattaggctctgggatattgaatgtggtgcctgtttaagagtcctagagggacatgaagaattggtccgatgcatccggtttgataacaagaggattgtcagtggggcctatgatgggaaaattaaagtttgggacttgcaagctgctcttgaccctcgagccccagcaagcacattgtgtttgcgcacattggtggaacattctggacgtgtgtttcggctccagtttgatgagtttcagatcatcagcagctcccatgatgacactattttgatttgggatttcttaaatgtgcctcccagtgcccagaatgagacccgttctccctccagaacatacacttacatctctagataacagtctgcactttcacccgtttcagggttttctagtcttgaactactggctacgtggctaccaaatgcctaagggagttcgttcacagctgagttatgaagctggaattggttctagacgctgggtagatgcaaagcagcctaactcttcaagtaccgacatttctcacctctgattccggctctcctttgagaaggagaccttagcttccccggcttcaagtagaacagaagcccgtttccttccctcatcagtgaaaaaatctaatgtttcaaatgtaaattgttcatagaaaaggaacatagaatctgttttacagaagtaaatcgaccgtcaagagaagacttggcctctaatttatattgctttgcactttggtttgatattaagaaacagcattcttcttcagtgaaattttgggtgccaaacacctacccagaatgtccagggctttcattttcaaaagttagcattctccttttgaccgtccaagtcattatgaattctgacttgttgtattaggaacatgttggacagtggaaaattttctctggattgttttagtaatatttttgggattatacttcctttctgtaccaatttcttttaatttaaagaactataagtcagttatattatctaccaacaggtaatatagctctttcttttattaactgttctctgtcccccaaccatctcctgatatttggtagagtaacacctttatacgtgtgcttgcctcctaatttaaaatactgtattcgcatgtagatataatgtacataacagtttaacctcaaagttgctggagtcagggccccctgtgcttgagacactaatacagagtgtgttcgcacttagccatgggctgggctcaagaacctgatacctgggttgatgtggattacctagaacccttcctgcagtattcatacagtgtttttattttgttgttgtcattgcgtgtgtgtggtttgtgtgtgtttttaatgagaatcttgttttaaaatgtaatttctaaggtttaacaccaaaatgttttatttgttgtggagtatatattatacaatagagaggtaccttaaacattttttgttcttattctttttctcataagtactcctgagtacaagtggtcacctcccatagtattcatttggcttcgctgtcaaaaatcattattctgtgcagtcgtggccctgggaaggggaaataagaaggccctgttgacgggctgtcttggctctggaattcatgcatcctggccttgccaaggttctggcagggcctgctggtgtgttggagcctgcagggcaggtcaggctggttcagaggcccatgctgaggggtgggtgctctgaagtggagtgaagcctcaagcccatgaatgccaccccagtcatctctggtgtcagctgctgctgtggccccagcaggttctcaaagctcccaagtcctccctacgacacagcccaaatgtgtaaatggcactgttgccctgacagtgcatggaaaggacgttggcatccaattggcactccttctcccttattcaatattaggtttgatttgcccttcgccattgtttccaaagatcaaggaatgtcaataacattttaaaggaccaataaacagcctcctataaagtaaacctcttcccgtggaagcacactctactactaaagggaaggcccctgggctctgatttgtcctttgcattgagaacggtgtggggatcagtgtgtgtgtatgtgatttgtttattgagttggctttgcttttttagtttttcttttaaaaataaaatccttccttcccatgttactaaattaatttatgtttttgagaggttgagtctcaaagtgtaaacaataaacctccattcataaggtggatgttgtaagcttgatggtggttgtgaaagtgatttagctttgaccacttttcatcctacagcttcaatatcaaactggttaggaaagcccagggggaagggagggggcaggggaggaggcaattctgaatgaatgaatggattttttgttgtttttgcatgtttaatatagaagttcccctcgttccttgggagatgatggcctttgaatatgcagacaacctttgaattgtgcctactaaattatagcaggggactttggcacccaaggagttctgactttctgggattataatagtaattcccagccatactctggactttattttgctaaccataactgagcaaatgtaaattactgctatattaatgttttaaagcactgggatagtctaattctaacttgtaattaattatgtttgccaattatctgtttgaaataaatttgtgtctgaacagctattgaaactgttaaattgtacagatattattcatgacagctttgtactgtggaatgtgcttaataaaaaacaaaaaagtttgacttttgtccagtaaattgctaagtaatgtcaataaatcgagtatgggtattatgcagtgcacctaatctggcttcatgcaattgttacttcagctactgattcaaagccaatactcttaataaagtgttgcaatactc

SEQ ID NO: 544 - protein, 529 aa, Homo sapiens
MEPDSVIEDKTIELMNTSVMEDQNEDESPKKNTLWQISNGTSSVIVSRKRPSEGNYQKEKDLCIKYFDQWSESDQVEFVEHLISRMCHYQHGHINSYLKPMLQRDFITALPEQGLDHIAENILSYLDARSLCAAELVCKEWQRVISEGMLWKKLIERMVRTDPLWKGLSESRGWDQYLFKNRPTDGPPNSFYRSLYPKIIQDIETIESNWRCGRHNLQRIQCRSENSKGVYCLQYDDEKIISGLRDNSIKIWDKTSLECLKVLTGHTGSVLCLQYDERVIVTGSSDSTVRVWDVNTGEVLNTLIHHNEAVLHLRFSNGLMVTCSKDRSIAVWDMASATDITLRRVLVGHRAAVNVVDFDDKYIVSASGDRTIKVWSTSTCEFVRTLNGHKRGIACLQYRDRLVVSGSSDNTIRLWDIECGACLRVLEGHEELVRCIRFDNKRIVSGAYDGKIKVWDLQAALDPRAPASTLCLRTLVEHSGRVFRLQFDEFQIISSSHDDTILIWDFLNVPPSAQNETRSPSRTYTYISR

SEQ ID NO: 545 - DNA, 4204 bp, Homo sapiens
gcgatagccgcctccgcctctgcccgcctccgccgtcgcctcctccgcccgggccgttcgctgctgcgcggggagagcgaggcggggccgccggggccgccatggagcccgactcggtgattgaggacaagaccatcgagctcatgataagtaatggaacatcatctgtgatcgtctccagaaagaggccatcagaaggaaactatcaaaaagaaaaagacttgtgtattaaatattttgaccagtggtctgaatcagatcaagtggaatttgtggaacatcttatttcacgaatgtgtcattatcagcatggacatattaactcttacctgaagcccatgttgcagcgggactttattaccgctttaccagagcaaggcttagatcacatagcagaaaacattctttcgtacctggatgccaggtctctgtgtgcagcagagctggtatgtaaagaatggcagcgagtgatctcagaaggaatgctttggaagaagctgattgaacgaatggtacgcactgatcccctatggaaaggactttcagagagcagagggtgggatcagtacctgtttaaaaacagacccacagatggccctccaaattcattttataggtcattatacccaaagattatccaggatatagagactatagaatctaactggcggtgtggacgacacaacttgcagaggattcagtgccgctctgaaaatagtaaaggtgtctactgtttacagtacgatgatgaaaaaattatcagtggcctacgagataattctattaagatatgggataaaaccagcctggaatgtttgaaagtgttaacaggacacacaggctctgtcctctgtctgcagtatgatgagcgtgtcattgtaactggctcttcagattctacggtgagagtgtgggatgtgaacacgggtgaagttcttaacacattgatccaccacaatgaggctgtattgcacttacgcttcagcaatggactgatggtgacctgttccaaggaccgctccattgctgtgtgggacatggcttctgcgaccgacatcactttacgccgtgtcctggttggccaccgggctgccgtcaatgtagtagactttgacgacaagtacatcgtgtctgcctctggtgacaggaccatcaaagtctggagcacgagcacctgtgaatttgttcgtactctcaatgggcacaagcggggcattgcctgtctccagtacagggatcgcctggttgttagtggatcatcagataataccattaggctctgggatattgaatgtggtgcctgtttaagagtcctagagggacatgaagaattggtccgatgcatccggtttgataacaagaggattgtcagtggggcctatgatgggaaaattaaagtttgggacttgcaagctgctcttgaccctcgagccccagcaagcacattgtgtttgcgcacattggtggaacattctggacgtgtgtttcggctccagtttgatgagtttcagatcatcagcagctcccatgatgacactattttgatttgggatttcttaaatgtgcctcccagtgcccagaatgagacccgttctccctccagaacatacacttacatctctagataacagtctgcactttcacccgtttcagggttttctagtcttgaactactggctacgtggctaccaaatgcctaagggagttcgttcacagctgagttatgaagctggaattggttctagacgctgggtagatgcaaagcagcctaactcttcaagtaccgacatttctcacctctgattccggctctcctttgagaaggagaccttagcttccccggcttcaagtagaacagaagcccgtttccttccctcatcagtgaaaaaatctaatgtttcaaatgtaaattgttcatagaaaaggaacatagaatctgttttacagaagtaaatcgaccgtcaagagaagacttggcctctaatttatattgctttgcactttggtttgatattaagaaacagcattcttcttcagtgaaattttgggtgccaaacacctacccagaatgtccagggctttcattttcaaaagttagcattctccttttgaccgtccaagtcattatgaattctgacttgttgtattaggaacatgttggacagtggaaaattttctctggattgttttagtaatatttttgggattatacttcctttctgtaccaatttcttttaatttaaagaactataagtcagttatattatctaccaacaggtaatatagctctttcttttattaactgttctctgtcccccaaccatctcctgatatttggtagagtaacacctttatacgtgtgcttgcctcctaatttaaaatactgtattcgcatgtagatataatgtacataacagtttaacctcaaagttgctggagtcagggccccctgtgcttgagacactaatacagagtgtgttcgcacttagccatgggctgggctcaagaacctgatacctgggttgatgtggattacctagaacccttcctgcagtattcatacagtgtttttattttgttgttgtcattgcgtgtgtgtggtttgtgtgtgtttttaatgagaatcttgttttaaaatgtaatttctaaggtttaacaccaaaatgttttatttgttgtggagtatatattatacaatagagaggtaccttaaacattttttgttcttattctttttctcataagtactcctgagtacaagtggtcacctcccatagtattcatttggcttcgctgtcaaaaatcattattctgtgcagtcgtggccctgggaaggggaaataagaaggccctgttgacgggctgtcttggctctggaattcatgcatcctggccttgccaaggttctggcagggcctgctggtgtgttggagcctgcagggcaggtcaggctggttcagaggcccatgctgaggggtgggtgctctgaagtggagtgaagcctcaagcccatgaatgccaccccagtcatctctggtgtcagctgctgctgtggccccagcaggttctcaaagctcccaagtcctccctacgacacagcccaaatgtgtaaatggcactgttgccctgacagtgcatggaaaggacgttggcatccaattggcactccttctcccttattcaatattaggtttgatttgcccttcgccattgtttccaaagatcaaggaatgtcaataacattttaaaggaccaataaacagcctcctataaagtaaacctcttcccgtggaagcacactctactactaaagggaaggcccctgggctctgatttgtcctttgcattgagaacggtgtggggatcagtgtgtgtgtatgtgatttgtttattgagttggctttgcttttttagtttttcttttaaaaataaaatccttccttcccatgttactaaattaatttatgtttttgagaggttgagtctcaaagtgtaaacaataaacctccattcataaggtggatgttgtaagcttgatggtggttgtgaaagtgatttagctttgaccacttttcatcctacagcttcaatatcaaactggttaggaaagcccagggggaagggagggggcaggggaggaggcaattctgaatgaatgaatggattttttgttgtttttgcatgtttaatatagaagttcccctcgttccttgggagatgatggcctttgaatatgcagacaacctttgaattgtgcctactaaattatagcaggggactttggcacccaaggagttctgactttctgggattataatagtaattcccagccatactctggactttattttgctaaccataactgagcaaatgtaaattactgctatattaatgttttaaagcactgggatagtctaattctaacttgtaattaattatgtttgccaattatctgtttgaaataaatttgtgtctgaacagctattgaaactgttaaattgtacagatattattcatgacagctttgtactgtggaatgtgcttaataaaaaacaaaaaagtttgacttttgtccagtaaattgctaagtaatgtcaataaatcgagtatgggtattatgcagtgcacctaatctggcttcatgcaattgttacttcagctactgattcaaagccaatactcttaataaagtgttgcaatactc

SEQ ID NO: 546 - protein, 508 aa, Homo sapiens
MEPDSVIEDKTIELMISNGTSSVIVSRKRPSEGNYQKEKDLCIKYFDQWSESDQVEFVEHLISRMCHYQHGHINSYLKPMLQRDFITALPEQGLDHIAENILSYLDARSLCAAELVCKEWQRVISEGMLWKKLIERMVRTDPLWKGLSESRGWDQYLFKNRPTDGPPNSFYRSLYPKIIQDIETIESNWRCGRHNLQRIQCRSENSKGVYCLQYDDEKIISGLRDNSIKIWDKTSLECLKVLTGHTGSVLCLQYDERVIVTGSSDSTVRVWDVNTGEVLNTLIHHNEAVLHLRFSNGLMVTCSKDRSIAVWDMASATDITLRRVLVGHRAAVNVVDFDDKYIVSASGDRTIKVWSTSTCEFVRTLNGHKRGIACLQYRDRLVVSGSSDNTIRLWDIECGACLRVLEGHEELVRCIRFDNKRIVSGAYDGKIKVWDLQAALDPRAPASTLCLRTLVEHSGRVFRLQFDEFQIISSSHDDTILIWDFLNVPPSAQNETRSPSRTYTYISR

SEQ ID NO: 547 - DNA, 5747 bp, Homo sapiens
cgccgccgcccggggaccggcatgaggaccgccgcggggggacgtctgcggcccgcgtcggcgctggggacaaagaagccatgcagtgacacccgctaagacttgttggtagccatgtcggagccccacagggtccagttcacctctctcccaggttccctgaatcctgcgtttttgaagaagtcccggaaggaggaggctggggcaggagaacagcatcaggactgtgagccggctgcagcagctgttcggattacactcaccctctttgaaccagatcacaaacgctgcccagagttcttctacccagagctggtgaagaatatccgagggaaggtaaaaggccttcagcctggagataagaagaaagatctgtcagatcctttcaatgacgaagaaaaggaaaggcataaagtagaggcccttgcccgaaaatttgaagaaaaatacggtggaaagaaacgtagaaaagaccgaatacaggacttgatcgatatggggtatggttatgatgaatccgactccttcatcgataactctgaggcgtatgatgagcttgttcctgcttctttgactacgaagtatggaggattttacattaactcgggaaccctgcagtttagacaagcatcagagtctgaagatgacttcattaaagaaaagaagaaaaaatctccaaagaagcggaagttgaaggaaggtggtgagaagataaagaagaagaaaaaagatgacacttatgacaaggagaagaaatcgaaaaagtccaagttttccaaagccggcttcacagccctcaatgccagtaaggagaagaagaagaagaaatattctggggctttaagcgttaaagagatgctaaagaaatttcagaaagagaaagaggctcagaaaaaaagggaggaggagcataagcctgttgcggtcccatcagcggaagttcagggcctgcgggaactggagggtgcctctgaccccttgctctcactctttggctctacttctgacaacgacttgctccaggcggccactgccatggactcgctgacggatttggacttggagcatctgctcagtgagtctccagaaggaagtcccttccgagatatggatgatggaagtgattcccttggggtgggattggaccaggaattcaggcagccctcttctctccccgaaggcctgccagcacccctggagaagcgcgttaaggagctggctcaggctgccagagctgctgagggggagagcagacagaagttcttcacccaggatattaatggaatcctattagacatagaggcgcagactcgggagctgagcagtcaggtccgctctggggtgtatgcctatcttgcgtcattcctgccctgcagcaaggatgccctgctcaagcgtgctcggaaacttcacctctatgaacaggggggccgtctgaaggagcctctccagaagctcaaggaagccattggcagggcgatgccagagcagatggccaagtaccaggacgaatgccaggcacacacgcaggcaaaggttgccaagatgctggaagaggagaaagacaaggagcagagggaccggatttgttcggatgaggaagaagatgaagaaaaagggggcaggaggataatgggacctcggaagaagttccaatggaatgatgagatcagggagctactgtgccaggtggtgaagatcaaactggagagccaggacctggagaggaacaacaaagcccaggcttgggaggactgtgtgaagggctttctggatgcggaagtcaagcccctctggcccaaaggctggatgcaggccagaactctgtttaaggagagcagacgaggccatgggcacctgacttcaatcctggccaagaagaaagttatggccccttctaaaatcaaggtgaaggagtcgtctacgaagcctgataaaaaggtttctgtcccatcaggacagattggtggccccattgctttgccctcagatcaccaaacaggaggcctgagtattggggcctcgagcagggagctcccatcccaggcatcgggcggccttgctaaccctcctcctgtcaacctggaggactcattggatgaagacttgatccgcaatccagcctcctcggtggaagccgtgtccaaggaattggctgcattgaatagcagagcagctgggaactctgaattcacactgcctgcaccctcaaaagcacctgcagaaaaagttggaggcgttttatgtacagaagaaaaaaggaacttggcgaagcctagtccttctgctccaccaccagctagctctctgcagtcacccctcaattttctggcagaacaggctctggcactggggcagtcctctcaggagaaaaaaccagagagttctggctacaaagagctgtcctgccaggctcccctcaataagggcctgccagaagtacatcagtccaaagctaagcaccacagcttgccacggacgtctcacgggccccaagtggcagttcctgtgcctggcccccaggtcaaagtctttcatgccggcactcagcagcagaaaaacttcacgcccccatctccatttgccaataagctccaaggcccaaaggcttctcccacacagtgtcatcgttccctcctgcagttagtgaagacagcggccaaaggccagggcttccatccctctgcaccagccacctcaggaggcctgtcagcctccagcagcagctctcacaagaccccagcctcgtcctcttctgccctgagccatccagcaaagccacattcagtcagctctgcaggctcatcttacaagaataatccctttgccagctcaatctccaaacatggggtttcttctggcagctcttcctcgggaggaacaccagtccagagttctgtttctgggagcctggtccctggcatacagcctccctccgtgggacagcccaccagccgacccgtcccaagttcagcagggaaaaaaatgcctgtttcccagaagttgactctggtagcccctccaggcggtccaaacggagattccagtggtgggacccagggagtggcaaagttgctgacctcgccgtccctaaagccctctgcagttagtagtgtgacatcgtctacctccttgtcaaaaggagcgagtgggactgtgctgctggccggctcctctttgatggcttcaccctacaaatccagcagcccaaagctgtctggggccatgagctcgaactccttgggaattataacccctgtccctattcctgtccatgtgctctccttcagcgctgactcctctgccaaagcaggggtctccaaggatgccatcgtcacaggccctgcccccgggtccttccaccatggccttggccacagtcttctggctggcttgcactccagcccgccccatgcagcgcctctcccacacgctgcggtgcccacccatatcccgcagagtctgccaggtgcttctcagcttcatgggaaagggcctgctgtaccacggaaattgtgaccgcttcagaggcaaggcttgccacttgggtctgggtggaatcagaacgtgcaggtctcccaggatgtacactcactgcgccctttctgctgcttggtgttcttctggaggagcgtgagttctcagcggagcgcttctcggcacttctgatgtgcctcccatggagggagccgggcccttgctgctcaggaggtgcagactgccccgtgctctggcttgcagctctgtcgctagacggttgttagaggggcagctctaggctggggcttgcgctgggccgtggtgggaggcacagtgtttacaggctctggtggcagagcagttggcacacctgtgggtgaatctgcctgatcccctggcatttggtcagagtacctcagagcaccccactgctcaggggctccttctggctgcagtaagctccctggatggtcacagtgccgccccatccccaggctgtgtgctcaaagcggacaaaactcaggccagagccacagctgggagacctgcactgtccctgcgaaatactaagaacacctagggtgtgctcactgtgggggccagtttctcctcggaacatgacaatgaagctcttttagagaaaagacctttgtagattcaacaattatgataggatttttacagacacctattttgggctcagttttcatcattaccattaaatgccattggatagaaggggactgttcttcacacatcatattataggaagacataattccagtgcctttatggtggagcagaattcgacaacacatgtccattctgccctctgaatggatctgagacgaagaccttttaaaagatatgtctgtattgaagagaaagccagttttgagttttctacacttgcacatcattatctgtgccgtcctgactagaatgtgtctgggcccccaaattccatgtccctttatatccatggctcccattttgttttttcccgagttcgtggaggtggactgcatagcccagagcccttcatctctctgagggtcaaggataccagggtcccaagtcacagatagacattccagtttgtattcttaggaatcattcttaggcagtgcggtataatcaggcctctgtgaagtgtctgccgggtagaaataggccttgaagtcctggggctctccaggcagtggggttatgtgtcgactgaagggtgatgtgcagaagatcttggagagtggatcagagagactaggacagttactgcagagctcctaagtcaccactcaaccagtggctgtttcacaaggatttgagggcacttgcctgtcttgtgaggtctgtgccacaaggtgagtctgaactgactgctccagctaagtgatcaggcacgttgagagtatatggtgtcctcagcacatacacctgtgggaaaacggaccgctcttggctcctgactcccagggtacagcgcccagtaactcatccttcattcagaggtttgctggccttcccggtttcccaaggagcaagacctctgtctgccctttggcccggcctctgctctgactcctttttttacataagaaccaatctgtgtttcacattgggctaagtggattccttatccctttgttatatatattttttgcaacttggatttccagtttgtttacagagtagtcttaggtagtagcaaaagagccaaagaagagatttgtattgctgagctcaaagccaagcagaggccggcagtggaggctgagcagggactctccaggcttctctgcccataaacacccgggtcccaggccctccttcctttccctttggtgctccctcctccccatgtaccattgcgcgtgcagctggagcagaataccctcatttttaggaatctagtgatgcctcttgcctcagggaaacgtttctttgatggggagtttgagatttcttttccttgtttatgctttatttgtggtaatgaaagagcgaatgactgaacagccatggcaaggcagacctacaggcgaggccgcagcagagggtggggcagagcagcctcggggtctgggggctgcaggggtttccctggcgcagcgaaagtctctgagcacttaccgggcgtgaccgtttcttaggtgtgagaggggctgtggcttttgtgcagcgactatgttggtgttaggggtggtgtggagattgttaatcttgtataaagcaattcaataaattgtttcaaggtttccaaaaca

SEQ ID NO: 548 - protein, 1134 aa, Homo sapiens
MSEPHRVQFTSLPGSLNPAFLKKSRKEEAGAGEQHQDCEPAAAAVRITLTLFEPDHKRCPEFFYPELVKNIRGKVKGLQPGDKKKDLSDPFNDEEKERHKVEALARKFEEKYGGKKRRKDRIQDLIDMGYGYDESDSFIDNSEAYDELVPASLTTKYGGFYINSGTLQFRQASESEDDFIKEKKKKSPKKRKLKEGGEKIKKKKKDDTYDKEKKSKKSKFSKAGFTALNASKEKKKKKYSGALSVKEMLKKFQKEKEAQKKREEEHKPVAVPSAEVQGLRELEGASDPLLSLFGSTSDNDLLQAATAMDSLTDLDLEHLLSESPEGSPFRDMDDGSDSLGVGLDQEFRQPSSLPEGLPAPLEKRVKELAQAARAAEGESRQKFFTQDINGILLDIEAQTRELSSQVRSGVYAYLASFLPCSKDALLKRARKLHLYEQGGRLKEPLQKLKEAIGRAMPEQMAKYQDECQAHTQAKVAKMLEEEKDKEQRDRICSDEEEDEEKGGRRIMGPRKKFQWNDEIRELLCQVVKIKLESQDLERNNKAQAWEDCVKGFLDAEVKPLWPKGWMQARTLFKESRRGHGHLTSILAKKKVMAPSKIKVKESSTKPDKKVSVPSGQIGGPIALPSDHQTGGLSIGASSRELPSQASGGLANPPPVNLEDSLDEDLIRNPASSVEAVSKELAALNSRAAGNSEFTLPAPSKAPAEKVGGVLCTEEKRNLAKPSPSAPPPASSLQSPLNFLAEQALALGQSSQEKKPESSGYKELSCQAPLNKGLPEVHQSKAKHHSLPRTSHGPQVAVPVPGPQVKVFHAGTQQQKNFTPPSPFANKLQGPKASPTQCHRSLLQLVKTAAKGQGFHPSAPATSGGLSASSSSSHKTPASSSSALSHPAKPHSVSSAGSSYKNNPFASSISKHGVSSGSSSSGGTPVQSSVSGSLVPGIQPPSVGQPTSRPVPSSAGKKMPVSQKLTLVAPPGGPNGDSSGGTQGVAKLLTSPSLKPSAVSSVTSSTSLSKGASGTVLLAGSSLMASPYKSSSPKLSGAMSSNSLGIITPVPIPVHVLSFSADSSAKAGVSKDAIVTGPAPGSFHHGLGHSLLAGLHSSPPHAAPLPHAAVPTHIPQSLPGASQLHGKGPAVPRKL

SEQ ID NO: 549 - DNA, 2248 bp, Homo sapiens
cagtctgcggtgggcagcggaggagtcgtgtcgtgcctgagagcgcagctgtgctcctgggcaccgcgcagtccgcccccgcggctcctggccagaccacccctaggaccccctgccccaagtcgcagccatgaactacctgcggcgccgcctgtcggacagcaactttatggccaatctgccaaatgggtacatgacagacctgcagcgtccgcagccgcccccaccgccgcccggtgcccacagccccggagccacgcccggtcccgggaccgccactgccgagaggtcctccggggtcgccccagcggcctctccggccgcccctagccccgggtcctcggggggcggtggcttcttctcgtcgctgtccaacgcggtcaagcagaccacggcggcggcagctgccaccttcagcgagcaggtgggcggcggctctgggggcgcaggccgcgggggagccgcctccagggtgctgctggtcatcgacgagccgcacaccgactgggcaaaatacttcaaagggaaaaagatccatggagaaattgacattaaagtagaacaggccgaattctctgatctcaaccttgtggcccatgccaatggtggattctctgtggatatggaagttcttcggaatggggtgaaggtcgtgcggtctctgaagccggattttgtgctgatccgccagcacgccttcagcatggcacgcaacggagactaccgcagtttggtcattgggctgcagtatgctggaatccccagtgttaactccttgcattctgtctacaacttctgtgacaagccctgggtgtttgcccagatggttcgactgcataagaaactggggacagaagaattccctctaattgatcagaccttctaccccaatcacaaagaaatgctcagcagtacaacgtaccccgtggttgtgaagatggggcacgcacactctgggatgggcaaggtcaaggttgacaaccagcatgacttccaggacatcgcaagtgtcgtggcactgaccaagacgtatgccactgccgagcccttcatcgatgccaaatatgacgtgcgtgtccagaagattgggcagaactacaaggcctacatgaggacgtcagtgtcagggaactggaagaccaatactggctctgcgatgctggagcaaattgccatgtctgacagatacaagctgtgggtggacacgtgctcagagatttttgggggactggacatctgcgcagtggaagcgctacatggcaaggacggaagggatcacatcattgaggtggtgggttcctccatgccgctcattggtgaccaccaggatgaagacaaacagctcatcgtagagctcgtggtcaacaagatggctcaggccctgccccggcagcgacagcgggatgcctcccctggcaggggctcccatggccagactccgtccccaggggccctgcccttgggccgccagacctcccagcagcccgcagggcccccggctcagcagcgacccccaccacagggcggccctccacagccgggtccaggcccccagcgccagggacccccattgcagcagcgcccgcccccgcagggccagcagcacctttcaggccttggacccccagctggcagccccctgccccagcgccttccaagtcccacctcagcgccccagcagcccgcgtcccaggccgcgccgccgacccagggtcaaggccgccaatcccggccagtggcgggaggccccggggcgcctccagcagcccgcccgcccgcctctccgtctccccagcgccaggcgggccccccacaggctacccgtcagacatccgtctctggcccggctccgccaaaggcctctggggccccaccgggcgggcagcagcgccagggcccgccccagaaacccccaggcccagccggccccacacgccaggccagccaggcgggtcccgtgccccgcactgggccacccaccacgcagcagcctcggcccagcggcccgggccccgctggacgtcccaaaccacagctggcccagaaacccagccaggacgtgccgccacccgccaccgccgctgcagggggacctccgcacccccagctcaacaaatcccagtctctgaccaatgccttcaaccttccagagccagccccgcccaggcccagccttagccaggacgaggtgaaagctgagaccatccgcagcctgaggaagtctttcgccagcctcttctccgactga

SEQ ID NO: 550 - protein, 705 aa, Homo sapiens
MNYLRRRLSDSNFMANLPNGYMTDLQRPQPPPPPPGAHSPGATPGPGTATAERSSGVAPAASPAAPSPGSSGGGGFFSSLSNAVKQTTAAAAATFSEQVGGGSGGAGRGGAASRVLLVIDEPHTDWAKYFKGKKIHGEIDIKVEQAEFSDLNLVAHANGGFSVDMEVLRNGVKVVRSLKPDFVLIRQHAFSMARNGDYRSLVIGLQYAGIPSVNSLHSVYNFCDKPWVFAQMVRLHKKLGTEEFPLIDQTFYPNHKEMLSSTTYPVVVKMGHAHSGMGKVKVDNQHDFQDIASVVALTKTYATAEPFIDAKYDVRVQKIGQNYKAYMRTSVSGNWKTNTGSAMLEQIAMSDRYKLWVDTCSEIFGGLDICAVEALHGKDGRDHIIEVVGSSMPLIGDHQDEDKQLIVELVVNKMAQALPRQRQRDASPGRGSHGQTPSPGALPLGRQTSQQPAGPPAQQRPPPQGGPPQPGPGPQRQGPPLQQRPPPQGQQHLSGLGPPAGSPLPQRLPSPTSAPQQPASQAAPPTQGQGRQSRPVAGGPGAPPAARPPASPSPQRQAGPPQATRQTSVSGPAPPKASGAPPGGQQRQGPPQKPPGPAGPTRQASQAGPVPRTGPPTTQQPRPSGPGPAGRPKPQLAQKPSQDVPPPATAAAGGPPHPQLNKSQSLTNAFNLPEPAPPRPSLSQDEVKAETIRSLRKSFASLFSD

SEQ ID NO: 551 - DNA, 2140 bp, Homo sapiens
cagtctgcggtgggcagcggaggagtcgtgtcgtgcctgagagcgcagctgtgctcctgggcaccgcgcagtccgcccccgcggctcctggccagaccacccctaggaccccctgccccaagtcgcagccatgaactacctgcggcgccgcctgtcggacagcaactttatggccaatctgccaaatgggtacatgacagacctgcagcgtccgcagccgcccccaccgccgcccggtgcccacagccccggagccacgcccggtcccgggaccgccactgccgagaggtcctccggggtcgccccagcggcctctccggccgcccctagccccgggtcctcggggggcggtggcttcttctcgtcgctgtccaacgcggtcaagcagaccacggcggcggcagctgccaccttcagcgagcaggtgggcggcggctctgggggcgcaggccgcgggggagccgcctccagggtgctgctggtcatcgacgagccgcacaccgactgggcaaaatacttcaaagggaaaaagatccatggagaaattgacattaaagtagaacaggccgaattctctgatctcaaccttgtggcccatgccaatggtggattctctgtggatatggaagttcttcggaatggggtgaaggtcgtgcggtctctgaagccggattttgtgctgatccgccagcacgccttcagcatggcacgcaacggagactaccgcagtttggtcattgggctgcagtatgctggaatccccagtgttaactccttgcattctgtctacaacttctgtgacaagccctgggtgtttgcccagatggttcgactgcataagaaactggggacagaagaattccctctaattgatcagaccttctaccccaatcacaaagaaatgctcagcagtacaacgtaccccgtggttgtgaagatggggcacgcacactctgggatgggcaaggtcaaggttgacaaccagcatgacttccaggacatcgcaagtgtcgtggcactgaccaagacgtatgccactgccgagcccttcatcgatgccaaatatgacgtgcgtgtccagaagattgggcagaactacaaggcctacatgaggacgtcagtgtcagggaactggaagaccaatactggctctgcgatgctggagcaaattgccatgtctgacagatacaagctgtgggtggacacgtgctcagagatttttgggggactggacatctgcgcagtggaagcgctacatggcaaggacggaagggatcacatcattgaggtggtgggttcctccatgccgctcattggtgaccaccaggatgaagacaaacagctcatcgtagagctcgtggtcaacaagatggctcaggccctgccccggcagcgacagcgggatgcctcccctggcaggggctcccatggccagactccgtccccaggggccctgcccttgggccgccagacctcccagcagcccgcagggcccccggctcagcagcgacccccaccacagggcggccctccacagccgggtccaggcccccagcgccagggacccccattgcagcagcgcccgcccccgcagggccagcagcacctttcaggccttggacccccagctggcagccccctgccccagcgccttccaagtcccacctcagcgccccagcagcccgcgtcccaggccgcgccgccgacccagggtcaaggccgccaatcccggccagtggcgggaggccccggggcgcctccagcagcccgcccgcccgcctctccgtctccccagcgccaggcgggccccccacaggctacccgtcagacatccgtctctggcccggctccgccaaaggcctctggggccccaccgggcgggcagcagcgccagggcccgccccagaaacccccaggcccagccggccccacacgccaggccagccaggcgggtcccgtgccccgcactgggccacccaccacgcagcagcctcggcccagcggcccgggccccgctggacgtcccaaaccacagctggcccagaaacccagccaggacgtgccgccacccgccaccgccgctgcagggggacctccgcacccccagctcaaagccagccccgcccaggcccagccttag

SEQ ID NO: 552 - protein, 669 aa, Homo sapiens
MNYLRRRLSDSNFMANLPNGYMTDLQRPQPPPPPPGAHSPGATPGPGTATAERSSGVAPAASPAAPSPGSSGGGGFFSSLSNAVKQTTAAAAATFSEQVGGGSGGAGRGGAASRVLLVIDEPHTDWAKYFKGKKIHGEIDIKVEQAEFSDLNLVAHANGGFSVDMEVLRNGVKVVRSLKPDFVLIRQHAFSMARNGDYRSLVIGLQYAGIPSVNSLHSVYNFCDKPWVFAQMVRLHKKLGTEEFPLIDQTFYPNHKEMLSSTTYPVVVKMGHAHSGMGKVKVDNQHDFQDIASVVALTKTYATAEPFIDAKYDVRVQKIGQNYKAYMRTSVSGNWKTNTGSAMLEQIAMSDRYKLWVDTCSEIFGGLDICAVEALHGKDGRDHIIEVVGSSMPLIGDHQDEDKQLIVELVVNKMAQALPRQRQRDASPGRGSHGQTPSPGALPLGRQTSQQPAGPPAQQRPPPQGGPPQPGPGPQRQGPPLQQRPPPQGQQHLSGLGPPAGSPLPQRLPSPTSAPQQPASQAAPPTQGQGRQSRPVAGGPGAPPAARPPASPSPQRQAGPPQATRQTSVSGPAPPKASGAPPGGQQRQGPPQKPPGPAGPTRQASQAGPVPRTGPPTTQQPRPSGPGPAGRPKPQLAQKPSQDVPPPATAAAGGPPHPQLKASPAQAQP

SEQ ID NO: 553 - DNA, 2603 bp, Homo sapiens
attaatccctgagacaaaggtactgaaggcaagtggctgaagaacaggcttgattggacagatgacttggagatgttcactggacagggacagccttgtgaagatctttgtgaatacccgacctcgcaagctccagagactacaataattcacttgccctaggttccaaagccagcaagtggaaaacggagactggaattccgcccacaggactccaaagcctgtgcagcaacaccccactcccccggcaggatcaccagcaggacgcgcgggagccaggaagtaagatccgtacctccaaggctcccatgggcccaagcctccgcatcaacagactgggagggattacgtggggtcccagggccggctctgaggcgggaaaactttctggaggcggcggcctcaggccggagcgggcgcacaccgactggaggggtcggattcagggatgtgggtggaccgcatttccccatcttccccgccgcgcacttcctctggtgcaatctccacaccccgcgccggcccgcctgcaacgcgccctggcactcaccggtgggcgaaatttccccgcctccacgtgagagccagctccgccgtgacccggaagtccacttcgagtcgccggcccaccctctcgggttccggcttcttccgggtcgcggccttccggcgaacgcggttaccgtggaaaccgcggccatggcggcaccgcggcaaatccccagccacatagtgcgcctcaagcccagctgctctacagactcgtcgttcacccggacgccggtgcccaccgtgtctctcgcgtcccgcgagctgcctgtctcgtcgtggcaggtcaccgagccgtcaagcaagaatctgtgggagcagatctgcaaggagtatgaagctgagcagcctccctttccagaaggatataaagtcaaacaggagcctgtgattacggttgcgccagtagaggaaatgctttttcatggcttcagtgcagagcactattttccggtttcccatttcaccatgatctcacgtacaccctgtcctcaagataaatcggaaacaatcaacccaaaaacatgttctcccaaagaatatttggaaactttcatctttcctgttctgcttcccggaatggctagcctgcttcaccaagcgaagaaagaaaaatgttttgagaggaaaagaaccaaattcattgcctgtgattttctgactgagtggttatacaaccaaaatccaaagagggcaggggagccattcacagaatttttctccattccatttgtggaggagcggctaaagcaacacccacggccgccaatcccactctcgctcctgctgacagaagaggaagcagccctctacattcaatccttctggagagcctgtgtggttcgctgtgatcctgagattcaagaactgcgtcagtggcagaagaaacttcgcgaggccaagcacattcaccagcaagtcaaaattttctgggccaagcaagaacaaaaagtgaaatgcaaaatggaggacgatgcagtacctgcagccaagatgaaaattccatcatcttaaccatagctaagacgtatctttgcccattcgagcacaagttaccttgtgcaaggaaaatgtccaaatgatgctctctctcttgtgatttctttaacaagacttggaacatgtgcaaatggaatcttttctgtacaagataggattcattgcaaacaagctttaatgcaaatagtttagaaaagaaaggaccagtcttcactttctgcattatccccacattttattcattcatccagattacttcttcagtgcctcaggagtattcttctacaccagctgctgttaaaatgtacaatgaactctagtcccaaggaatacagaagtgctcttattaccagttttcccacttgtggccgcctttgcaaagatccatattctaatttaagtccccaacctctgaatttggttttaagtttacctagtgactgactactctctttataaaaaagaccttatacttaatgatcatttccaaaggagaccactccttaacttttactgcaaacccaacaagatgagacacttaaacccagacagatgtaacaaaggatttttgttgtctaagtcccaaagtattatatagaaagttcctgcttttatgggtaaacttattaccttaatatgttctgtggtttgctgttaaccaagattctcccatttaaaatgccacagaccgaccctcaaggcagatccgaaagcctagtagttagttgcactgggttgttttgacaagctaccacacgtcttaagtaaatagtaaagcctttatttttgtgttaagaacagcattttgaaaataaaacctatctgcccatgctttacagccttttaaatttgtaatatttatatagtcgtttatggtacatattgattgtcttgaaatttctttaacttcttttttataagtatgcaacagtcagccgggggaagataaaggtacattataaaacacacattaatgcatttaataaatatatattatctatcaaaaaaaaaaaaaaaaaaaaaaaaaaaaaaaaaaaaaaaaaaaaaaaaaaaaa

SEQ ID NO: 554 - protein, 287 aa, Homo sapiens
MAAPRQIPSHIVRLKPSCSTDSSFTRTPVPTVSLASRELPVSSWQVTEPSSKNLWEQICKEYEAEQPPFPEGYKVKQEPVITVAPVEEMLFHGFSAEHYFPVSHFTMISRTPCPQDKSETINPKTCSPKEYLETFIFPVLLPGMASLLHQAKKEKCFERKRTKFIACDFLTEWLYNQNPKRAGEPFTEFFSIPFVEERLKQHPRPPIPLSLLLTEEEAALYIQSFWRACVVRCDPEIQELRQWQKKLREAKHIHQQVKIFWAKQEQKVKCKMEDDAVPAAKMKIPSS

SEQ ID NO: 555 - DNA, 1799 bp, Homo sapiens
tgggtcctggccgccggcttcgctgagacgcgctcgcgtgggctgccctcccgggcccgcagtggtcgcggcggcatgaagggcgctctggggagtcccgtggctgccgctggcgccgcgatgcaggagagtttcggctgcgtggtggccaaccgcttccatcagctgctggacgacgagtcggacccgttcgacatcctgcgcgaggccgagcgccggcgccagcagcagctgcagcgcaagaggcgcgacgaggcggcggcggcggccggggccggtccccgcggcggcaggagcccagccggggcctcgggccacagagccggcgcgggcggccggagggagtcgcagaaggagcgcaagagcctcccggcgcccgtcgctcaccggcccgatagccccgggggcggcctgcaggcgccgggccagaagcggactcctagaagaggggagcagcaaggatggaatgacagccgtgggccggaggggatgctcgaaagagctgagcggagatcctacagggaataccgaccctatgagacagagaggcaggcagacttcacagctgagaagtttccagatgaaaaaccaggtgataggtttgatcgagacagaccgttgagaggacgtggaggcccgagagggggtatgcgcggcagaggcagaggtggccctgggaacagagtttttgacgcttttgaccagagaggaaagcgagaatttgaaagatatggtgggaatgacaaaatagcagtcagaactgaagacaacatgggtggatgtggagttcgaacctggggatcgggtaaagataccagtgatgtggagccaactgcaccgatggaggaacccacagtggtggaggagtcccagggcaccccggaagaggagtctccagccaaagttcctgagttggaggtagaagaagaaacccaagttcaagagatgactttagatgagtggaaaaatcttcaagaacagaccagaccaaagcctgagtttaacatccggaaaccagaatccactgttccttccaaagccgtggtgattcacaagtcaaaatacagagatgatatggtaaaagatgactatgaggacgattcccatgttttccggaaacccgccaatgacatcacatcccagctggagattaattttggtaacctccctcgtcctgggcgtggagccagaggaggcacccggggaggccggggaaggatcaggagggcagagaacaactatcccagagcagaagtggtgatgcaagatgttgcccccaacccagatgacccggaagatttccctgcgctgtcttgaaagagccctgtttcccagcaccgcggagctgcactgcacacctgtggggagacttttccagctgggccaagggagtcagactctaagacaatagatgttgcttttcccgtgtcatgtaaatttgttcacttttttgggctgagctgttagaggggcttctccagaggctcgagagcaggccatttcccaagaagatgaagaatggtgactgtgtttttattgaaggaatttcaaatgaagaataatgtttaaaatgtgtatatagagatagtatagactcctccgcggaagatggaccccccggaggttgtaaaatagactccatggagactcttaggaagcagtagataccccggggctgtgctttagcgttagaggaaaccacataggagctggaacctgttaatggaaagcagtcacagctggaggtttttcggaagaaccaaggaagattaaaatacattgcacttacaaaaaaaaaa

SEQ ID NO: 556 - protein, 413 aa, Homo sapiens
MKGALGSPVAAAGAAMQESFGCVVANRFHQLLDDESDPFDILREAERRRQQQLQRKRRDEAAAAAGAGPRGGRSPAGASGHRAGAGGRRESQKERKSLPAPVAHRPDSPGGGLQAPGQKRTPRRGEQQGWNDSRGPEGMLERAERRSYREYRPYETERQADFTAEKFPDEKPGDRFDRDRPLRGRGGPRGGMRGRGRGGPGNRVFDAFDQRGKREFERYGGNDKIAVRTEDNMGGCGVRTWGSGKDTSDVEPTAPMEEPTVVEESQGTPEEESPAKVPELEVEEETQVQEMTLDEWKNLQEQTRPKPEFNIRKPESTVPSKAVVIHKSKYRDDMVKDDYEDDSHVFRKPANDITSQLEINFGNLPRPGRGARGGTRGGRGRIRRAENNYPRAEVVMQDVAPNPDDPEDFPALS

SEQ ID NO: 557 - DNA, 2066 bp, Homo sapiens
agcatggatatatagctccaccattcactctagtttgtttttttttttttttaaataaaagtcagtttgtacaagttccctcacttctgtatggcatcatgtacttgagctgcagggaatcatgcatttcatacagttatctgcataagggtgtgtgagagagagagagagagagtgtgtgtgtgtgtgtgtgtgagagggtgtgagtgtgtgagagagtgtgtgtgtgtgtgaatgtgtgtgtggacacatacattttcaaagggagactggtaatgactgtgaatatgccctctgctcatgcatccccagtttcaggaagcaggacctgggtgaacacacttgcagagagcctcactggggttctttcctggctgctgtcttgtctgctgatggaaaggtgtctggcttcgggccctgaccttgatgagagctcttggcacatgctggaggcctggaatgtcatcccacagttccactgtcatcagttctcagccaaccccactgttgccttttcagccaatttcatggtgtttattctggtgtcagtctcctcaccggagcgtgggcactcaagggcatcgagcgagtctgtcttgtttgctgctgcagccccagcacagagtccgatgccttgctctgcccctgctcttggaaggcctggctgaggcagtttccctgtctcttcccatttcaagggcacccactcatcaggttcctcgaggaagaaacttcacgcatctcaggcctgccttccctccatctgtccccaaacctcccattccttgacccctgtgcctaagtactcatcacttccacttagaacccacggctgcacatcagcaaactgagtacatgcttttgttgatccaaatgtgctgacagtgcagtggcactgcttactgaagtctgctgtctgcaggctgtcacacaggattgtctgtaaatttatcagaacacttccaggaaggcattactgtccccattctacagacaagaaaactggtgcttggagaggtagggaacttgcccaggatcatgcagtgagcagagtctttctggccccagagctgattctgtctcagcttctgaaagcagctcacatagccaggcacatgctgtggcagggttctccctgccctactgttttactgcttctcaggaggccctgtggggcgggtgtctacaacgtgtacatttgtaggagtgtcccaggaggagcattttgttccacttttgctctactgctggctcgctctgtgtgtcttaggacacatctcttaacctctctgggctcaaccactgcacagtgaaggctctggattgataatctgtgaatgctgtgttctaattaaatagtgggtttcttggccttgggtattctgtgtctcatttttgtctttacttgttggctccacaaagcaaaacctattgtcagtaattcttactaactttatattgatgttgactgtgtagaccaattctagctacgttagccttttgttcatataaaatgaacaactgacacgtaattgttactgttttccatagtgcactgtgtcatcctgactccacgtatagagtgttcactgtgtgccagggctgctctcggataaaacctattctgttgaagtcctggctggccctaactttttaagtttaacaaggttgagaacacaagtgactttgattagcattgtcctaatctggtttatcagtagcaggggaatttataagcagttaccaaaatgcatccaaaataagatggcttaatggctaggcagaggggagagatgtgatgaagtcagtacagcagaatggtaacaagtgagcatctccctaatgggaatgggacattcctggtagagctgggagaaaaaatgaccaaagctactgggaaattctgcagagataattgtcccattactttttaattaattaaaactaattaattaactattttttttttgagacggtgtctcgctctgtcacccaggctgaaattgcaccaatgcactcatctgggcaatggaacaagactctgtttaaaaaaaaaaaaaaaaaaa

SEQ ID NO: 558 - DNA, 3859 bp, Homo sapiens
caggtcagaaaccgatcaggcatggaactccccttcgtcactcacctgttcttgcccctggtgttcctgacaggtctctgctccccctttaacctggatgaacatcacccacgcctattcccagggccaccagaagctgaatttggatacagtgtcttacaacatgttgggggtggacagcgatggatgctggtgggcgccccctgggatgggccttcaggcgaccggaggggggacgtttatcgctgccctgtagggggggcccacaatgccccatgtgccaagggccacttaggtgactaccaactgggaaattcatctcatcctgctgtgaatatgcacctggggatgtctctgttagagacagatggtgatgggggattcatggcctgtgcccctctctggtctcgtgcttgtggcagctctgtcttcagttctgggatatgtgcccgtgtggatgcttcattccagcctcagggaagcctggcacccactgcccaacgctgcccaacatacatggatgttgtcattgtcttggatggctccaacagcatctacccctggtctgaagttcagaccttcctacgaagactggtagggaaactgtttattgacccagaacagatacaggtgggactggtacagtatggggagagccctgtacatgagtggtccctgggagatttccgaacgaaggaagaagtggtgagagcagcaaagaacctcagtcggcgggagggacgagaaacaaagactgcccaagcaataatggtggcctgcacagaagggttcagtcagtcccatgggggccgacccgaggctgccaggctactggtggttgtcactgatggagagtcccatgatggagaggagcttcctgcagcactaaaggcctgtgaggctggaagagtgacacgctatgggattgcagtccttggtcactacctccggcggcagcgagatcccagctctttcctgagagaaattagaactattgccagtgatccagatgagcgattcttcttcaatgtcacagatgaggctgctctgactgacattgtggatgcactaggagatcggatttttggccttgaagggtcccatgcagaaaacgaaagctcctttgggctggaaatgtctcagattggtttctccactcatcggctaaaggatgggattctttttgggatggtgggggcctatgactggggaggctctgtgctatggcttgaaggaggccaccgccttttccccccacgaatggcactggaagacgagttcccccctgcactgcagaaccatgcagcctacctgggttactctgtttcttccatgcttttgcggggtggacgccgcctgtttctctctggggctcctcgatttagacatcgaggaaaagtcatcgccttccagcttaagaaagatggggctgtgagggttgcccagagcctccagggggagcagattggttcatactttggcagtgagctctgcccattggatacagatagggatggaacaactgatgtcttacttgtggctgcccccatgttcctgggaccccagaacaaggaaacaggacgtgtttatgtgtatctggtaggccagcagtccttgctgaccctccaaggaacacttcagccagaacccccccaggatgctcggtttggctttgccatgggagctcttcctgatctgaaccaagatggttttgctgatgtggctgtgggggcgcctctggaagatgggcaccagggagcactgtacctgtaccatggaacccagagtggagtcaggccccatcctgcccagaggattgctgctgcctccatgccacatgccctcagctactttggccgaagtgtggatggtcggctagatctggatggagatgatctggtcgatgtggctgtgggtgcccagggggcagccatcctgctcagctcccggcccattgtccatctgaccccatcactggaggtgaccccacaggccatcagtgtggttcagagggactgtaggcggcgaggccaagaagcagtctgtctgactgcagccctttgcttccaagtgacctcccgtactcctggtcgctgggatcaccaattctacatgaggttcaccgcatcactggatgaatggactgctggggcacgtgcagcatttgatggctctggccagaggttgtcccctcggaggctccggctcagtgtggggaatgtcacttgtgagcagctacacttccatgtgctggatacatcagattacctccggccagtggccttgactgtgacctttgccttggacaatactacaaagccagggcctgtgctgaatgagggctcacccacctctatacaaaagctggtccccttctcaaaggattgtggccctgacaatgaatgtgtcacagacctggtgcttcaagtgaatatggacatcagaggctccaggaaggccccatttgtggttcgaggtggccggcggaaagtgctggtatctacaactctggagaacagaaaggaaaatgcttacaatacgagcctgagtatcatcttctctagaaacctccacctggccagtctcactcctcagagagagagcccaataaaggtggaatgtgccgccccttctgctcatgcccggctctgcagtgtggggcatcctgtcttccagactggagccaaggtgacctttctgctagagtttgagtttagctgctcctctctcctgagccaggtctttgggaagctgactgccagcagtgacagcctggagagaaatggcacccttcaagaaaacacagcccagacctcagcctacatccaatatgagccccacctcctgttctctagtgagtctaccctgcaccgctatgaggttcacccatatgggaccctcccagtgggtcctggcccagaattcaaaaccactctcagggttcagaacctaggctgctatgtggtcagtggcctcatcatctcagccctccttccagctgtggcccatgggggcaattacttcctatcactgtctcaagtcatcactaacaatgcaagctgcatagtgcagaacctgactgaacccccaggcccacctgtgcatccagaggagcttcaacacacaaacagactgaatgggagcaatactcagtgtcaggtggtgaggtgccaccttgggcagctggcaaaggggactgaggtctctgttggactattgaggctggttcacaatgaatttttccgaagagccaagttcaagtccctgacggtggtcagcacctttgagctgggaaccgaagagggcagtgtcctacagctgactgaagcctcccgttggagtgagagcctcttggaggtggttcagacccggcctatcctcatctccctgtggatcctcataggcagtgtcctgggagggttgctcctgcttgctctccttgtcttctgcctgtggaagcttggcttctttgcccataagaaaatccctgaggaagaaaaaagagaagagaagttggagcaatgaatgtagaataagggtctagaaagtcctccctggcagctttcttcaagagacttgcataaaagcagaggtttgggggctcagatgggacaagaagccgcctctggactatctccccagaccagcagcctgacttgacttttgagtcctagggatgctgctggctagagatgaggctttacctcagacaagaagagctggcaccaaaactagccatgctcccaccctctgcttccctcctcctcgtgatcctggttccatagccaacactggggcttttgtttggggtccttttatccccaggaatcaataatttttttgcctaggaaaaaaaaaa

SEQ ID NO: 559 - protein, 1167 aa, Homo sapiens
MELPFVTHLFLPLVFLTGLCSPFNLDEHHPRLFPGPPEAEFGYSVLQHVGGGQRWMLVGAPWDGPSGDRRGDVYRCPVGGAHNAPCAKGHLGDYQLGNSSHPAVNMHLGMSLLETDGDGGFMACAPLWSRACGSSVFSSGICARVDASFQPQGSLAPTAQRCPTYMDVVIVLDGSNSIYPWSEVQTFLRRLVGKLFIDPEQIQVGLVQYGESPVHEWSLGDFRTKEEVVRAAKNLSRREGRETKTAQAIMVACTEGFSQSHGGRPEAARLLVVVTDGESHDGEELPAALKACEAGRVTRYGIAVLGHYLRRQRDPSSFLREIRTIASDPDERFFFNVTDEAALTDIVDALGDRIFGLEGSHAENESSFGLEMSQIGFSTHRLKDGILFGMVGAYDWGGSVLWLEGGHRLFPPRMALEDEFPPALQNHAAYLGYSVSSMLLRGGRRLFLSGAPRFRHRGKVIAFQLKKDGAVRVAQSLQGEQIGSYFGSELCPLDTDRDGTTDVLLVAAPMFLGPQNKETGRVYVYLVGQQSLLTLQGTLQPEPPQDARFGFAMGALPDLNQDGFADVAVGAPLEDGHQGALYLYHGTQSGVRPHPAQRIAAASMPHALSYFGRSVDGRLDLDGDDLVDVAVGAQGAAILLSSRPIVHLTPSLEVTPQAISVVQRDCRRRGQEAVCLTAALCFQVTSRTPGRWDHQFYMRFTASLDEWTAGARAAFDGSGQRLSPRRLRLSVGNVTCEQLHFHVLDTSDYLRPVALTVTFALDNTTKPGPVLNEGSPTSIQKLVPFSKDCGPDNECVTDLVLQVNMDIRGSRKAPFVVRGGRRKVLVSTTLENRKENAYNTSLSIIFSRNLHLASLTPQRESPIKVECAAPSAHARLCSVGHPVFQTGAKVTFLLEFEFSCSSLLSQVFGKLTASSDSLERNGTLQENTAQTSAYIQYEPHLLFSSESTLHRYEVHPYGTLPVGPGPEFKTTLRVQNLGCYVVSGLIISALLPAVAHGGNYFLSLSQVITNNASCIVQNLTEPPGPPVHPEELQHTNRLNGSNTQCQVVRCHLGQLAKGTEVSVGLLRLVHNEFFRRAKFKSLTVVSTFELGTEEGSVLQLTEASRWSESLLEVVQTRPILISLWILIGSVLGGLLLLALLVFCLWKLGFFAHKKIPEEEKREEKLEQ

SEQ ID NO: 560 - DNA, 534 bp, Homo sapiens
ctttccctgccgccgccgagtcgcgcggaggcggaggcttgggtgcgttcaagattcagcttcacccgtaacccaccgccatggccgaggaaggcattgctgctggaggtgtaatggacgttaatactgctttacaagaggttctgaagactgccctcatccacgatggcctagcacgtggaattcgcgaagctgccaaagccttagacaagcgccaagcccatctttgtgtgcttgcatccaactgtgatgagcctatgtatgtcaagttggtggaggccctttgtgctgaacaccaaatcaacctaattaaggttgatgacaacaagaaactaggagaatgggtaggcctttgtaaaattgacagagaggggaaaccccgtaaagtggttggttgcagttgtgtagtagttaaggactatggcaaggagtctcaggccaaggatgtcattgaagagtatttcaaatgcaagaaatgaagaaataaatctttggctcacaaaaaaaaaaaaaaaaaaaaaaaaaaaaaaaaaa

SEQ ID NO: 561 - protein, 132 aa, Homo sapiens [sequence omitted]

SEQ ID NO: 562 - DNA, 1725 bp, Homo sapiens
gaattccgggcggcggcgtagccactgggccgtcgaagagcgcaggaggccggtgggccgggccgggccgcgcggcgcagccatgcctggctttacgtgctgcgtgccaggctgctacaacaactcgcaccgggacaaggcgctgcacttctacacgtttccaaaggacgctgagttgcggcgcctctggctcaagaacgtatcgcgtgccggcgtcagtgggtgcttctccaccttccagcccaccacaggccaccgtctctgcagcgttcacttccagggcggccgcaagacctacacggtacgcgtccccaccatcttcccgctgcgcggcgtcaatgagcgcaaagtagcgcgcagacccgctggggccgcggccgcccgccgcaggcagcagcagcaacagcagcagcagcagcaacagcagcaacagcagcagcagcagcaacagcagcagcagcagcagcagcagcagcagtcctcaccctctgcctccactgcccagactgcccagctgcagccgaacctggtatctgcttccgcggccgtgcttctcacccttcaggccactgtagacagcagtcaggctccgggatccgtacagccggcgcccatcactcccactggagaagacgtgaagcccatcgatctcacagtgcaagtggagtttgcagccgcagagggcgcagccgctgcggccgccgcgtcggagttacaggctgctaccgcagggctggaggctgccgagtgccctatgggcccccagttggtggtggtaggggaagagggcttccctgatactggctccgaccattcgtactccttgtcgtcaggcaccacggaggaggagctcctgcgcaagctgaatgagcagcgggacatcctggctctgatggaagtgaagatgaaagagatgaaaggcagcattcgccacctgcgtctcactgaggccaagctgcgcgaagaactgcgtgagaaggatcggctgcttgccatggctgtcatccgcaagaagcacggaatgtgaactggtgccccggcagcctgctggactcccagaccccatccagccaggggaccgcaggccattgttgaactcctctatactcctgggcactggttgacagtactgaggcttaaggcagctggactctcttgctggtgacctggcatcctcaattgtttcctcctgaagtggaagctggggccttagactctgccctggtgacaccagcaattatgactttgtctacccttcctccccagttattgttgcagattctggttaagcagaggcttcagaaccactgaacttgaaacttaccctctagggatgcaggtgggatgtccagggactataggtttgggaaaaccataccttaaggttggtcagcagtcagacaactctaatgtgtgtagtgataagagattcaagtaacatcagttctcctccttttcatgcttttccttcccaggtgcagcctgtgattctgatggggacgaaatctgtgcctctgcctcctaggacttattttcccaggaggccatttacaaggggatctggatgacctgctgatggagatccagcttgccagggacttaggtttatcctgttttgtttgctactggttacaaattctattttctgtacaattagtcagactaaagttttcactgtgtttgtttggcaaaacaaattaaacaaaaagtaaggttttggaattc

SEQ ID NO: 563 - DNA, 4912 bp, Homo sapiens
attggggtctgctctaagctgcagcaagagaaactgtgtgtgaggggaagaggcctgtttcgctgtcgggtctctagttcttgcacgctctttaagagtctgcactggaggaactcctgccattaccagctcccttcttgcagaagggagggggaaacatacatttattcatgccagtctgttgcatgcaggctttttggcttcctaccttgcaacaaaataattgcaccaactccttagtgccgattccgcccacagagagtcctggagccacagtcttttttgctttgcattgtaggagagggactaagtgctagagactatgtcgctttcctgagctaccgagagcgctcgtgaactggaatcaactgcttcagggaaaaagaaaaaaaaaaaaaaaagacttgcctgggaggccgcgagaaacttgcattggaagcttcagcaaccagcattcgagaaactcctctctactttagcacggtctccagactcagccgagagacagcaaactgcagcgcggtgagagagcgagagagagggagagagagactctccagcctgggaactataactcctctgcgagaggcggagaactccttccccaaatcttttggggacttttctctctttacccacctccgcccctgcgaggagttgaggggccagttcggccgccgcgcgcgtcttcccgttcggcgtgtgcttggcccggggaaccgggagggcccggcgatcgcgcggcggccgccgcgagggtgtgagcgcgcgtgggcgcccgccgagccgaggccatggtgcagcaaaccaacaatgccgagaacacggaagcgctgctggccggcgagagctcggactcgggcgccggcctcgagctgggaatcgcctcctcccccacgcccggctccaccgcctccacgggcggcaaggccgacgacccgagctggtgcaagaccccgagtgggcacatcaagcgacccatgaacgccttcatggtgtggtcgcagatcgagcggcgcaagatcatggagcagtcgcccgacatgcacaacgccgagatctccaagcggctgggcaaacgctggaagctgctcaaagacagcgacaagatccctttcattcgagaggcggagcggctgcgcctcaagcacatggctgactaccccgactacaagtaccggcccaggaagaaggtgaagtccggcaacgccaactccagctcctcggccgccgcctcctccaagccgggggagaagggagacaaggtcggtggcagtggcgggggcggccatgggggcggcggcggcggcgggagcagcaacgcggggggaggaggcggcggtgcgagtggcggcggcgccaactccaaaccggcgcagaaaaagagctgcggctccaaagtggcgggcggcgcgggcggtggggttagcaaaccgcacgccaagctcatcctggcaggcggcggcggcggcgggaaagcagcggctgccgccgccgcctccttcgccgccgaacaggcgggggccgccgccctgctgcccctgggcgccgccgccgaccaccactcgctgtacaaggcgcggactcccagcgcctcggcctccgcctcctcggcagcctcggcctccgcagcgctcgcggccccgggcaagcacctggcggagaagaaggtgaagcgcgtctacctgttcggcggcctgggcacgtcgtcgtcgcccgtgggcggcgtgggcgcgggagccgaccccagcgaccccctgggcctgtacgaggaggagggcgcgggctgctcgcccgacgcgcccagcctgagcggccgcagcagcgccgcctcgtcccccgccgccggccgctcgcccgccgaccaccgcggctacgccagcctgcgcgccgcctcgcccgccccgtccagcgcgccctcgcacgcgtcctcctcggcctcgtcccactcctcctcttcctcctcctcgggctcctcgtcctccgacgacgagttcgaagacgacctgctcgacctgaaccccagctcaaactttgagagcatgtccctgggcagcttcagttcgtcgtcggcgctcgaccgggacctggattttaacttcgagcccggctccggctcgcacttcgagttcccggactactgcacgcccgaggtgagcgagatgatctcgggagactggctcgagtccagcatctccaacctggttttcacctactgaagggcgcgcaggcagggagaagggccggggggggtaggagaggagaaaaaaaaagtgaaaaaaagaaacgaaaaggacagacgaagagtttaaagagaaaagggaaaaaagaaagaaaaagtaagcagggctggcttcgcccgcgttctcgtcgtcggatcaaggagcgcggcggcgttttggacccgcgctcccatcccccaccttcccgggccggggacccactctgcccagccggagggacgcggaggaggaagagggtagacaggggcgacctgtgattgttgttattgatgttgttgttgatggcaaaaaaaaaaaagcgacttcgagtttgctcccctttgcttgaagagaccccctcccccttccaacgagcttccggacttgtctgcacccccagcaagaaggcgagttagttttctagagacttgaaggagtctcccccttcctgcatcaccaccttggttttgttttattttgcttcttggtcaagaaaggaggggagaacccagcgcacccctccccccctttttttaaacgcgtgatgaagacagaaggctccggggtgacgaatttggccgatggcagatgttttgggggaacgccgggactgagagactccacgcaggcgaattcccgtttggggcttttttttcctccctcttttccccttgccccctctgcagccggaggaggagatgttgaggggaggaggccagccagtgtgaccggcgctaggaaatgacccgagaaccccgttggaagcgcagcagcgggagctaggggcgggggcggaggaggacacgaactggaagggggttcacggtcaaactgaaatggatttgcacgttggggagctggcggcggcggctgctgggcctccgccttcttttctacgtgaaatcagtgaggtgagacttcccagaccccggaggcgtggaggagaggagactgtttgatgtggtacaggggcagtcagtggagggcgagtggtttcggaaaaaaaaaaagaaaaaaagaaaaaaaaagaaaaaaaaaagatttttttcttctcttaatcggaatcgtgatggtgttggattatttcaatggtggggttaatatagcatgttatcctgtctatcttttaaagatttctgtataagactgttgagcagtttttaaaatagtgtaggataatataaaaagcagatagatggcgctatgtttgattcctacaacgaaattatcaccagctttttttcattcttaactctttaaaggattcaaacgcaactcaaatctgtgctggactttaaaaaaacaattcaggaccaaattttttctcagtgtgtgtgtttattccttataggtgtaaatgagaagacgtgtttttttccttcaccgatgctccatcctcgtatttctttttccttgtaaatgtaatcagatgccattttatatgtggacgtatttatactggccaaacatattttttcttttgtccctttttttctttcctttctttttacttcctttatttctttattccttccttttcctttttttcttttttttttctttttttttttttttttttggtagttgttgttacccacgccattttacgtctccttcactgaagggctagagttttaacttttaattttttatatttaaatgtagacttttgacacttttaaaaaacaaaaaaagacaagagagatgaaaacgtttgattattttctcagtgtatttttgtaaaaaatatataaagggggtgttaatcggtgtaaatcgctgtttggatttcctgattttataacagggcggctggttaatatctcacacagtttaaaaaatcagcccctaatttctccatgtttacacttcaatctgcaggcttcttaaagtgacagtatcccttaacctgccaccagtgtccaccctccggcccccgtcttgtaaaaaggggaggagaattagccaaacactgtaagcttttaagaaaaacaaagttttaaacgaaatactgctctgtccagaggctttaaaactggtgcaattacagcaaaaagggattctgtagctttaacttgtaaaccacatcttttttgcactttttttataagcaaaaacgtgccgtttaaaccactggatctatctaaatgccgatttgagttcgcgacactatgtactgcgtttttcattcttgtatttgactatttaatcctttctacttgtcgctaaatataattgttttagtcttatggcatgatgatagcatatgtgttcaggtttatagctgttgtgtttaaaaattgaaaaaagtggaaaacatctttgtacatttaagtctgtattataataagcaaaaagattgtgtgtatgtatgtttaatataacatgacaggcactaggacgtctgcctttttaaggcagttccgttaagggtttttgtttttaaacttttttttgccatccatcctgtgcaatatgccgtgtagaatatttgtcttaaaattcaaggccacaaaaacaatgtttgggggaaaaaaaagaaaaaatcatgccagctaatcatgtcaagttcactgcctgtcagattgttgatatataccttctgtaaataactttttttgagaaggaaataaaatcagctggaactgaaccctaaaaaaaaaaaaaaaaaaaaaaaaaaaaaaaaaaaa

SEQ ID NO: 564 - protein, 474 aa, Homo sapiens
MVQQTNNAENTEALLAGESSDSGAGLELGIASSPTPGSTASTGGKADDPSWCKTPSGHIKRPMNAFMVWSQIERRKIMEQSPDMHNAEISKRLGKRWKLLKDSDKIPFIREAERLRLKHMADYPDYKYRPRKKVKSGNANSSSSAAASSKPGEKGDKVGGSGGGGHGGGGGGGSSNAGGGGGGASGGGANSKPAQKKSCGSKVAGGAGGGVSKPHAKLILAGGGGGGKAAAAAAASFAAEQAGAAALLPLGAAADHHSLYKARTPSASASASSAASASAALAAPGKHLAEKKVKRVYLFGGLGTSSSPVGGVGAGADPSDPLGLYEEEGAGCSPDAPSLSGRSSAASSPAAGRSPADHRGYASLRAASPAPSSAPSHASSSASSHSSSSSSSGSSSSDDEFEDDLLDLNPSSNFESMSLGSFSSSSALDRDLDFNFEPGSGSHFEFPDYCTPEVSEMISGDWLESSISNLVFTY

SEQ ID NO: 565 - DNA, 3259 bp, Homo sapiens
gggccgggtccgggagccccagggcagccgccccgccgagtcgcagtgtcgggggctgcggggtgtctcggggccctggggtgagtgcggggcgcgggccgaggtttgcagggccctgtgagcgcgcccaggcacgtgttgcttcgggacgggccagccggtgggtgaaccctgccagccacgcgtggggcgggcccctggcacatctccagaccattgtctcctgtgccagaagctttgtaggtgcaacttccccttggagcagctgtgggtgcggatccagcggacgaatcccgaggcgtctcagagagagcctggacagccgctggagcctttcccgagtgggtccttccaacaccgctacagcaggaaagccatccccctagggtcctgtccatcggaaactcctgtcctggggagtctgcctgcctggcctcaggacacaggccaactaagctggccccgaaatccagaatgcatccagagggaaggcacagtgtcaccttcgtcccctccggagctgcacgtggcctgagcaggatggtgccctccagcccagcggtggagaagcaggtgcccgtggaacctgggcctgaccccgagctccggtcctggcggcgcctcgtgtgctacctttgcttctacggcttcatggcgcagatacggccaggggagagcttcatcaccccctacctcctggggcccgacaagaacttcacgcgggagcaggtcacgaacgagatcacgccggtgctgtcgtactcctacctggccgtgctggtgccggtgttcctgctcaccgactacctgcgctacacgccggtgctgctgctgcaggggctcagcttcgtgtcggtgtggctgctgctgctgctgggccactcggtggcgcacatgcagctcatggagctcttctacagcgtcaccatggccgcgcgcatcgcctattcctcctacatcttctctctcgtgcggcccgcgcgctaccagcgtgtggccggctactcgcgcgctgcggtgctgctgggcgtgttcaccagctccgtgctgggccagctgctggtcactgtgggccgagtctccttctccacgctcaactacatctcgctggccttcctcaccttcagcgtggtcctcgccctcttcctgaagcgccccaagcgcagcctcttcttcaaccgcgacgaccgggggcggtgcgaaacctcggcttcggagctggagcgcatgaatcccggcccaggcgggaagctgggacacgccctgcgggtggcctgtggggactcagtgctggcgcggatgctgcgggagctgggggacagcctgcggcggccgcagctgcgcctgtggtccctctggtgggtcttcaactcggccggctactacctggtggtctactacgtgcacatcctgtggaacgaggtggaccccaccaccaacagtgcgcgggtctacaacggcgcggcagatgctgcctccacgctgctgggcgccatcacgtccttcgccgcgggcttcgtgaagatccgctgggcgcgctggtccaagctgctcatcgcgggcgtcacggccacgcaggcggggctggtcttccttctggcgcacacgcgccacccgagcagcatctggctgtgctatgcggccttcgtgctgttccgcggctcctaccagttcctcgtgcccatcgccacctttcagattgcatcttctctgtctaaagagctctgtgccctggtcttcggggtcaacacgttctttgccaccatcgtcaagaccatcatcactttcattgtctcggacgtgcggggcctgggcctcccggtccgcaagcagttccagttatactccgtgtacttcctgatcctgtccatcatctacttcttgggggccatgctggatggcctgcggcactgccagcggggccaccacccgcggcagcccccggcccagggcctgaggagtgccgcggaggagaaggcagcacaggcactgagcgtgcaggacaagggcctcggaggcctgcagccagcccagagcccgccgctttccccagaagacagcctgggggctgtggggccagcctccctggagcagagacagagcgacccatacctggcccaggccccggccccgcaggcagctgaattcctgagcccagtgacaaccccttccccctgcactctgtcgtccgcccaagcctcaggccctgaggctgcagatgagacttgtccccagctggctgtccatcctcctggtgtcagcaagctgggtttgcagtgtcttccaagcgacggtgttcagaatgtgaaccagtgactctcgggcgcccctgtggtaactttgcaggcggccctcagtgcatccccacgacccctgcctcgagggccgcctgccttagcaatgggggcctccgcttatcctgctagcaggccccctaggattccccctgccctgtgccgcactctggcggtggccacagcgtgctggcgacactcagggcagctgcctggccatgctgtccctgcactgtgccccgcgggctttgttgctggaagaggtgggtggtgggcttctgcgtccaccaggcctcactggctcatgccccttggggggcttgagacaaatcctttctgccccccagggctagtgaagtggcctcttggataccagctcaggggacactggccccacaggagttgtgagccctctagggcagggtgggagccgggaccctcaggtgtagctgagctgtgacattgctggtcatccttggtgctcttgcttttttgaaagatgctttttttttttttaactgacgtagaatgaagaactgcatgtggcttctctgtctctgtggaaaagccatctcaggttggcggcagacacattgtcatcagaggggagcagcggctctggtcctcggagctggttcctctctcccaccctaagggcagccctccatggtcctgtctgtccttctgaagtgtgtccatcctgacctgcgggtcctcagctgctcccacacttgtgccagcccggaggggactggtcccggtcaccgcggacgtgctggccttggtatgtgccaggcttgcctgggctgggcagccttgggggggctgcctttgtggtgggcgctggggaagtacgtcccagcggcctcagggtctaaggagcgctagtgccttgcccacaggtgcgggaccatctgatgtgatgtgaatactcttcccacatacattaaacacacttaagtgag

SEQ ID NO: 566 - protein, 591 aa, Homo sapiens
MVPSSPAVEKQVPVEPGPDPELRSWRRLVCYLCFYGFMAQIRPGESFITPYLLGPDKNFTREQVTNEITPVLSYSYLAVLVPVFLLTDYLRYTPVLLLQGLSFVSVWLLLLLGHSVAHMQLMELFYSVTMAARIAYSSYIFSLVRPARYQRVAGYSRAAVLLGVFTSSVLGQLLVTVGRVSFSTLNYISLAFLTFSVVLALFLKRPKRSLFFNRDDRGRCETSASELERMNPGPGGKLGHALRVACGDSVLARMLRELGDSLRRPQLRLWSLWWVFNSAGYYLVVYYVHILWNEVDPTTNSARVYNGAADAASTLLGAITSFAAGFVKIRWARWSKLLIAGVTATQAGLVFLLAHTRHPSSIWLCYAAFVLFRGSYQFLVPIATFQIASSLSKELCALVFGVNTFFATIVKTIITFIVSDVRGLGLPVRKQFQLYSVYFLILSIIYFLGAMLDGLRHCQRGHHPRQPPAQGLRSAAEEKAAQALSVQDKGLGGLQPAQSPPLSPEDSLGAVGPASLEQRQSDPYLAQAPAPQAAEFLSPVTTPSPCTLSSAQASGPEAADETCPQLAVHPPGVSKLGLQCLPSDGVQNVNQ

SEQ ID NO: 567 - DNA, 2437 bp, Homo sapiens
atgactgacttgtagctggaagaaatcatcggatttttattcttttattaaagaaaaaaaatttgaaatgccttccatgtgccaagcactgtgtcaggtgggagatgacagcttggtgaaacctctgtcaggctgtcttcctccgctttctctatccctgggtttccccctgcctaaaaaggattttgtgcttcgtggcttgtccaggcaagcaggccgtcgcgggacctagaccgagacagtgagtctctctttctcccgggcctcccttctgtttcctgggctgcaggggagcaggaaatctggggcgagattcccgccgcggacgcgcactgccgaagcctggtccctcgacctgtccctgcccagcgcgggggcgcaaccgccacgcctcctcacccctccctccggctgcacgaataatgacaacagccgcccctcccacctttggcgtcacgttcaaaacaatcctttgactacaactcccagaaggccgagcggcttagcgagtgcacccgctctcggctgctccggcaaactacacatcccaaagggcagcgccgaccgcgtgtcctttcacagcaaagtgcggaactgcgtttgtttccggcgtgggtccgggcaagaaccgcttgtagtttggtttaaattctgcacgggaggaccttctgagtttacctgttgggctcctggctgcgcaggcacagcagctacacagaagagatgggagaagaggctaatgatgacaagaagccaaccactaaatttgaactagagcgagaaacagaacttcgctttgaggtggaggcatctcagtcagttcagttggagttgttgactggcatggcagagatctttggcacagagctgacccgaaacaagaaattcacctttgatgctggtgccaaggtggctgttttcacttggcatggctgttctgtgcaactgagcggccgcactgaggtggcttatgtctccaaggacactcctatgttgctttacctcaacactcacacagccttggaacagatgcggaggcaagcggaaaaggaagaagagcgaggtccccgagtgatggtagtgggccccactgatgtgggcaagtctacagtgtgtcgccttctgctcaactacgcagtgcgtttgggccgccgtcccacttatgtggagctggatgtgggccagggttctgtgtccatccctggtaccatgggggccctctacatcgagcggcctgcagatgtcgaagagggtttctctatccaggcccctctggtgtatcattttggttccaccactcctggcactaacatcaagctttataataagattacatctcgtttagcagatgtgttcaaccaaaggtgtgaggtgaaccgaagggcatctgtgagtggctgtgtcattaacacctgtggctgggtcaagggctctggttaccaggctctggtgcatgcagcctcagcttttgaggtggatgtcgttgttgttctggatcaagaacgactgtacaatgaactgaaacgggacctcccccactttgtacgcactgtgctgctccctaaatctgggggtgtggtggagcgctccaaggacttccggcgggaatgtagggatgagcgtatccgtgagtatttttatggattccgaggctgtttctatccccatgccttcaatgtcaaattttcagatgtgaaaatctacaaagttggggcacccaccatcccagactcctgtttacctttgggcatgtctcaagaggataatcagctcaagctagtacctgtcactcctgggcgagatatggtgcaccacctactgagtgttagcactgccgagggtacagaggagaacctgtccgagacaagtgtagctggcttcattgtggtgaccagtgtggacctggagcatcaggtgtttactgttctgtctccagcccctcgcccactgcctaagaacttccttctcatcatggatatccggttcatggatctgaagtagagatcagcaggaagccttgctgcctgggacatagagatcatctggccacccctagaggcagatgggctgagataaaagactgttggggccacctgaccagtaaactgtggactagtagaaagttcatattctacctctaaaaacaggtagtggtaacctgactcttctaatcttgaaccaaaaggaaaaccatgagactgtaattggtttcttagaccacctaagatgccactttgaattctctaagaccctggagaattgcatttctttcactgtgctactatgtggtttttaaaaaatcaatgctttatattccatatgtggttcttacccatttatcatggatgaaagtgtgaattagagggactccttccaataaagttcaaactgaaaaaaaatcattttaataaatatttttgccatatcataaaaaaaa

SEQ ID NO: 568 - protein, 425 aa, Homo sapiens
MGEEANDDKKPTTKFELERETELRFEVEASQSVQLELLTGMAEIFGTELTRNKKFTFDAGAKVAVFTWHGCSVQLSGRTEVAYVSKDTPMLLYLNTHTALEQMRRQAEKEEERGPRVMVVGPTDVGKSTVCRLLLNYAVRLGRRPTYVELDVGQGSVSIPGTMGALYIERPADVEEGFSIQAPLVYHFGSTTPGTNIKLYNKITSRLADVFNQRCEVNRRASVSGCVINTCGWVKGSGYQALVHAASAFEVDVVVVLDQERLYNELKRDLPHFVRTVLLPKSGGVVERSKDFRRECRDERIREYFYGFRGCFYPHAFNVKFSDVKIYKVGAPTIPDSCLPLGMSQEDNQLKLVPVTPGRDMVHHLLSVSTAEGTEENLSETSVAGFIVVTSVDLEHQVFTVLSPAPRPLPKNFLLIMDIRFMDLK

SEQ ID NO: 569 - DNA, 2035 bp, Homo sapiens
ggaagaggaaattccagtagccgatcaggagtctgcaaactccggtggtaggggagcgcgctgctgtttagagccacgagttaccggagcgcctgattcctgcgccgaagtcagtggtggccgaaagtccggagtcgctgtaaaacctgagattgtgagccatggtggggagatcccggcggcgcggagcagctaagtgggcagctgtgcgagccaaggcaggtcccacgctcaccgacgaaaatggagatgatttaggattgccaccctcaccaggggacaccagctactaccaagatcaggtagatgactttcatgaggcacgatcccgggccgccttagctaagggctggaatgaagtacagagtggagacgaggaggatggcgaggaggaggaggaggaggtgctagccctagatatggacgatgaggacgacgaagatggagggaatgcgggggaggaggaggaggaggagaatgccgatgatgatggtgggagctccgtgcaaagtgaagctgaggcctctgtggatcccagtttgtcgtggggtcagaggaaaaaactttactatgacacggactatggttccaagtcccgaggccggcagagtcaacaggaggcagaggaggaggaaagagaggaggaggaggaggcacagatcattcagcggcgcctagcccaagcgctgcaagaggatgattttggtgtcgcctgggttgaggcctttgcaaaaccagtgcctcaggtagatgaggctgagacacgggtcgtgaaggatttggctaaagtttcagtgaaagagaagctgaaaatgttgcgaaaggaatcaccagaactcttggagctgatagaagacctgaaagtcaagttgacagaggttaaggatgagctggagccattgttagagttggtggaacaagggatcattccacccggaaaaggaagccaatacttgaggaccaagtacaacctctacttgaattattgctcgaacatcagtttttatttgatcctgaaagctaggagagtcccagcacatggacatcctgtcatagaaaggcttgttacctaccgaaatttgatcaacaagctgtccgttgtggatcagaagctgtcctcagaaattcgtcatctgttgacacttaaggatgatgctgtaaagaaagaactgattccaaaagcaaaatccaccaagcccaaaccaaagtctgtttcaaagacttctgctgctgcctgtgctgttacagatctttctgatgattctgattttgatgaaaaagcaaaactgaagtactataaagaaatagaagacaggcaaaagctaaagagaaagaaagaagaaaatagcactgaagaacaggctcttgaagatcaaaatgcaaagagagctattacctatcaaattgctaaaaataggggacttactcctaggagaaagaagattgatcgcaatcccagagtgaaacacagagagaagttcagaagagccaaaattagaagaagaggccaggttcgtgaagttcgtaaagaagagcaacgttatagtggtgaattatctggcattcgtgcaggagttaaaaagagcattaagcttaaatgaagtttttgcttagcataaggtttttggcagttttggatcaataaatttttacttttaactaaagtcattgtattaatatataatactttaaattttaaaaattcttgtccacaaggaaatttgtctgggttattggacaatttataagaactatgggagcaatatgaaggtgcttgagaaaagagatgatgttgaagttttccaatattctgttgaagttttccaatattaagtattagcttagggaaatttcacagttcattgtggagtgttaaacttagaacatgtgtaacttttcacataaagagaatgcatctttgacagttatcttatttgtaaggcagcctataaaatagttctgaagtattttatttacctaactataattattgggccagatacttgttaataaatgggcttaatgttaacatgga

SEQ ID NO: 570 - protein, 479 aa, Homo sapiens
MVGRSRRRGAAKWAAVRAKAGPTLTDENGDDLGLPPSPGDTSYYQDQVDDFHEARSRAALAKGWNEVQSGDEEDGEEEEEEVLALDMDDEDDEDGGNAGEEEEEENADDDGGSSVQSEAEASVDPSLSWGQRKKLYYDTDYGSKSRGRQSQQEAEEEEREEEEEAQIIQRRLAQALQEDDFGVAWVEAFAKPVPQVDEAETRVVKDLAKVSVKEKLKMLRKESPELLELIEDLKVKLTEVKDELEPLLELVEQGIIPPGKGSQYLRTKYNLYLNYCSNISFYLILKARRVPAHGHPVIERLVTYRNLINKLSVVDQKLSSEIRHLLTLKDDAVKKELIPKAKSTKPKPKSVSKTSAAACAVTDLSDDSDFDEKAKLKYYKEIEDRQKLKRKKEENSTEEQALEDQNAKRAITYQIAKNRGLTPRRKKIDRNPRVKHREKFRRAKIRRRGQVREVRKEEQRYSGELSGIRAGVKKSIKLK

SEQ ID NO: 571 - DNA, 1610 bp, Homo sapiens
ggcacgaggctgcggccgcagtagccggagccggagccgcagccaccggtgccttcctttcccgccgccgcccagccgccgtccggcctccctcgggcccgagcgcagaccaggctccagccgcgcggcgccggcagcctcgcgctccctctcgggtctctctcgggcctcgggcaccgcgtcctgtgggcggccgcctgcctgcccgcccgcccgcagccccttgcctgccggcccctgggcggcccgtgccatgggcaccgacagccgcgcggccaaggcgctcctggcgcgggcccgcaccctgcacctgcagacggggaacctgctgaactggggccgcctgcggaagaagtgcccgtccacgcacagcgaggagcttcatgattgtatccaaaaaaccttgaatgaatggagttcccaaatcaacccagatttggtcagggagtttccagatgtcttggaatgcactgtatctcatgcagtagaaaagataaatcctgatgaaagagaagaaatgaaagtttctgcaaaactgttcattgtagaatcaaactcttcatcatcaactagaagtgcagttgacatggcctgttcagtccttggagttgcacagctggattctgtgatcattgcttcacctcctattgaagatggagttaatctttccttggagcatttacagccttactgggaggaattagaaaacttagttcagagcaaaaagattgttgccataggtacctctgatctagacaaaacacagttggaacagctgtatcagtgggcacaggtaaaaccaaatagtaaccaagttaatcttgcctcctgctgtgtgatgccaccagatttgactgcatttgctaaacaatttgacatacagctgttgactcacaatgatccaaaagaactgctttctgaagcaagtttccaagaagctcttcaggaaagcattcctgacattcaagcgcacgagtgggtgccgctgtggctactgcggtattcggtcattgtgaaaagtagaggaattatcaaatcaaaaggctacattttacaagctaaaagaaggggttcttaactgacttaggagcataacttacctgtaatttccttcaatatgagagaaaattgagatgtgtaaaatctagttactgcctgtaaatggtgtcattgaggcagatattctttcgtcatatttgacagtatgttgtctgtcaagttttaaatacttatcttgcctccatatcaatccattctcatgaacctctgtattgctttccttaaactattgttttctaattgaaattgtctataaagaaaatacttgcaatatatttttcctttatttttatgactaatataaatcaagaaaatttgttgttagatatattttggcctaggtatcagggtaatgtatatacatattttttatttccaaaaaaaattcattaattgcttcttaactcttattataaccaagcaatttaattacaattgttaaaactgaaatactggaagaagatatttttcctgtcattgatgagatatatcagagtaactggagtagctgggatttactagtagtgtaaataaaattcactcttcaatac

SEQ ID NO: 572 - protein, 274 aa, Homo sapiens
MGTDSRAAKALLARARTLHLQTGNLLNWGRLRKKCPSTHSEELHDCIQKTLNEWSSQINPDLVREFPDVLECTVSHAVEKINPDEREEMKVSAKLFIVESNSSSSTRSAVDMACSVLGVAQLDSVIIASPPIEDGVNLSLEHLQPYWEELENLVQSKKIVAIGTSDLDKTQLEQLYQWAQVKPNSNQVNLASCCVMPPDLTAFAKQFDIQLLTHNDPKELLSEASFQEALQESIPDIQAHEWVPLWLLRYSVIVKSRGIIKSKGYILQAKRRGS

SEQ ID NO: 573 - DNA, 7284 bp, Homo sapiens
caattgtgtgacacaggaagcccaagtgttggccatcctcaacgaaggcagctgccgggctccggtttgcttcagcaaaccctcacccctcgccttcaaccaggcgggtgtcgtcagctgtccgccagctgctgcccgcgcctttccgcccccgcgcgccggccaaggccgaggcggccgggaccagaggcgcgcgccctcagtgcatgtgacggggtgggagggggaggtttcttcctcccccgtccccaagccccgccttctccagagaggctgcggcttcctattgcgccaccaccgaaatgaccaccgtgccagccaatcaagacgtgattcatgaagtaagacccgccccttactggtccccaggttccttcccgctcacgccggagtcacttccgaagagagaaccgccatgaagagagaagggggtgccgcccacctctgctccgacagcctcccggagtcccagcagcaagacggcaaccacgcacccaacttctccagccacggctcatgccgccgtcgccagcggcgccgacatgacaaggcgctgcatgcccgctaggccaggtttcccctcatccccagccccggggtcgtcgcccccgcgctgccatctgagacccggtagtaccgcccatgctgcagcgggaaagagaacagagagtcctggggacaggaagcagtcaattatagatttcttcaaaccagcttcaaaacaagacagacacatgttggattcaccacaaaaatcaaacatcaaatatggaggaagtagattgtctatcactgggacagagcagtttgaaaggaaactatcctcaccaaaagaatctaaacccaaaagggtgccaccagaaaagagccctattatagaagctttcatgaaaggtgttaaagagcaccatgaagatcatggtatacatgagtcacgtcggccttgtctgtcactagcctccaaatatttagccaaaggaacaaatatctatgttccttcttcatatcacttgccaaaggagatgaagtcactaaagaaaaaacatcgatccccagagagaaggaagtcactattcattcatgaaaataatgagaagaatgatagagatcgaggcaaaaccaatgcagactccaaaaagcagaccacagtggcagaagctgacatcttcaataacagctccagaagccttagcagcaggagcagcctgtccaggcaccacccggaagaaagcccactgggagctaaattccagttgtcactagcttcttactgcagagaacgagaactaaagaggttgagaaaggagcaaatggagcagagaatcaactccgagaattctttctcagaagcaagcagtctttccttaaaatctagtatagaaagaaaatataaaccaaggcaggaacaaaggaaacagaatgacatcatacctggaaaaaataatctgtcaaatgtggaaaatggacatctctcaagaaaaagatcctcttctgattcatgggaacctacttcagcaggctctaagcagaataaattccctgaaaaaagaaaaaggaactctgtggactcagatctgaaaagcacaagagaatctatgataccaaaagcaagagagtccttccttgagaagcgtcctgatggaccacatcagaaagaaaaatttataaaacatattgcactgaagacacctggtgatgtgttgcgcttagaagatatatccaaggaaccgagtgatgaaactgatggctcttctgcaggcttggcaccttcaaattctggcaattctggccaccattctaccaggaatagtgaccaaatccaagtggcaggtaccaaggagactaagatgcagaaaccccacttacctttatctcaggaaaagtctgcaattaaaaaagctagcaaccttcagaaaaataaaaccgctagctccacgacaaaggagaaggagacaaaactacctttactttcccgtgttccaagtgctggttcctctctagtaccattaaatgctaaaaattgtgctcttccagtttctaaaaaagataaagagcgttcctcatctaaagaatgttctgggcattctacagaatccaccaaacacaaggaacacaaagcaaagactaataaggccgattctaatgtatcttcagggaaaatttatgggggacctttgcgctcagaatatggcactcctacaaagtctccccctgctgctttggaagttgtgccatgtatcccaagccctgcagcaccttcagataaagccccttcagaaggagagagttcaggaaattccaatgcaggtagcagtgcactgaaaagaaaactaaggggtgattttgatagtgatgaagaaagtttaggttacaacctagacagtgatgaggaagaggaaacattaaagtcactggaagaaataatggctttgaacttcaatcagactcctgcagctacaggaaagcctcctgctctttccaaggggcttagatctcagtcatcagactatacaggacatgttcatcctggaacttacacaaataccttagaacgtctagtgaaggaaatggaagacacacaaaggctagatgaactgcagaagcaactacaagaagacataaggcaaggccgaggcattaaatccccaatcagaattggagaagaagacagtacagatgatgaggatggcctcttagaagagcacaaggaatttctaaagaaattttcagttacaattgatgctattcctgatcatcatccaggtgaagaaatatttaatttcctcaattctggaaaaattttcaatcagtataccttggatttaagagactctggttttattggacaaagtgctgtagaaaaacttattcttaaatcgggaaaaacagatcagatttttttgacaacacaaggtttccttacgtctgcttatcactatgtccagtgtcctgtccctgtgttaaagtggctgtttcggatgatgtcagttcatacagactgtattgtgtcagtgcagattttaagtacattgatggaaataacaattagaaatgataccttcagtgactcaccagtttggccatggatcccatcattgtctgatgtagcagctgtgtttttcaatatggggattgattttagatctttgtttcccctggagaatcttcagccagactttaatgaagactatctagtttctgaaacacagacaacatcaagggggaaagaaagtgaagattcatcttataagccaattttttcaacacttcctgaaaccaacattttaaatgtggttaagtttctaggcttgtgtacatctatacatccagaaggttaccaggatcgtgaaataatgttgctgattttaatgttatttaaaatgagtttggaaaaacagctgaaacagattcctttagtagactttcaaagcctcctgataaacctgatgaaaaacatcagagattggaacacaaaggtgcctgaactctgtctgggcataaatgaactctccagtcatccccacaacctcctgtggttggtacagctggtccctaattggacatcacgtggaaggcaactgagacagtgcctcagtctagtgattatttcaaagcttttggatgagaaacacgaagatgttcctaatgccagtaatctgcaggtatcagtcctacatcgctatcttgtgcagatgaagccttctgatttgttaaagaaaatggtcttgaagaaaaaggctgaacaaccagatggcattattgatgacagtcttcatttagaacttgaaaagcaggcatattacctgacctacattcttcttcatttagtcggtgaagttagttgttctcattctttttcttctggacaacggaaacactttgtgctactctgtggggctttggaaaagcatgttaaatgtgatattagggaagatgcaagacttttttacagaactaaggtgaaagacttggtcgccaggatacatggaaaatggcaggaaataatccagaactgtcggcctactcaggggcagcttcatgacttctgggtaccagattcttaataggagttgcagcagcaaaaatatgaaccaagagaaattcaataagagcctttcatagaggagtagaaaggattattacagaatccaatgaatgccaagaaaatgtacagcaaatgtgccacttgaatatctagtatgaagctggtaatgaagaaattgccatttctgaagcagatatgaaatatgatctgcttaattgttaaggcaactgacctttcaaaagtgcagagtcttattaaaagaggggaggggtagaagcagaataatagtcatatgtctaacctgccccagttaactcctcttgttaaattataagccagttatcttttttagatagtatttttgtcacttggataatcacaggaaatatataagaaaagagcttggactaacttgagaagttggacatggaaagcaagaccaagttccagttgggtttaattttccctcttggttattttcggacacaaagggaatgcttaaaactgagtttagtaataaaaagcataaatctcttctgtaacttttataaaccacagggaggtttcaatccatgcattttccttcattactcaagattataaatctgtttttaaaatacatctaaacaaacagttgagaaacaaaagtttggcatgttgtcagatccccttaagaggaagaggttaagctgtaaagtagtggccctgttttgatgccagaacattcatatgctgtttgttctggatttcttttaaatgcatgtattttaaatactggttaaatcttagaatcttggctatatcttagaattctggctcttggtaaccatattacagaagtctatattgtaaaagcctaaagatctggacaagtttccaacaaccttgtttccatgagtatataattttggcagacacctgaattctttgggacactgtgtctgtgtatgtgtgtgtgtgtgtgtgtgtgtgtgtgcgcttgtatcttgaagttgttgcacttcaaaaccacagctgctgtaaattcttaaacactggagagccatcctttggtttaaatggtagagggttagtggaagtgcacacgttgtttttagcccaggggtagtaacaaactcttactagccaactagaaaattattttgttgacgagatgtcccttttaggagggtttgtttcctgaaagaatgccaactttttttgttgttctttcagtattggcttgagtgacctgttctcctgagtgctctagtgtctccagttgtgggggggaaagatgatggaggggaacagaaactggacttgatgtttgcggtttgagaggcaagaaaataaaataactttctacctctaaattgaggcttaggagtaaaaagcattttgtcctaaatttatcatttaaaatagcatcagtaacttttgagctcatgtcaatcaagcattggcagtcagagattttatagggaagactaagtaaatccagtttccaagaacctaaactgattgaggctccaagagtcagaccaacaaaagttttattctgtgttgtttactggtaagaatattattatcttgatactacctctcaagggtattgttacaaaatgccacttatggttaaagagatagatacaaagagttctatttgacagaagcttgaaactctggcatctatctgcccaacgatgggggctttcgttctgtaatttaatcctttgtagatacattatttgtgtgtaattttatacgtgttcatatttttctcattttgcattgtgtaaagtgtacaaaatctcaaagtataaaatactgcttatattgcttgtaatttacagtgtgtaaatattttctaattgtgtacattgatgggggggacaagtgggttattcaggtttttttttaatgacccttttgtattgcagtttcaacagataactgtccatcaaatttaaaaccactttgatacatttttatttaacagttccaataagaaaaaaatctctatttttaattatatttctcctttagaaaaaaaatacttcatggtccctctaaaataaatggccagacctcagtttaggcccttgtatttatgactctggtagaggtcttcagactccaggtcatagtccagtcagtatttgcatttgggttctcatgaaaactttgtgactctcttttagcacaagtagcccatggtttttcttccaaatcaagtattttacttctcccttgagtccccatgctttgtctccctcctgctgctattgcccggtgaatgggatggtagagagggagaaatgttcattgcacagagaatgtcaggccactttggggacttggcaaacgaagcttgcactgagtggtggtgtgtttggcaatattactgtgccaaaaatcaccttgtctaattttatggatatgtatggcaaacttattacccttcttgcaagctgcacattaaggtacttgtaagtgtttatgcttttgtgtgtaactgtttgccttttctaactgcttttcttgttactgaaaatataattctactagttttatcacattaagaggctctccatgcacaaaatgcattgatgtagccgtaaagtaacagcatttgtacattttctatctcctgatggcagtggtgcctttgtcaccttttggaaggtttgcattttgtttctgctttcaagcgcaaatagtagcttgctttcagcttcacaaaaatctcctcaaatgtaaaagatacaaaatggcgtgttatcatccaggcttagttggagtatttgcatttttatttttatcaaaacaaatataattggtggggactggccagtaataatgtgtggcgtctttaagccaagagtaatttttaaattaaaaatgaaaattttaagaggtagcccattaaacaagctactgagttggagaattaggggatgactgtggtggtttgtcgctaaggaggcaacagtagggtccaggcggcggggcacgtagagcagttagcatgatccatggttattccttactcatgaacagtgtcggcgcacctcattatctgtgcatttgtttttcctgggcagtcctgtcagccagttaatccaccagctcttaggaagtaaatacagatttttttctttccttttttttttttttaaagattttatactacatcttgttaaagtcctatgaatgtgtgtgtgtgtgtgctattaaaactgctttttctcagtttg

SEQ ID NO: 574 - protein, 1173 aa, Homo sapiens
MTRRCMPARPGFPSSPAPGSSPPRCHLRPGSTAHAAAGKRTESPGDRKQSIIDFFKPASKQDRHMLDSPQKSNIKYGGSRLSITGTEQFERKLSSPKESKPKRVPPEKSPIIEAFMKGVKEHHEDHGIHESRRPCLSLASKYLAKGTNIYVPSSYHLPKEMKSLKKKHRSPERRKSLFIHENNEKNDRDRGKTNADSKKQTTVAEADIFNNSSRSLSSRSSLSRHHPEESPLGAKFQLSLASYCRERELKRLRKEQMEQRINSENSFSEASSLSLKSSIERKYKPRQEQRKQNDIIPGKNNLSNVENGHLSRKRSSSDSWEPTSAGSKQNKFPEKRKRNSVDSDLKSTRESMIPKARESFLEKRPDGPHQKEKFIKHIALKTPGDVLRLEDISKEPSDETDGSSAGLAPSNSGNSGHHSTRNSDQIQVAGTKETKMQKPHLPLSQEKSAIKKASNLQKNKTASSTTKEKETKLPLLSRVPSAGSSLVPLNAKNCALPVSKKDKERSSSKECSGHSTESTKHKEHKAKTNKADSNVSSGKIYGGPLRSEYGTPTKSPPAALEVVPCIPSPAAPSDKAPSEGESSGNSNAGSSALKRKLRGDFDSDEESLGYNLDSDEEEETLKSLEEIMALNFNQTPAATGKPPALSKGLRSQSSDYTGHVHPGTYTNTLERLVKEMEDTQRLDELQKQLQEDIRQGRGIKSPIRIGEEDSTDDEDGLLEEHKEFLKKFSVTIDAIPDHHPGEEIFNFLNSGKIFNQYTLDLRDSGFIGQSAVEKLILKSGKTDQIFLTTQGFLTSAYHYVQCPVPVLKWLFRMMSVHTDCIVSVQILSTLMEITIRNDTFSDSPVWPWIPSLSDVAAVFFNMGIDFRSLFPLENLQPDFNEDYLVSETQTTSRGKESEDSSYKPIFSTLPETNILNVVKFLGLCTSIHPEGYQDREIMLLILMLFKMSLEKQLKQIPLVDFQSLLINLMKNIRDWNTKVPELCLGINELSSHPHNLLWLVQLVPNWTSRGRQLRQCLSLVIISKLLDEKHEDVPNASNLQVSVLHRYLVQMKPSDLLKKMVLKKKAEQPDGIIDDSLHLELEKQAYYLTYILLHLVGEVSCSHSFSSGQRKHFVLLCGALEKHVKCDIREDARLFYRTKVKDLVARIHGKWQEIIQNCRPTQGQLHDFWVPDS

SEQ ID NO: 575 - DNA, 1871 bp, Homo sapiens
tggaaaaaataatctgtcaaatgtggaaaatggacatctctcaagaaaaagatcctcttctgattcatgggaacctacttcaggctctaagcagaataaattccctgaaaaaagaaaaaggaactctgtggactcagatctgaaaagcacaagagaatctatgataccaaaagcaagagagtccttccttgagaagcgtcctgatggaccacatcagaaagaaaaatttataaaacatattgcactgaagacacctggtgatgtgttgcgcttagaagatatatccaaggaaccgagtgatgaaactgatggctcttctgcaggcttggcaccttcaaattctggcaattctggccaccattctaccaggaatagtgaccaaatccaagtggcaggtaccaaggagactaagatgcagaaaccccacttacctttatctcaggaaaagtctgcaattaaaaaagctagcaaccttcagaaaaataaaaccgctagctccacgacaaaggagaaggagacaaaactacctttactttcccgtgttccaagtgctggttcctctctagtaccattaaatgctaaaaattgtgctcttccagtttctaaaaaagataaagagcgttcctcatctaaagaatgttctgggcattctacagaatccaccaaacacaaggaacacaaagcaaagactaataaggccgattctaatgtatcttcagggaaaatttctgggggacctttgcgctcagaatatggcactcctacaaagtctccccctgctgctttggaagttgtgccatgtatcccaagccctgcagcaccttcagataaagccccttcagaaggagagagttcaggaaattccaatgcaggtagcagtgcactgaaaagaaaactaaggggtgattttgatagtgatgaagaaagtttaggttacaacctagacagtgatgaggaagaggaaacattaaagtcactggaagaaataatggctttgaacttcaatcagactcctgcagctacaggaaagcctcctgctctttccaaggggcttagatctcagtcatcagactatacaggacatgttcatcctggaacttacacaaataccttagaacgtctagtgaaggaaatggaagacacacaaaggtttgttagcataaagattaatttgctaaatttaacattttgcttgtttgtgtggcttacttttaatttaccttttttaaaaaatcatgagaaattagcgtgcattttggactctgttgtcaactgtgttagaataagatatgttggccggacgcagtggctcatgcctgtaatcacaacactttgggagacccaggcaagattacttgagcccaggagttcaaggctgcggtgagtcgtgatggcgccacttcactgcagcctgggtggcagagtgagacccagtctcaaatgaaaaaaagaggccaggtgtgatggctcatgcctgtaatccagtactttaggaggccaaagcaggcaaatctcttgagcccaggagtttgagactagcctgggcaacatggtgaaaccccatctctacaaaaaatacaaaaattagccagtcatggtgccacatacctatggtcccagctactcaacaggctgaggttgggaggatcacctgagcccaaggaggtcaaggctgtagtgagctgtgattgagccactgcactccaatctgggtgacagaataagaccccgtctcaaaaaaaaaaaagtggggggccaggcgcagtggctcacgcctgtaatcccagcactttgggaggccgaggcaggtggatcatgaggtcaggagatcgagaccatgctggctaacatggtgaaaccccatctctact

SEQ ID NO: 576 - protein, 407 aa, Homo sapiens
MIPKARESFLEKRPDGPHQKEKFIKHIALKTPGDVLRLEDISKEPSDETDGSSAGLAPSNSGNSGHHSTRNSDQIQVAGTKETKMQKPHLPLSQEKSAIKKASNLQKNKTASSTTKEKETKLPLLSRVPSAGSSLVPLNAKNCALPVSKKDKERSSSKECSGHSTESTKHKEHKAKTNKADSNVSSGKISGGPLRSEYGTPTKSPPAALEVVPCIPSPAAPSDKAPSEGESSGNSNAGSSALKRKLRGDFDSDEESLGYNLDSDEEEETLKSLEEIMALNFNQTPAATGKPPALSKGLRSQSSDYTGHVHPGTYTNTLERLVKEMEDTQRFVSIKINLLNLTFCLFVWLTFNLPFLKNHEKLACILDSVVNCVRIRYVGRTQWLMPVITTLWETQARLLEPRSSRLR

SEQ ID NO: 577 - DNA, 4371 bp, Homo sapiens
gaattccgggctgtttagctgtaattagggtgcaaggataaggtgtaagaactggctggaggttgaatgttttcctggaggagtgttagcatcaactagatccctggaatttctgcctttctgtctcaagatgcatgtctttgtccagagtacctgtggagaagaaacaatggattccttagaccatatgctgacagatcctctggaacttggtccgtgtggagatggccatggcacgcgcatcatggaggattgcctcctgggaggcaccagagttagtctgcccgaggaccttctggaggatcctgagatcttctttgatgttgtcagcctctcaacatggcaggaagtgttaagtgattctcaacgtgaacacctccagcagtttctgccccagtttcctgaagacagtgctgagcagcagaatgaactcatcttagccttgttcagtggggagaacttccgctttggaaaccctctgcacattgcccagaagcttttccgagacggacactttaaccccgaggtggtcaagtaccggcagttatgcttcaagtcacagtacaagcgctacctcaactcccagcagcagtatttccatcggctgctgaagcaaattcttgcttcccggagtgatctgctggagatggcccggcggagtggccccgcccttcccttccggcagaaacgcccttcaccatcccgcacacctgaggagcgggagtggcggacccagcagcgctacttgaaggtcttaagggaagtgaaagaggagtgtggtgacacagccctgtcatctgatgaagaggccacgttggatttacaagaacaattttcttttgaagatctcagctcatggcttccgagctctccagcacgttctcctagtcctgcggtgcccctgcgggtggtgcccacactttcaaccacggatatgaaaaccgcagataaagtagaactgggggacagtgacctgaagataatgttaaagaagcaccacgagaagcggaaacatcagccagatcacccggaccttttgacaggggacctgactctcaatgacatcatgactcgagtaaatgctggcaggaagggctctctggcagccttatatgacttggctgtccttaaaaaaaaggttaaggaaaaagaggaaaagaagaagaagaaaataaaaacgatcaaatcagaggcagaggacctggccgagccgctaagcagtactgaaggggtcgcacctctctcacaggccccctctccgctggcaattcctgctatcaaggaagagccccttgaagacctcaagccttgccttggaatcaatgaaatatcttccagcttcttctctcttctattagagatcttgctgctggagagtcaggctagccttcctatgctagaggagcgagttttggattggcagtcatcgccagccagctccctcaacagctggttctctgcggcccccaactgggctgagttggtactaccagccctgcagtatcttgctggagaaagtcgagctgttccttccagtttctctccatttgttgaattcaaagagaaaacccagcagtggaagttgcttggccaatcccaagataatgaaaaggaattagctgctctcttccagctatggctagagaccaaagatcaggccttctgtaagcaagaaaatgaagacagctcagatgccacaacacctgtccctcgggtaagaactgactatgtggtgcgtcccagcacgggggaggagaaacgggtttttcaggagcaggagcgttacaggtatagccaaccccataaggcgttcacctttcgcatgcacggctttgagtctgtggtggggccagtgaagggcgtgtttgacaaggagacctcgctcaacaaggctcgggagcactccctgctgcgctccgaccggcctgcctacgtcaccattctgtctcttgttcgggacgctgcggctcgactgcctaatggagaaggcacacgggcagagatctgtgaactgcttaaggactcccagtttcttgcaccagatgtcaccagcactcaggtaaatacagtagtgagtggtgcactggatcggctacattacgaaaaagatccctgtgtgaaatacgacattggacgaaagctgtggatctacctgcatcgtgaccggagtgaagaagagtttgagcggattcaccaagcacaagcagctgcagctaaagccagaaaagctcttcagcaaaaacccaagcccccatccaaggtgaagtccagtagcaaggagagctccataaaggtccttagcagtggcccttctgagcagagccagatgagcctcagtgactccagtatgccacccaccccagtcacacctgtaacccccaccacaccagcattgcccgccattcccatctcccctccacctgtatcggcagtgaacaaaagcggcccttccacagtctcagaaccagctaagtctagctcgggtgttcttctggtgtcttcaccaacaatgccacatctgggaacaatgctttccccagcttccagccagactgcacccagttctcaggctgccgcccgggtcgtgagccactctggctctgctggactgtctcaggtgcgagtggtggcccagcctagccttcctgctgttccccagcagtcgggagggccggcacagacattgccacagatgccagcaggaccgcagatccgggttccagccactgccacacagaccaaagtagtgccccagacagtaatggccactgtgcccgtcaaagcgcagactacggcagccactgtgcagcggcctggacccgggcagacagggctcacggtgacaagtctccctgccacagccagccctgtgagtaagccagccacgagttctcctgggacctctgctcccagtgcctccacggctgccgtcattcaaaatgtcacaggacagaacatcatcaagcaggtggcaatcactgggcagcttggtgtgaagccccaaacaggcaacagcattccactcacagccactaacttccgcatccagggtaaggatgtattgcgtctgccgccctcttccatcaccacagatgccaagggccagacggttctgcgaatcactccggacatgatggccacattggccaagtcccaggttaccacagtcaaattgacccaggacctcttcgggacaggaggcaacactacaggcaaaggcatctctgccaccttacacgtcacttccaatccagtacatgcagctgatagccctgccaaggccagttcagccagtgccccttcatccactccaacaggtaccactgtggtcaaagtgactcctgacctcaagccaacagaagcctcaagttcggcttttcgcttgatgccagctcttggcgtgagtgtggctgaccagaagggaaaaagcacagtggcctcttcagaagcaaaaccagctgccacgatccgcatcgtgcagggactgggagtgatgcctcccaaagcaggccagaccatcaccgttgcaacccacgccaagcaaggggcctcggtggccagtgggtctggaactgtccatacttcagcggtgtccttacccagtatgaatgctgctgtgtccaagactgtagctgtggcttctggggctgcaagcacccccatcagcatcagcacaggagcccccaccgtgcggcaggtccctgtcagcaccacggttgtgtccacgtcccaggctgggaagttgcctacacggatcacagttcccctctctgtgatcagccagccaatgaagggcaagagcgtggtcacagcccccatcatcaaaggcaaccttggagccaacctcagtgggttgggccgcaacatcatcctcacaactatgccagcaggcactaagctcattgctggcaataagcctgttagtttcctcactgctcagcagttgcagcagcttcagcagcaaggtcaggccacacaggtgcgcatccagactgtccctgcatcccatctccaacagggaacagcttctggctcctccaaagcagtctccactgttgttgtgactacagctccgtctcctaaacaggcacctgagcaacaatgattatgagagaggatggcttccgtgaaagaccatgcctggtctgctctggctgagaagggaccagggaggttgcatcattgttttaagcttgcctgttcaaggcagccaggcgaggggtgatggcaacggtggcctggattcgtggcctggattctgctgccacgtgccatagtggagcaccctgagaaagttcactccagggttccaaggtctgctctctaccaatctaggagaatattctgttgaaattgcagaaccggaattcc

SEQ ID NO: 578 - protein, 998 aa, Homo sapiens
MTRVNAGRKGSLAALYDLAVLKKKVKEKEEKKKKKIKTIKSEAEDLAEPLSSTEGVAPLSQAPSPLAIPAIKEEPLEDLKPCLGINEISSSFFSLLLEILLLESQASLPMLEERVLDWQSSPASSLNSWFSAAPNWAELVLPALQYLAGESRAVPSSFSPFVEFKEKTQQWKLLGQSQDNEKELAALFQLWLETKDQAFCKQENEDSSDATTPVPRVRTDYVVRPSTGEEKRVFQEQERYRYSQPHKAFTFRMHGFESVVGPVKGVFDKETSLNKAREHSLLRSDRPAYVTILSLVRDAAARLPNGEGTRAEICELLKDSQFLAPDVTSTQVNTVVSGALDRLHYEKDPCVKYDIGRKLWIYLHRDRSEEEFERIHQAQAAAAKARKALQQKPKPPSKVKSSSKESSIKVLSSGPSEQSQMSLSDSSMPPTPVTPVTPTTPALPAIPISPPPVSAVNKSGPSTVSEPAKSSSGVLLVSSPTMPHLGTMLSPASSQTAPSSQAAARVVSHSGSAGLSQVRVVAQPSLPAVPQQSGGPAQTLPQMPAGPQIRVPATATQTKVVPQTVMATVPVKAQTTAATVQRPGPGQTGLTVTSLPATASPVSKPATSSPGTSAPSASTAAVIQNVTGQNIIKQVAITGQLGVKPQTGNSIPLTATNFRIQGKDVLRLPPSSITTDAKGQTVLRITPDMMATLAKSQVTTVKLTQDLFGTGGNTTGKGISATLHVTSNPVHAADSPAKASSASAPSSTPTGTTVVKVTPDLKPTEASSSAFRLMPALGVSVADQKGKSTVASSEAKPAATIRIVQGLGVMPPKAGQTITVATHAKQGASVASGSGTVHTSAVSLPSMNAAVSKTVAVASGAASTPISISTGAPTVRQVPVSTTVVSTSQAGKLPTRITVPLSVISQPMKGKSVVTAPIIKGNLGANLSGLGRNIILTTMPAGTKLIAGNKPVSFLTAQQLQQLQQQGQATQVRIQTVPASISNREQLLAPPKQSPLLL

SEQ ID NO: 579 - DNA, 3106 bp, Homo sapiens
ggcggcggctcctgccctctcgctttccctctcgcgtctctggctgcaggtgaaaggaaagcaagccaggatggatatttacgacactcaaaccttgggggttgtggtctttggaggattcatggttgtttctgccattggcatcttcctggtgtcgactttctccatgaaggaaacgtcatatgaagaagccctagccaaccagcgcaaggagatggcgaaaactcaccaccagaaagtcgagaagaaaaagaaggagaaaacagtggagaagaaaggaaagaccaagaaaaaggaagagaaacctaatgggaagatacctgatcatgatccagcccccaatgtgactgtcctccttcgagaaccagtgcgggctcctgctgtggctgtggctccaaccccagtgcagccccccattatcgttgctcctgtcgccacagttccagccatgccccaggagaagctggcctcctcccccaaggacaaaaagaagaaggagaaaaaagtggcaaaagtggaaccagctgtcagctctgtagtgaattccatccaggttctcacttcgaaggctgccatcttggaaactgctcccaaggagggcagaaatacagatgtggcccagagcccagaggcaccaaagcaagaggctcctgccaagaagaagtctggttcaaagaaaaaagggcccccagatgccgacggccctctctacctcccctacaagacgctggtctccacggttgggagcatggtgttcaacgagggcgaggcccagcggctcatcgagatcctgtctgagaaggctggcatcattcaggacacctggcacaaggccactcagaagggtgaccctgtggcgattctgaaacgccagctggaagagaaggaaaaactgctggccacagaacaggaagatgcggctgtcgccaagagcaaactgagggagctcaacaaggagatggcagcagaaaaggccaaagcagcagccggggaggccaaagtgaaaaagcagctggtggcccgggagcaggagatcacggctgtgcaggcacgcatgcaggccagctaccgggagcacgtgaaggaggtgcagcagctgcagggcaagatccggactcttcaggagcagctggagaatggccccaacacgcagctggcccgcctgcagcaggagaactccatcctgcgggatgccttgaaccaggccacgagccaggtggagagcaagcagaacgcagagctggccaagcttcggcaggagctcagcaaggtcagcaaagagctggtggagaagtcagaggctgtgcggcaagatgagcagcagcggaaagctctggaagccaaggcagctgccttcgagaagcaggtcctgcagctgcaggcgtcccacagggagagtgaggaggccctgcagaagcgcctggacgaggtcagccgggagctgtgccacacgcagagcagccacgccagcctccgggcggatgccgagaaggcccaggagcaacagcagcagatggccgagctgcacagcaagttacagtcctccgaggcggaggtgcgcagcaaatgcgaggagctgagtggcctccacgggcagctccaggaggccagggcagagaactcccagctcacagagagaatccgttccattgaggccctgctggaggcgggccaggcgcgggatgcccaggacgtccaggccagccaggcggaggctgaccagcagcagactcgcctcaaggagctggagtcccaggtgtcgggtctggagaaggaggccatcgagctcagggaggccgtcgagcagcagaaagtgaagaacaatgacctccgggagaagaactggaaggccatggaggcactggccacggccgagcaggcctgcaaggagaagctgcactccctgacccaggccaaggaggaatcggagaagcagctctgtctgattgaggcgcagaccatggaggccctgctggctctgctcccagaactctctgtcttggcacaacagaattacaccgagtggctgcaggatctcaaagagaaaggccccacgctgctgaagcacccgccagctcccgcggagccctcctcggacctggcctccaagttgagggaggccgaggagacgcagagcacactgcaggccgagtgtgaccagtaccgcagcatcctggcggagacggagggcatgctcagagacctgcagaagagcgtggaggaggaggagcaggtgtggagggccaaggtgggcgccgcagaggaggagctccagaagtcccgggtcacagtgaagcatctcgaagagattgtagagaagctaaaaggagaacttgaaagttcggaccaggtgagggagcacacgtcgcatttggaggcagagctggaaaagcacatggcggccgccagcgccgagtgccagaactacgccaaggaggtggcagggctgaggcaacttctcctagaatctcaatctcagctcgatgccgccaagagcgaagcccagaaacagagcgatgagcttgccctggtcaggcagcagttgagtgaaatgaagagccacgtagaggatggtgacatagctggggccccagcttcctccccagaggcgcccccagccgagcaggaccccgttcagctgaagacgcagctggagtggacagaagccatcctggaggatgagcagacacagcggcagaagctcatggccgagtttgaggaggctcagacctcggcatgtcggttacaagaagaattggagaagctccgcacagccggccccctagagtcttcagaaacagaggaggcctcacagctgaaggagagactagaaaaagagaagaagttaacaagtgacctggggcgcgccgccacgagactgcaggagcttctgaagacgacccaggagcagctggcaagggagaaggacacggtgaagaagctgcaggaacagctggaaaaggcagaggacggcagcagctcaaaggagggcacctctgtctgagtttcctctttggaaaaagaagttactgttcaacttaccaaaatgccttacacattccttacaaataaaccaaccaacctacaaaaaaaaaaaaaaaaaaaa

SEQ ID NO: 580 - protein, 977 aa, Homo sapiens
MDIYDTQTLGVVVFGGFMVVSAIGIFLVSTFSMKETSYEEALANQRKEMAKTHHQKVEKKKKEKTVEKKGKTKKKEEKPNGKIPDHDPAPNVTVLLREPVRAPAVAVAPTPVQPPIIVAPVATVPAMPQEKLASSPKDKKKKEKKVAKVEPAVSSVVNSIQVLTSKAAILETAPKEGRNTDVAQSPEAPKQEAPAKKKSGSKKKGPPDADGPLYLPYKTLVSTVGSMVFNEGEAQRLIEILSEKAGIIQDTWHKATQKGDPVAILKRQLEEKEKLLATEQEDAAVAKSKLRELNKEMAAEKAKAAAGEAKVKKQLVAREQEITAVQARMQASYREHVKEVQQLQGKIRTLQEQLENGPNTQLARLQQENSILRDALNQATSQVESKQNAELAKLRQELSKVSKELVEKSEAVRQDEQQRKALEAKAAAFEKQVLQLQASHRESEEALQKRLDEVSRELCHTQSSHASLRADAEKAQEQQQQMAELHSKLQSSEAEVRSKCEELSGLHGQLQEARAENSQLTERIRSIEALLEAGQARDAQDVQASQAEADQQQTRLKELESQVSGLEKEAIELREAVEQQKVKNNDLREKNWKAMEALATAEQACKEKLHSLTQAKEESEKQLCLIEAQTMEALLALLPELSVLAQQNYTEWLQDLKEKGPTLLKHPPAPAEPSSDLASKLREAEETQSTLQAECDQYRSILAETEGMLRDLQKSVEEEEQVWRAKVGAAEEELQKSRVTVKHLEEIVEKLKGELESSDQVREHTSHLEAELEKHMAAASAECQNYAKEVAGLRQLLLESQSQLDAAKSEAQKQSDELALVRQQLSEMKSHVEDGDIAGAPASSPEAPPAEQDPVQLKTQLEWTEAILEDEQTQRQKLMAEFEEAQTSACRLQEELEKLRTAGPLESSETEEASQLKERLEKEKKLTSDLGRAATRLQELLKTTQEQLAREKDTVKKLQEQLEKAEDGSSSKEGTSV

SEQ ID NO: 581 - DNA, 735 bp, Homo sapiens
ttcagcagataatagcacttttattagcagtactcagcaggaaaagaaaaagcagttcctggttgttatttctgttttctctgtttcttagggcgtccacttttcttctgtcctttcttcttcgttttaaggagaacagctttttctccaataaataagcttttaggatgtccttctgcagttttggaagtaaaattaagtccctgcttaggtttactgacattcttcaatcgtggatttgaattttgttgtttaaatttttctttattaacagaacgcatgactctgagttttctccccatgagttcagaattatttaatttcagagcaagatgaacagaatctgtattctccaagagcacatagccaaaccctttgccgatgcctgtcattttgtctctcacaatcctcacggccatgatacttccacagtccagaaagtgcttctcaatggcagattcttcaactttataagggagattccccacaaaaaccgatctcttgtctctagatgaggtctcagatgcgagatcaactctaatacgaaatccatctgcaatctggggcacatttcttttcaatgcttgcgtggcaagactctcccccttaaacacaacataggcattaatatttttccgatccggatggattttacggtttattgcggccaacttttgggatagggttccctcgctggaatccagaacgaaatcgtacagattccattgggccaaa

SEQ ID NO: 582 - DNA, 4454 bp, Homo sapiens
gtggagatgaatggcgggcgcggcgaccgggagccggacccctgggaggtcggagcttgtcgagggatgcggctggcgctgcccggagcatggcgaccgcgtggctgagctcttctgtcgccgctgccgccgctgcgtgtgcgcgctttgcccggtgctgggcgcgcaccgtggccaccctgtgggcctggcgctggaggcagcggtgcacgtgcagaaactcagccaagaatgtttaaagcagctggcaatcaagaagcagcagcacattgacaacataacccagatagaagatgccaccgagaagctcaaggctaatgcagagtcaagtaaaacctggctgaaggggaaattcactgaactcagattactacttgacgaagaggaagcgctggccaagaaattcattgataaaaacacgcagcttaccctccaggtgtacagggaacaagctgactcttgcagagagcaacttgacatcatgaatgatctctccaacagggtctggagtatcagccaggagcccgatcctgtccagaggcttcaggcatacacggccaccgagcaggagatgcagcagcagatgagcctcggggagctgtgccatcccgtgcccctctcttttgagcccgtcaagagcttctttaagggcctcgtggaagccgtggagagtacattacagacgccattggacattcgccttaaggaaagcataaactgccagctctcagacccttccagcaccaagccaggtaccttgttgaaaaccagcccctcaccagagcgatcgctattgctgaaatacgcgcgcacgcccacgctggatcctgacacgatgcacgcgcgcctgcgcctgtccgccgatcgcctgacggtgcgctgcggcctgctgggcagcctggggcccgtgcccgtgctgcggttcgacgcgctctggcaagtgctggctcgtgactgcttcgccaccggccgccactactgggaggttgacgtgcaggaggcgggcgccggctggtgggtgggcgcggcctacgcctcccttcggcgccgcggggcctcggccgccgcccgcctgggctgcaaccgccagtcctggtgcctcaagcgctacgaccttgagtactgggccttccacgacggccagcgcagccgcctgcggccccgcgacgacctcgaccggctcggcgtcttcctggactacgaggccggcgtcctcgccttctacgacgtgacgggcggcatgagccacctgcataccttccgcgccacgttccaggagccgctctacccggccctgcggctctgggagggggccatcagcatcccccggctgccctaggggccaggaccggcgtgacagcctccaggtacgccgcagctgcccagtctcgcctaatctacctagatcagcgtggctggtccccttactgcctgcttcttagggccctctccctgccccagctttccccgaccaatcacgcctacagtgctttgaaggtttcctctcctaggctagtttcaaacaggccctaaacaagtctgctgctgccctctcatcagacctccgcaccctcaccccaccatcacttaaactactttaatccagttccttcaaagtgatacccccacaggtaagccctcagcatcctgaatacatcatccgcagcctgggaaccttctccctcgtacagcacaggaacctgacacatagtaggcacacagtaaacgtttgtgaatgaatgggagtcatccagtcctgactcttctgtctcttgaggtcccttgaatcttccgcttcctccccaccgatttcagcgtgtccacatcacagctccctccagaagctgcaagagcttcttagcagttcctggtctgaaccctctcccagtcctcatcttccaccctaaaactagagtgatcttcctaaaacttcacttaacccctcagctatgaaaaggcttccaggagtttccatgaaataacaaaaaaaaatacaagcgcctcaccttagcattcaaggcttgtctagtctgcccaaaattacttatcctcacctagctcctaccactcttcttagagactctccagtcagaaatgtgtcgcatagttccacctccacacctctctgctgccagcacattcatgcagaaaagtcttttcacctgtctcagtcttccgcaggcttacctgcgccaggaagtctaaccaaggaacaagaatctcactatcagagccacaaatctgggacctgtctttccaactaaattggaggctttggaagggcagctttgtcctatactctctccaccctgaaaagttcccagaaagccccttccctcccaagcagtgaattaataaccagcaggtgcctatcactgagtaacagaagagctgagttaggcgggcctcacaggtcacccagccagatctcatctggggagtctgaggtcctgaaagaaagcagagctgcgtaaagttaccccggggtgatataggggggccagacgtgtgccccgttcacccacccccaggcaagcatctgacctgtcccctggcccagcccttaggcccagctttcaacctgcttactcatttctcaggggattttgggaaggaatcagcaggtgacagttgctaagcaaccaaagggcgtggtgtttcccaactgtcttgggacaaaaagggtaagagcacccttagatccagatgttgccaaggaaacccagagtgcccagctgtctggaatgaagtgacagaggtagaaaacagtaggccctcacaggaggccaccttcgctagcagggagtgggaggcttctttccagggatttgtgtctccgttctgaaggttctgcgtcctgttttgtcaattccctagacggttttgaagttatattctgttaaagcatcttcataggtgcttggtgggaggccaaggtcgccgaatcctcgtggtttaaatagactttcagtgcattagtttgaaccatataaaactgacaattttcaatagtttttgagttaaaaatggcacttttgatatgagacaatgtagcagaataccaggcagacagaaccttgcaaacaccttaacttctaaccaaagactttaaaactctggctggacagagttttaagcactatgctgcaggaatcctgagaaaaaggggaaattaattctattaggaatggcccaaactgaattgtgacaggcagagggtgttcctgacagagggaagatgaatacacttgaccccaacatttctgcccatccctgatgaccaagacctcttcccagacccacagctgcaggggccaagtaataacagctcttaatagtttataatgcactgttttaatgctttacgactaaactcatctgatcctttcatcagccctagagggtagaaagttttcccaattctacacatggcaaaatggagacccagagtcacttgcccaaggtcgcacagctagtggtggagctggagtctgggcccaggctgtgagttccaggtctgtgctcatggccaccaggccatactgctcagggtgaatgcagctggtctctggccagtgcctggtgctctggcccctctcgtggagctactgcccatgatgctttcctagtgcctggttactctgcgagacttgagtctacctttggactgccttccttgggggtctgagatgaggccttatggcccagaggggaacttgattcaaaaatttgggattcatgtagcagagacagagctagactgtaaaggtcacaaactagctgtgtcaaggcccgtgatagccagaaagcggcagtttcagtccatatcaattgtgtgaccagggctagtcactttttacttctcagtgccatctataaaatggggataatagcactacctaccaagtgctgtgaggctcaaatgagccaaaggttataaacttgccttaaaactatagtcctatacaaaaattagctgggcgtggtggtgcatgcctgtaatcccagctactagggaggctgaggcaagagagttgcttgaacccaggaggcggagattgcagtgagctgagattgcaccactgcactccagcctggggacagagcaagactcttgtctcaaaaaaaacaaaaaaaacatatatactgctgtatcatgccaggatttatcagcattcccaagggagcttgcacggtactgaccgagtgctgagactactggtattcccagctgccatgtggcagcagcaggagctactagaatattctcagcacaggaatgaggcttccttggtttccatgtctgtaagggttactgatcacttaccttcttctctttcagacttgaatctgtagacatttctttattgatatggcaaattgcttgcagatatttttaaatgacagcaattttctaatatttggtttaataaaatgtgaataatgtccctttt

SEQ ID NO: 583 - protein, 442 aa, Homo sapiens
MAGAATGSRTPGRSELVEGCGWRCPEHGDRVAELFCRRCRRCVCALCPVLGAHRGHPVGLALEAAVHVQKLSQECLKQLAIKKQQHIDNITQIEDATEKLKANAESSKTWLKGKFTELRLLLDEEEALAKKFIDKNTQLTLQVYREQADSCREQLDIMNDLSNRVWSISQEPDPVQRLQAYTATEQEMQQQMSLGELCHPVPLSFEPVKSFFKGLVEAVESTLQTPLDIRLKESINCQLSDPSSTKPGTLLKTSPSPERSLLLKYARTPTLDPDTMHARLRLSADRLTVRCGLLGSLGPVPVLRFDALWQVLARDCFATGRHYWEVDVQEAGAGWWVGAAYASLRRRGASAAARLGCNRQSWCLKRYDLEYWAFHDGQRSRLRPRDDLDRLGVFLDYEAGVLAFYDVTGGMSHLHTFRATFQEPLYPALRLWEGAISIPRLP

SEQ ID NO: 584 - DNA, 1479 bp, Homo sapiens
gtggagatgaatggcgggcgcggcgaccgggagccggacccctgggaggtcggagcttgtcgagggatgcggctggcgctgcccggagcatggcgaccgcgtggctgagctcttctgtcgccgctgccgccgctgcgtgtgcgcgctttgcccggtgctgggcgcgcaccgtggccaccctgtgggcctggcgctggaggcagcggtgcacgtgcagaaactcagccaagaatgtttaaagcagctggcaatcaagaagcagcagcacattgacaacataacccagatagaagatgccaccgagaagctcaaggctaatgcagagtcaagtaaaacctggctgaaggggaaattcactgaactcagattactacttgacgaagaggaagcgctggccaagaaattcattgataaaaacacgcagcttaccctccaggtgtacagggaacaagctgactcttgcagagagcaacttgacatcatgaatgatctctccaacagggtctggagtatcagccaggagcccgatcctgtccagaggcttcaggcatacacggccaccgagcaggagatgcagcagcagatgagcctcggggagctgtgccatcccgtgcccctctcttttgagcccgtcaagagcttctttaagggcctcgtggaagccgtggagagtacattacagacgccattggacattcgccttaaggaaagcataaactgccagctctcagacccttccagcaccaagccaggtaccttgttgaaaaccagcccctcaccagagcgatcgctattgctgaaatacgcgcgcacgcccacgctggatcctgacacgatgcacgcgcgcctgcgcctgtccgccgatcgcctgacggtgcgctgcggcctgctgggcagcctggggcccgtgcccgtgctgcggttcgacgcgctctggcaagtgctggctcgtgactgcttcgccaccggccgccactactgggaggttgacgtgcaggaggcgggcgccggctggtgggtgggcgcggcctacgcctcccttcggcgccgcggggcctcggccgccgcccgcctgggctgcaaccgccagtcctggtgcctcaagcgctacgaccttgagtactgggccttccacgacggccagcgcagccgcctgcggccccgcgacgacctcgaccggctcggcgtcttcctggactacgaggccggcgtcctcgccttctacgacgtgacgggcggcatgagccacctgcataccttccgcgccacgttccaggagccgctctacccggccctgcggctctgggagggggccatcagcatcccccggctgccctaggggccaggaccggcgtgacagcctccagacttgaatctgtagacatttctttattgatatggcaaattgcttgcagatatttttaaatgacagcaattttctaatatttggtttaataaaatgtgaataatgtccctttt

SEQ ID NO: 585 - DNA, 1789 bp, Homo sapiens
cggaggaggtggagatgaatggcgggcgcggcgaccgggagccggacccctgggaggtcggagcttgtcgagggatgcggctggcgctgcccggagcatggcgaccgcgtggctgagctcttctgtcgccgctgccgccgctgcgtgtgcgcgctttgcccggtgctgggcgcgcaccgtggccaccctgtgggcctggcgctggaggcagcggtgcacgtgcagaaactcagccaagaatgtttaaagcagctggcaatcaagaagcagcagcacattgacaacataacccagatagaagatgccaccgagaagctcaaggctaatgcagagtcaagtaaaacctggctgaaggggaaattcactgaactcagattactacttgacgaagaggaagcgctggccaagaaattcattgataaaaacacgcagcttaccctccaggtgtacagggaacaagctgactcttgcagagagcaacttgacatcatgaatgatctctccaacagggtctggagtatcagccaggagcccgatcctgtccagaggcttcaggcatacacggccaccgagcaggagatgcagcagcagatgagcctcggggagctgtgccatcccgtgcccctctcctttgagcccgtcaagagcttctttaagggcctcgtggaagccgtggagagtacattacagacgccattggacattcgccttaaggaaagcataaactgccagctctcagacccttccagcaccaagccaggtaccttgttgaaaaccagcccctcaccagagcgatcgctattgctgaaatacgcgcgcacgcccacgctggatcctgacacgatgcacgcgcgcctgcgcctgtccgccgatcgcctgacggtgcgctgcggcctgctgggcagcctggggcccgtgcccgtgctgcggttcgacgcgctctggcaagtgctggctcgtgactgcttcgccaccggccgccactactgggaggttgacgtgcaggaggcgggcgccggctggtgggtgggcgcggcctacgcctcccttcggcgccgcggggcctcggccgccgcccgcctgggctgcaaccgccagtcctggtgcctcaagcgctacgaccttgagtactgggccttccacgacggccagcgcagccgcctgcggccccgcgacgacctcgaccggctcggcgtcttcctggactacgaggccggcgtcctcgccttctacgacgtgacgggcggcatgagccacctgcataccttccgcgccacgttccaggagccgctctacccggccctgcggctctgggagggggccatcagcatcccccggctgccctaggggccaggaccggcgtgacagcctccagaatgtcatggaagcagaatcgtacagtatgttcccttctgcatatgctgctttctcactcagcatcatttccttgagatgcatccaggctgctgcacgcatcaatagttcattcctggctgggcgcggtggctcacgcctgtaatcccagcgctttgggaggccgatgtgggtggatcacaaggtcaggagtttgagactagcctggccaagatggtgaaaccccatctctgcaaaaaatacaaaaattagccgggcaccatggcatgtgcctgtaatccctgctactcaggaggctgaggaaggagaatcacttgaacccgggcagcggaggttgcagtgagccgagatcacaccactgcactccagcctgggcaatagagtgagactccgtttcaaaaaaaaaaaaaaaaaa

SEQ ID NO: 586 - DNA, 3693 bp, Homo sapiens
gtggagatgaatggcgggcgcggcgaccgggagccggacccctgggaggtcggagcttgtcgagggatgcggctggcgctgcccggagcatggcgaccgcgtggctgagctcttctgtcgccgctgccgccgctgcgtgtgcgcgctttgcccggtgctgggcgcgcaccgtggccaccctgtgggcctggcgctggaggcagcggtgcacgtgcagaaactcagccaagaatgtttaaagcagctggcaatcaagaagcagcagcacattgacaacataacccagatagaagatgccaccgagaagctcaaggctaatgcagagtcaagtaaaacctggctgaaggggaaattcactgaactcagattactacttgacgaagaggaagcgctggccaagaaattcattgataaaaacacgcagcttaccctccaggtgtacagggaacaagctgactcttgcagagagcaacttgacatcatgaatgatctctccaacagggtctggagtatcagccaggagcccgatcctgtccagaggcttcaggcatacacggccaccgagcaggagatgcagcagcagatgagcctcggggagctgtgccatcccgtgcccctctcttttgagcccgtcaagagcttctttaagggcctcgtggaagccgtggagagtacattacagacgccattggacattcgcctttccccgaccaatcacgcctacagtgctttgaaggtttcctctcctaggctagtttcaaacaggccctaaacaagtctgctgctgccctctcatcagacctccgcaccctcaccccaccatcacttaaactactttaatccagttccttcaaagtgatacccccacaggtaagccctcagcatcctgaatacatcatccgcagcctgggaaccttctccctcgtacagcacaggaacctgacacatagtaggcacacagtaaacgtttgtgaatgaatgggagtcatccagtcctgactcttctgtctcttgaggtcccttgaatcttccgcttcctccccaccgatttcagcgtgtccacatcacagctccctccagaagctgcaagagcttcttagcagttcctggtctgaaccctctcccagtcctcatcttccaccctaaaactagagtgatcttcctaaaacttcacttaacccctcagctatgaaaaggcttccaggagtttccatgaaataacaaaaaaaaatacaagcgcctcaccttagcattcaaggcttgtctagtctgcccaaaattacttatcctcacctagctcctaccactcttcttagagactctccagtcagaaatgtgtcgcatagttccacctccacacctctctgctgccagcacattcatgcagaaaagtcttttcacctgtctcagtcttccgcaggcttacctgcgccaggaagtctaaccaaggaacaagaatctcactatcagagccacaaatctgggacctgtctttccaactaaattggaggctttggaagggcagctttgtcctatactctctccaccctgaaaagttcccagaaagccccttccctcccaagcagtgaattaataaccagcaggtgcctatcactgagtaacagaagagctgagttaggcgggcctcacaggtcacccagccagatctcatctggggagtctgaggtcctgaaagaaagcagagctgcgtaaagttaccccggggtgatataggggggccagacgtgtgccccgttcacccacccccaggcaagcatctgacctgtcccctggcccagcccttaggcccagctttcaacctgcttactcatttctcaggggattttgggaaggaatcagcaggtgacagttgctaagcaaccaaagggcgtggtgtttcccaactgtcttgggacaaaaagggtaagagcacccttagatccagatgttgccaaggaaacccagagtgcccagctgtctggaatgaagtgacagaggtagaaaacagtaggccctcacaggaggccaccttcgctagcagggagtgggaggcttctttccagggatttgtgtctccgttctgaaggttctgcgtcctgttttgtcaattccctagacggttttgaagttatattctgttaaagcatcttcataggtgcttggtgggaggccaaggtcgccgaatcctcgtggtttaaatagactttcagtgcattagtttgaaccatataaaactgacaattttcaatagtttttgagttaaaaatggcacttttgatatgagacaatgtagcagaataccaggcagacagaaccttgcaaacaccttaacttctaaccaaagactttaaaactctggctggacagagttttaagcactatgctgcaggaatcctgagaaaaaggggaaattaattctattaggaatggcccaaactgaattgtgacaggcagagggtgttcctgacagagggaagatgaatacacttgaccccaacatttctgcccatccctgatgaccaagacctcttcccagacccacagctgcaggggccaagtaataacagctcttaatagtttataatgcactgttttaatgctttacgactaaactcatctgatcctttcatcagccctagagggtagaaagttttcccaattctacacatggcaaaatggagacccagagtcacttgcccaaggtcgcacagctagtggtggagctggagtctgggcccaggctgtgagttccaggtctgtgctcatggccaccaggccatactgctcagggtgaatgcagctggtctctggccagtgcctggtgctctggcccctctcgtggagctactgcccatgatgctttcctagtgcctggttactctgcgagacttgagtctacctttggactgccttccttgggggtctgagatgaggccttatggcccagaggggaacttgattcaaaaatttgggattcatgtagcagagacagagctagactgtaaaggtcacaaactagctgtgtcaaggcccgtgatagccagaaagcggcagtttcagtccatatcaattgtgtgaccagggctagtcactttttacttctcagtgccatctataaaatggggataatagcactacctaccaagtgctgtgaggctcaaatgagccaaaggttataaacttgccttaaaactatagtcctatacaaaaattagctgggcgtggtggtgcatgcctgtaatcccagctactagggaggctgaggcaagagagttgcttgaacccaggaggcggagattgcagtgagctgagattgcaccactgcactccagcctggggacagagcaagactcttgtctcaaaaaaaacaaaaaaaacatatatactgctgtatcatgccaggatttatcagcattcccaagggagcttgcacggtactgaccgagtgctgagactactggtattcccagctgccatgtggcagcagcaggagctactagaatattctcagcacaggaatgaggcttccttggtttccatgtctgtaagggttactgatcacttaccttcttctctttcagacttgaatctgtagacatttctttattgatatggcaaattgcttgcagatatttttaaatgacagcaattttctaatatttggtttaataaaatgtgaataatgtccctttt

SEQ ID NO: 587 - protein, 253 aa, Homo sapiens
MAGAATGSRTPGRSELVEGCGWRCPEHGDRVAELFCRRCRRCVCALCPVLGAHRGHPVGLALEAAVHVQKLSQECLKQLAIKKQQHIDNITQIEDATEKLKANAESSKTWLKGKFTELRLLLDEEEALAKKFIDKNTQLTLQVYREQADSCREQLDIMNDLSNRVWSISQEPDPVQRLQAYTATEQEMQQQMSLGELCHPVPLSFEPVKSFFKGLVEAVESTLQTPLDIRLSPTNHAYSALKVSSPRLVSNRP

SEQ ID NO: 588 - DNA, 2964 bp, Homo sapiens
gagcacagcatggcggtcaaggtgcagacaactaagcgaggggatcctcatgagttaagaaacatatttctacagtatgccagtactgaggttgatggagagcgttatatgaccccagaagactttgttcagcgctatcttggactgtataatgatccaaatagtaacccaaagatcgtgcagctcttggcaggagtagctgatcaaaccaaggatgggttgatctcctatcaagagtttttggcatttgaatctgttttatgtgctccagattccatgttcatagtggctttccagttgtttgacaagagtggaaatggagaggtgacatttgaaaatgtcaaagaaatttttggacagactattattcatcatcatatcccttttaactgggattgtgaatttatccgactgcattttgggcataaccggaagaagcatcttaactacacagaattcacgcagtttctccaggagctgcaattggaacatgcaagacaagcctttgcactcaaagacaaaagcaaaagtggcatgatttctggtctggatttcagtgacatcatggttaccattagatctcacatgcttactccttttgtggaggagaacttagtttcagcagctggaggaagtatctcacaccaggttagcttctcctacttcaatgcatttaactcgttactgaataacatggagcttgttcgtaagatatatagcactctagctggcacaaggaaagatgttgaagtcacaaaggaggaatttgcccagagtgccatacgctatggacaagtcacaccactagaaattgatattctatatcagcttgcagacttatataatgcttcagggcgcttgactttggcagatattgagagaatagccccattggctgagggggccttaccttacaacctggcagaacttcagagacagcagtctcctgggttaggcaggcctatctggctccagattgccgagtctgcttacagattcactctgggctcagttgctggagctgtgggagccactgcagtgtatcctatagatctggtgaagacccgaatgcaaaaccagcgtggctctggctctgttgttggggagctaatgtacaaaaacagctttgactgttttaagaaagtcttgcgttatgagggcttctttggactctacaggggtctgataccacaacttataggggttgctccagaaaaggccattaaactgactgttaatgattttgttcgggacaaatttaccagaagagatggctctgttccacttccagcagaagttcttgctggaggctgtgctggaggctctcaggtcatttttaccaacccattggagatagtgaagattcgtctgcaagtagctggagagatcaccacgggacccagagtcagcgccctgaatgtgctccgggacttgggaatttttggtctgtataagggtgccaaagcgtgtttcctccgagacattcccttctctgcaatctattttcctgtttatgctcattgcaaactacttctggctgatgaaaatggacacgtgggaggtttaaatcttcttgcagctggagccatggcaggtgtcccagctgcatctctggtgacccctgctgatgtcatcaagacaagactgcaggtggctgcccgcgctggccagacgacatacagtggtgtcatcgactgtttcaggaagattctccgggaagaagggccctcagcattttggaaagggactgcagctcgagtgtttcgatcctctccccagtttggtgttaccttggtcacttatgaacttctccagcggtggttttacattgattttggaggcctcaaacccgctggttcagaaccaacacctaagtcacgcattgcagaccttcctcctgccaaccctgatcacatcggtggatacagactcgccacagccacgtttgcaggcatcgaaaacaaatttggcctttatctcccgaaatttaagtctcctagtgttgctgtggttcagccaaaggcagcagtggcagccactcagtgatgagacaactgttgagtgtggcaaaatggcgccttgaagaaagaggcctaggagagcagccctgtaatgtatccagtcagctgcatggtactgactgagctgaggagtcaaactcttctttctgtatgacatatacatatacttgtttataaaataatcatttgcccagggaaaaaaccacaacgctgtttcaagctttagtcttatgtgttgaaatgtttttgtaagccttggcatgaattagtgttctagactctgctttgcacagcttgcacttacagtgattgtacatattgtacatctttgtacagagacatcttggcacctcatcccaacaaatcacatttgtagaaatgtaatgcggttctgagtggcttgaaatgtacagaatgttttgaaagtgttttattaagaatcacacaaaaataaatgtattaaaattaaattcattctcttattggtgacttatggaaataaagcatcaatattggatgtatttaattcctagtttgttttccattctggaataaaaaggtatttgctgataaaaggcataacgagacatagtgctgctaccactgaataagtgatactttggaaagatgcatgccagtggatgccagaggaccaggctaatgacttgtgtgtgctgatgtgtttccatttgtatttaatgtgtgtagaccctcctctgttcatcaatcaaaaagcatttcctaggcagctcctcgcctgtcagtgtgcatatggaaacagggacatctccatcattactggcttagttttgctttcctttgacacagtaaggcaaaggccaagctttcaaaagagtaaaggatactttcacaatttcccttcatatggatatgattccagtcaaaaataaaatgcacaccaaaatgtaaaaaaaaaaaaaaa

SEQ ID NO: 589 - protein, 678 aa, Homo sapiens
MAVKVQTTKRGDPHELRNIFLQYASTEVDGERYMTPEDFVQRYLGLYNDPNSNPKIVQLLAGVADQTKDGLISYQEFLAFESVLCAPDSMFIVAFQLFDKSGNGEVTFENVKEIFGQTIIHHHIPFNWDCEFIRLHFGHNRKKHLNYTEFTQFLQELQLEHARQAFALKDKSKSGMISGLDFSDIMVTIRSHMLTPFVEENLVSAAGGSISHQVSFSYFNAFNSLLNNMELVRKIYSTLAGTRKDVEVTKEEFAQSAIRYGQVTPLEIDILYQLADLYNASGRLTLADIERIAPLAEGALPYNLAELQRQQSPGLGRPIWLQIAESAYRFTLGSVAGAVGATAVYPIDLVKTRMQNQRGSGSVVGELMYKNSFDCFKKVLRYEGFFGLYRGLIPQLIGVAPEKAIKLTVNDFVRDKFTRRDGSVPLPAEVLAGGCAGGSQVIFTNPLEIVKIRLQVAGEITTGPRVSALNVLRDLGIFGLYKGAKACFLRDIPFSAIYFPVYAHCKLLLADENGHVGGLNLLAAGAMAGVPAASLVTPADVIKTRLQVAARAGQTTYSGVIDCFRKILREEGPSAFWKGTAARVFRSSPQFGVTLVTYELLQRWFYIDFGGLKPAGSEPTPKSRIADLPPANPDHIGGYRLATATFAGIENKFGLYLPKFKSPSVAVVQPKAAVAATQ

SEQ ID NO: 590 - DNA, 1141 bp, Homo sapiens
gaccactggtcttgtcctcttctccagcatggtgtgtctgaagctccctggaggctcctgtatggcagcgctgacagtgacattgacggtgctgagctccccactggctttggctggggacacccaaccacgtttcttggagcaggctaagtgtgagtgtcatttcctcaatgggacggagcgagtgtggaacctgatcagatacatctataaccaagaggagtacgcgcgctacaacagtgacctgggggagtaccaggcggtgacggagctggggcggcctgacgctgagtactggaacagccagaaggacctcctggagcggaggcgggccgaggtggacacctactgcagatacaactacggggttgtggagagcttcacagtgcagcggcgagtccaacctaaggtgactgtgtatccttcaaagacccagcccctgcagcaccacaacctcctggtctgctctgtgaatggtttctatccaggcagcattgaagtcaggtggttccggaacagccaggaagagaaggctggggtggtgtccacaggcctgatccagaatggagactggaccttccagaccctggtgatgctggaaacagttcctcggagtggagaggtttacacctgccaagtggagcatccaagcatgatgagccctctcacggtgcaatggagtgcacggtctgaatctgcacagagcaagatgctgagtggagtcgggggctttgtgctgggcctgctcttccttgggacagggctgttcatctacttcaggaatcagaaaggacactctggacttcagccaacaggactcttgagctgaagtgcagatgaccacattcaaggaagaaccttctgccccagctttgcaagatgaaaagctttcccacttggctcttattcttccacaagagctttgtcaggaccaggttgttactggttcagcaactctgcagaaaatgtcctcccttgtggcttccttagctcctgttcttggcctgaagcctcacagctttgatggcagtgcctcatcttcaacttttgtgcttccctttacctaaactgtcctgcctcccatgcatctgtaccccccttgtgccacacattgcattattaaatgtttctcaaacatgga

SEQ ID NO: 591 - protein, 266 aa, Homo sapiens
MVCLKLPGGSCMAALTVTLTVLSSPLALAGDTQPRFLEQAKCECHFLNGTERVWNLIRYIYNQEEYARYNSDLGEYQAVTELGRPDAEYWNSQKDLLERRRAEVDTYCRYNYGVVESFTVQRRVQPKVTVYPSKTQPLQHHNLLVCSVNGFYPGSIEVRWFRNSQEEKAGVVSTGLIQNGDWTFQTLVMLETVPRSGEVYTCQVEHPSMMSPLTVQWSARSESAQSKMLSGVGGFVLGLLFLGTGLFIYFRNQKGHSGLQPTGLLS

SEQ ID NO: 592 - DNA, 1045 bp, Homo sapiens
ggcacgaggggcagcatggcgtccgtgacgctgagcgaggcggagaaggtgtacatcgtgcatggcgtccaggaagacctccgtgtggatggccgtggctgtgaggactaccgatgtgtcgaagtggaaactgatgtggtgtccaacactagtgggtccgccagggtcaagctgggtcacacagacatcttggtgggagtgaaagcagaaatggggacgccgaagctggagaaaccaaatgaaggctacttggagttctttgttgactgttcagccagtgctacccctgaatttgaaggtagaggaggtgatgaccttggcaccgagatcgctaacaccctctatcggatatttaacaataaaagcagtgtcgacttaaagaccctctgcattagtcctcgggagcactgctgggttctctatgtggatgtgctgcttctggaatgtggtggaaatttgtttgatgccatttccattgctgtaaaggctgctctcttcaatacaaggataccaagggttcgagttttggaggatgaagaggggtcgaaggacattgaattgtcagatgacccttatgactgcatacgactaagtgtggagaatgtcccctgcattgtcactctgtgcaagattggctatcggcatgtggtggatgctactcttcaggaggaggcctgctcgctggccagcttgctggtgtcggtgaccagcaagggagttgtgacgtgcatgaggaaagtggggaagggcagcctggacccagagagcatcttcgagatgatggagactggcaagcgtgtgggcaaggtactgcatgcctccttgcagagtgttctgcacaaggaagaaagcctggggcccaagagacagaaagttggattcctgggatgatttgcacatcaactgctcaactgtggattgttttttacttttccttttaaaccggttcgtatatatttttcttcgctgttacgaatttacagcagcatttgtacatgtaaaattaaaggctattttctggtaaaaaaaaaaaaaaaaaaaaaaa

SEQ ID NO: 593 - protein, 291 aa, Homo sapiens
MASVTLSEAEKVYIVHGVQEDLRVDGRGCEDYRCVEVETDVVSNTSGSARVKLGHTDILVGVKAEMGTPKLEKPNEGYLEFFVDCSASATPEFEGRGGDDLGTEIANTLYRIFNNKSSVDLKTLCISPREHCWVLYVDVLLLECGGNLFDAISIAVKAALFNTRIPRVRVLEDEEGSKDIELSDDPYDCIRLSVENVPCIVTLCKIGYRHVVDATLQEEACSLASLLVSVTSKGVVTCMRKVGKGSLDPESIFEMMETGKRVGKVLHASLQSVLHKEESLGPKRQKVGFLG

SEQ ID NO: 594 - DNA, 1191 bp, Homo sapiens
atggtggcgcgcaggaggaagtgcgccgcgcgggacccggaggaccgtatccccagcccactgggctacgcagctattccaatcaagttctctgaaaagcaacaggcttctcactacctctatgtgagagcacacggcgttcgacaaggcaccaagtccacctggcctcagaagaggactctttttgtcctcaatgtgcccccatactgcacagaggagagcctgtcccgcctcctgtccacctgtggcctcgtccagtctgtagagttgcaggagaagccggacctggctgagagcccaaaggagtcaaggtcgaagttttttcatcccaagccagttccgggtttccaggtagcctatgtggtgttccagaagccaagtggggtgtcagcggccttggccctgaagggccccctgctggtgtccacagagagccaccctgtgaagagtggcattcacaagtggatcagtgactacgcagactctgtgcccgaccctgaggccctgagggtggaagtggacacgttcatggaggcatatgaccagaagatcgctgaggaagaagctaaggccaaggaggaggagggggtccctgacgaggagggctgggtgaaggtgacccgccggggccggcggcctgtgctcccccggactgaggcagccagcttgcgggtgctggagagggagagacggaagcgcagccgaaaagagctgctcaacttctacgcctggcagcatcgagagagcaagatggagcatctagcgcagctgcgcaagaagttcgaggaggacaagcagaggatcgagctgctgcgggcccagcgcaaattccgaccgtactgagctgtgagagccgcagtgaatggctggaggtgcagggccaggaggaggcgaggcagggcctgcagcggtctctgagaggccgagctctggccaacgggccccaggttgaaggccaccgcgtccaacagccccatcagagtccacacaggccaggagggaaggaccaggccacccctcgggtcttgtgcttcagcagtcctggggacccaggcgtgccgagaggaggacttgtccttcctgcttcttgcctccacaccctcctctccaggaccctggatgaatccgttctgtgcttccttttccctcaatgcaaaagcccttgctggcaacgaaaaagcctcaaaagca

SEQ ID NO: 595 - protein, 280 aa, Homo sapiens
MVARRRKCAARDPEDRIPSPLGYAAIPIKFSEKQQASHYLYVRAHGVRQGTKSTWPQKRTLFVLNVPPYCTEESLSRLLSTCGLVQSVELQEKPDLAESPKESRSKFFHPKPVPGFQVAYVVFQKPSGVSAALALKGPLLVSTESHPVKSGIHKWISDYADSVPDPEALRVEVDTFMEAYDQKIAEEEAKAKEEEGVPDEEGWVKVTRRGRRPVLPRTEAASLRVLERERRKRSRKELLNFYAWQHRESKMEHLAQLRKKFEEDKQRIELLRAQRKFRPY

SEQ ID NO: 596 - DNA, 2191 bp, Homo sapiens
ggtggccgagcgggggaccgggaagcatggcccgggggtcggcggttgcctgggcggcgctcgggccgttgttgtggggctgcgcgctggggctgcagggcgggatgctgtacccccaggagagcccgtcgcgggagtgcaaggagctggacggcctctggagcttccgcgccgacttctctgacaaccgacgccggggcttcgaggagcagtggtaccggcggccgctgtgggagtcaggccccaccgtggacatgccagttccctccagcttcaatgacatcagccaggactggcgtctgcggcattttgtcggctgggtgtggtacgaacgggaggtgatcctgccggagcgatggacccaggacctgcgcacaagagtggtgctgaggattggcagtgcccattcctatgccatcgtgtgggtgaatggggtcgacacgctagagcatgaggggggctacctccccttcgaggccgacatcagcaacctggtccaggtggggcccctgccctcccggctccgaatcactatcgccatcaacaacacactcacccccaccaccctgccaccagggaccatccaatacctgactgacacctccaagtatcccaagggttactttgtccagaacacatattttgactttttcaactacgctggactgcagcggtctgtacttctgtacacgacacccaccacctacatcgatgacatcaccgtcaccaccagcgtggagcaagacagtgggctggtgaattaccagatctctgtcaagggcagtaacctgttcaagttggaagtgcgtcttttggatgcagaaaacaaagtcgtggcgaatgggactgggacccagggccaacttaaggtgccaggtgtcagcctctggtggccgtacctgatgcacgaacgccctgcctatctgtattcattggaggtgcagctgactgcacagacgtcactggggcctgtgtctgacttctacacactccctgtggggatccgcactgtggctgtcaccaagagccagttcctcatcaatgggaaacctttctatttccacggtgtcaacaagcatgaggatgcggacatccgagggaagggcttcgactggccgctgctggtgaaggacttcaacctgcttcgctggcttggtgccaacgctttccgtaccagccactacccctatgcagaggaagtgatgcagatgtgtgaccgctatgggattgtggtcatcgatgagtgtcccggcgtgggcctggcgctgccgcagttcttcaacaacgtttctctgcatcaccacatgcaggtgatggaagaagtggtgcgtagggacaagaaccaccccgcggtcgtgatgtggtctgtggccaacgagcctgcgtcccacctagaatctgctggctactacttgaagatggtgatcgctcacaccaaatccttggacccctcccggcctgtgacctttgtgagcaactctaactatgcagcagacaagggggctccgtatgtggatgtgatctgtttgaacagctactactcttggtatcacgactacgggcacctggagttgattcagctgcagctggccacccagtttgagaactggtataagaagtatcagaagcccattattcagagcgagtatggagcagaaacgattgcagggtttcaccaggatccacctctgatgttcactgaagagtaccagaaaagtctgctagagcagtaccatctgggtctggatcaaaaacgcagaaaatatgtggttggagagctcatttggaattttgccgatttcatgactgaacagtcaccgacgagagtgctggggaataaaaaggggatcttcactcggcagagacaaccaaaaagtgcagcgttccttttgcgagagagatactggaagattgccaatgaaaccaggtatccccactcagtagccaagtcacaatgtttggaaaacagcccgtttacttgagcaagactgataccacctgcgtgtcccttcctccccgagtcagggcgacttccacagcagcagaacaagtgcctcctggactgttcacggcagaccagaacgtttctggcctgggttttgtggtcatctattctagcagggaacactaaaggtggaaataaaagattttctattatggaaataaagagttggcatgaaagtcgctactg

SEQ ID NO: 597 - protein, 651 aa, Homo sapiens
MARGSAVAWAALGPLLWGCALGLQGGMLYPQESPSRECKELDGLWSFRADFSDNRRRGFEEQWYRRPLWESGPTVDMPVPSSFNDISQDWRLRHFVGWVWYEREVILPERWTQDLRTRVVLRIGSAHSYAIVWVNGVDTLEHEGGYLPFEADISNLVQVGPLPSRLRITIAINNTLTPTTLPPGTIQYLTDTSKYPKGYFVQNTYFDFFNYAGLQRSVLLYTTPTTYIDDITVTTSVEQDSGLVNYQISVKGSNLFKLEVRLLDAENKVVANGTGTQGQLKVPGVSLWWPYLMHERPAYLYSLEVQLTAQTSLGPVSDFYTLPVGIRTVAVTKSQFLINGKPFYFHGVNKHEDADIRGKGFDWPLLVKDFNLLRWLGANAFRTSHYPYAEEVMQMCDRYGIVVIDECPGVGLALPQFFNNVSLHHHMQVMEEVVRRDKNHPAVVMWSVANEPASHLESAGYYLKMVIAHTKSLDPSRPVTFVSNSNYAADKGAPYVDVICLNSYYSWYHDYGHLELIQLQLATQFENWYKKYQKPIIQSEYGAETIAGFHQDPPLMFTEEYQKSLLEQYHLGLDQKRRKYVVGELIWNFADFMTEQSPTRVLGNKKGIFTRQRQPKSAAFLLRERYWKIANETRYPHSVAKSQCLENSPFT

SEQ ID NO: 598 - DNA, 1373 bp, Homo sapiens
gacagcttggagatagggcccggaattgcgggcgtcactctgctcctgcgacctagccaggcgtgagggagtgacagcagcgcattcgcgggacgagagcgatgagtgagaacgccgcaccaggtctgatctcagagctgaagctggctgtgccctggggccacatcgcagccaaagcctggggctccctgcagggccctccagttctctgcctgcacggctggctggacaatgccagctccttcgacagactcatccctcttctcccgcaagacttttattacgttgccatggatttcggaggtcatgggctctcgtcccattacagcccaggtgtcccatattacctccagacttttgtgagtgagatccgaagagttgtggcagccttgaaatggaatcgattctccattctgggccacagcttcggtggcgtcgtgggcggaatgtttttctgtaccttccccgagatggtggataaacttatcttgctggacacgccgctctttctcctggaatcagatgaaatggagaacttgctgacctacaagcggagagccatagagcacgtgctgcaggtagaggcctcccaggagccctcgcacgtgttcagcctgaagcagctgctgcagaggttactgaagagcaatagccacttgagtgaggagtgcggggagcttctcctgcaaagaggaaccacgaaggtggccacaggtctggttctgaacagagaccagaggctcgcctgggcagagaacagcattgacttcatcagcagggagctgtgtgcgcattccatcaggaagctgcaggcccatgtcctgttgatcaaagcagtccacggatattttgattcaagacagaattactctgagaaggagtccctgtcgttcatgatagacacgatgaaatccaccctcaaagagcagttccagtttgtggaagtcccaggcaatcactgtgtccacatgagcgaaccccagcacgtggccagtatcatcagctccttcttacagtgcacacacatgctcccagcccagctgtagctctgggcctggaactatgaagacctagtgctcccagactcaacactgggactctgagttcctgagccccacaacaaggccagggatggtggggacaggcctcactagtcttgaggcccagcctaggatggtagtcaggggaaggagcgagattccaacttcaacatctgtgacctcaagggggagacagagtctgggttccagggctgctttctcctggctaataataaatatccagccagctggaggaaggaagggcaggctgggcccacctagcctttccctgctgcccaactggatggaaaataaaaggttcttgtattctca

SEQ ID NO: 599 - protein, 314 aa, Homo sapiens
MSENAAPGLISELKLAVPWGHIAAKAWGSLQGPPVLCLHGWLDNASSFDRLIPLLPQDFYYVAMDFGGHGLSSHYSPGVPYYLQTFVSEIRRVVAALKWNRFSILGHSFGGVVGGMFFCTFPEMVDKLILLDTPLFLLESDEMENLLTYKRRAIEHVLQVEASQEPSHVFSLKQLLQRLLKSNSHLSEECGELLLQRGTTKVATGLVLNRDQRLAWAENSIDFISRELCAHSIRKLQAHVLLIKAVHGYFDSRQNYSEKESLSFMIDTMKSTLKEQFQFVEVPGNHCVHMSEPQHVASIISSFLQCTHMLPAQL

SEQ ID NO: 600 - DNA, 3056 bp, Homo sapiens
gaagaggcggcgcgccggttgagcagggcgtttctaggcctggtcggctggcggcgatggcaggattttcataatatatgtagtatgagttccacatcttggcctcttacccagcttcagcagtctcagctccaccagttagagaataaatgggatttgcatgaactccactctgagctgaaatacagactgcggtgttaatatccttttcttctgattgttattaacaggtccttatgtcgtcagaagatcgagaagctcaggaggatgaattgctggccctggcaagtatttacgatggagatgaatttagaaaagcagagtctgtccaaggtggagaaaccaggatctatttggatttgccacagaatttcaagatatttgtgagcggcaattcaaatgagtgtctccagaatagtggctttgaatacaccatttgctttctgcctccacttgtgctgaactttgaactgccaccagattatccatcctcttccccaccttcattcacacttagtggcaaatggctgtcaccaactcagctatctgctctatgcaagcacttagacaacctatgggaagaacaccgtggcagcgtggtcctgtttgcctggatgcaatttcttaaggaagagaccctagcatacttgaatattgtctctccttttgagctcaagattggttctcagaaaaaagtgcagagaaggacagctcaagcttctcccaacacagagctagattttggaggagctgctggatctgatgtagaccaagaggaaattgtggatgagagagcagtgcaggatgtggaatcactgtcaaatctgatccaggaaatcttggactttgatcaagctcagcagataaaatgctttaatagtaaattgttcctgtgcagtatctgtttctgtgagaagctgggtagtgaatgcatgtacttcttggagtgcaggcatgtgtactgcaaagcctgtctgaaggactactttgaaatccagatcagagatggccaggttcaatgcctcaactgcccagaaccaaagtgcccttcggtggccactcctggtcaggtcaaagagttagtggaagcagagttatttgcccgttatgaccgccttctcctccagtcctccttggacctgatggcagatgtggtgtactgcccccggccgtgctgccagctgcctgtgatgcaggaacctggctgcaccatgggtatctgctccagctgcaattttgccttctgtactttgtgcaggttgacctaccatggggtctccccatgtaaggtgactgcagagaaattaatggacttacgaaatgaatacctgcaagcggatgaggctaataaaagacttttggatcaaaggtatggtaagagagtgattcagaaggcactggaagagatggaaagtaaggagtggctagagaagaactcaaagagctgcccatgttgtggaactcccatagagaaattagacggatgtaacaagatgacatgtactggctgtatgcaatatttctgttggatttgcatgggttctctctctagagcaaacccttacaaacatttcaatgaccctggttcaccatgttttaaccggctgttttatgctgtggatgttgacgacgatatttgggaagatgaggtagaagactagttaactactgctcaagatatggaagtggattgtttttccctaatcttccgtcaagtacacaaagtaactttgcgggatatttagggtactattcattcactcttcctgcgtagaagatatggaagaacgaggtttatattttcatgtggtactactgaagaaggtgcattgatacatttttaaatgtaagttgagaaaaatttataagccaaaggttcagaaaattaaactacagaatattaaatattataatgtgcccaaagctctgaatagttaaaaattaaatatttattttcttccccaagctttaggtaaggagaagaggggtcaagagttaaacttagagaccctttgtctctgagaagcatccttctaagacattctgttggagttccctcagtactattccttacaactggagtgggtagaagccttatgaaaattatactgacaacctgatctcgtttactccatgttaatcacattcctaccaacctaaatttctgccaagtcagttctctttggaggaagcccattactccataactgactggatggtccagtgtcattttgatctgcttttcagaatggaaatttataatataaatatatgttttaataccacaaacactgtggggcacttgatatttattagtggtgtatatggtccactggtttcaggccaaatctagaatttagtgatactggctcagaagaatttaagttctattcagctttcctgggtgttagaacctagattcaaaatggcttgtctttgctacttttgttccacattctctctctttacctttgccctaccttctgtttgtaaggatgattttaatattaattccaggaacacatgtttttatttcctctgctggaataggagaaagcttaatatattcccaagctgaatgttcttgaattatatctgcatttaccactgtatatgcatatagtgacagtataacctgtctatactacagtagttccagtcctaactttctgaattatttttaaagatcttctctaacaagctatgggaatttggcttcatactctttctttgcaacagcagtgttctgggtgataattttgaattgatacctgttcctttttctgggttttgttggctttttgaaaaattgtctttccttatcattggtgggaggcttggtagcaaagtaacattttttggaaaagaggacagaaaaattgaactacagcttgagaacgtattctttttttcctactttgttattgcaaattgaggaatcacttttaactgttttaggtgtgtgtgtccagagtgagcaaggattatgtttttggattgtcaaagaggatgcttagtcttaaaataaaaataaatttaaaaatcatcttataatt

SEQ ID NO: 601 - protein, 474 aa, Homo sapiens
MSSEDREAQEDELLALASIYDGDEFRKAESVQGGETRIYLDLPQNFKIFVSGNSNECLQNSGFEYTICFLPPLVLNFELPPDYPSSSPPSFTLSGKWLSPTQLSALCKHLDNLWEEHRGSVVLFAWMQFLKEETLAYLNIVSPFELKIGSQKKVQRRTAQASPNTELDFGGAAGSDVDQEEIVDERAVQDVESLSNLIQEILDFDQAQQIKCFNSKLFLCSICFCEKLGSECMYFLECRHVYCKACLKDYFEIQIRDGQVQCLNCPEPKCPSVATPGQVKELVEAELFARYDRLLLQSSLDLMADVVYCPRPCCQLPVMQEPGCTMGICSSCNFAFCTLCRLTYHGVSPCKVTAEKLMDLRNEYLQADEANKRLLDQRYGKRVIQKALEEMESKEWLEKNSKSCPCCGTPIEKLDGCNKMTCTGCMQYFCWICMGSLSRANPYKHFNDPGSPCFNRLFYAVDVDDDIWEDEVED

SEQ ID NO: 602 - DNA, 4913 bp, Homo sapiens
cctcccagcgtccccaccctaggaggctgcatgcggattgaagacgtgcgcctgggggctgggccggccccgctgatcccgacctagcgagcaggatagcaggaccgcccaggctgcggaggggctcgggggcaggaaggtcagagcagcaagatggccagtaagaccaaggccagcgaggccctcaaggtggtggcccggtgccgccccctcagcaggaaggaggaggctgctggtcacgagcagatcctgaccatggacgtgaaactgggccaggtgaccctgcggaacccccgcgccgccccgggggagctgcccaagaccttcacctttgacgccgtgtatgatgccagctccaagcaggccgacctgtatgacgaaaccgtgaggcccctgatagactccgtgctccagggtttcaatggcacggtgtttgcctatggccagacgggcactggcaagacctataccatgcaggggacctgggtggagcccgagctgcgcggggtcatcccgaatgcctttgagcacatcttcacccacatctcccgctcccagaaccaacagtacctggtccgggcctcctatttggagatctaccaggaagagattcgagacctgctctccaaggagccgggcaagaggctagagctgaaagagaaccccgagactggcgtctacatcaaggacctctcctccttcgtcaccaagaatgtcaaggagattgagcatgtgatgaacctggggaaccagacccgggctgtgggcagcacccacatgaatgaggtcagctcccgctcccatgccatcttcatcatcactgtggagtgcagcgaacgtggctctgatggccaggaccacatccgagtgggcaagctcaacctcgtggacctggctggcagcgagaggcagaacaaggcaggccccaacacagcgggaggggcagccacaccatcctcgggtggcggtggtggcggtggaggcagtggtggtggtgctggtggagagaggcctaaggaagcctccaaaatcaacctctcattatctgccctgggcaacgtgattgctgccctggcgggcaacaggagcacccacattccctaccgggactccaagctgacccggctgctccaggactccctgggggggaatgcgaagaccatcatggtagccacactggggccagcttctcacagctacgatgagagcctctccaccttgcgctttgccaaccgagccaagaacatcaagaacaagccccgggtgaacgaggaccccaaggacacactgctgcgggaattccaagaggagattgcccgcctgaaggcccagctggagaagagggggatgctggggaagcggccccggaggaagagcagccgcaggaagaaggccgtgtccgccccgcctgggtaccctgagggcccagtgattgaggcttgggtggcagaagaggaggatgacaacaacaacaaccaccgcccgccccagcccatcctggagtcagccttggagaagaacatggagaattacctgcaggaacagaaggagcggctggaggaggagaaggcagccatccaggatgaccgcagcctggtgagcgaggagaagcagaagctgctggaggagaaggagaagatgctggaggacctgcggcgggaacagcaggccacagagctgcttgcggccaagtacaaggccatggagagcaagctcctcatcgggggcaggaacatcatggatcacaccaacgaacagcagaagatgttggaactgaagaggcaggagattgccgagcagaaacgtcgtgagcgggagatgcagcaggagatgatgctccgggacgaggagactatggagctccggggcacctacacatccctgcagcaggaggtggaggtcaaaaccaagaaactcaagaagctctacgccaagctgcaggcggtgaaggcggagatccaggaccagcatgatgagtatatccgcgtgcggcaggacctggaggaggcgcagaacgagcagacccgcgaactcaagctcaagtacctaatcatcgagaacttcatcccgccggaggagaagaacaagatcatgaaccggcttttcctggactgtgaggaggagcagtggaagttccagccactggtgccagccggcgtcagtagcagccagatgaagaagcggccaacatctgcagtgggctacaagaggcctatcagccagtatgctcgggttgccatggcaatggggtcccaccccaggtacagggctgaaaacataatgtttctggagttggatgtgtcccctccagctgtctttgagatggaattctctcacgaccaagaacaagaccctcgtgcgctacacatggagaggctcatgcgattggacagctttctggaaagaccttccacgtctaaagtccgaaagtccagatcctggtgccagagtcctcagcggcctccaccttccaccacacatgcctccctggcctctgcttctctgcgccctgcaacagtggcggaccatgagtgacaaccatcacgtcaggctgcccatccaatagactcctgggatggggcagccaaccctggctcatctcatctgccgcttggtgcgtgtgcgtgtgcgtgcatgtgcgtgtgcgtgtgtgcaggggtgagaatctggcagatggtgcctctgcctgctcttcttcgcctcctttatttaattcatgttatttattcgcggacgtctgttcgtgttggggagatgccctcgcctgagccgtctgggcctaccgtggtcactgcgtacgctctttttcttctgacttgagagctcccccagtcagatctcaggcttgtccccctgtcagctgcctccagaagggaaggtagccagtgcctgagaagacagtcccttttctacccaccgcactccataacctccatcttctcccacactgatggcgagcagcccctgagcactttctgggactgggagactgcttggtgttccctgaggacaagagacatcctgacagtgttgggcatctgctccccgtggacacagccccactctccactttctgagcctcagacaacctcattcagcctcttgggctccttttcaaggacattaataacctcaccaacatagctcatgcccttcagctttgacaagaactcacggcttcccaaactctgctttctgcccaccttggatgggaactgtggaccaagcaattaccatcgccttggaacctgcaggaaatggaacagcaattgagacaacttgaacagtcatcaacggaagtccctccactggattcctttgtttctgtcccctccgaggagtcattttggtcgacaggctctcaaggcaactccccattttcaagaggctgctcctgcctgcttcgatcatttctccctgcagctgcctagaccccgttcacagtgggaggagtcaatgtcattctacccctcgctaaacgaagatattaacatctattgctttttcccttcatctgtcacaggaaacagaagcccaggcacaatcttttccagctttgcctgttacccctgtttctgaattgcatctttaaggtattattttgttgacaatagatcctttattcactagttacgcaaattggttcctagggggatactccttaccttcctttgtgatggcccaaaatgtctctaggtatctcaagtgataagtaaatttctacaaaaaaaaaatggttaatgttcattgactggctttttaagtgtatattttggaggacgggtgaagaggtcataacgaaagcaagcgagtgaattaggatttcaaagtgccctaatagtgtgagtctccagttcctagaatatgaagagtgctgtcgttggggtgaaaccatgagactgacagatctgcctgaaatggggggtgtgggaggtggtggcgggggttattctctttccttcaggaaatgaacccttcttacatcattcaagttctgctctgaggatcaagcttgggtctgatttaactcagcgacactgtcatttctgcttcattactggactagagggttgagccacccacttgccatttgctcctgtccttccaggaaatcacaattttcatcagagcccaagagattatttgagactcaggattcagatcagaggttcgactgtggctgggacaggagttgtgtgtagaaattcaccaggtggcctgagcgcagggggacctccaggctgcgttgagcagcctctcccactgacctctttctcgtttgtggacaaagcagcacgtatcacctcattcatcacttggacacatcgcctttgcattgtcttgtcacacctccctcacagtcttatagcacaatatacccaaatcagcccccccagtccgaggctgggcccaaggtatggtcggaggaggagctcctgcctgcggttttgtgtatgtgtgtatgtgtgtgcgtgtttgtgtgcgtgtttacctccacaggggacactctacactcagtgtaagatctgctgggaacagggccaccaggagtgcgtggatctcagtctctctgtctctctttctctccttttaattttggtgtatcaaatatttgattgacaaagtaagggccttgattaggaccaaattctcgtgtgttgctatggtctttatttaggacaacaattaacaatgcagtggcccattcttgtcactctacacatatgactatacgggacatatgtaatatataaatatatatataaaacattcccctctgtccccttggcttcggatggaggaatttctgttgagctgaaatgcacctgcagctgggtgctgccagcagcttgcaggccccagccctgttccaatcaatgcagttgacaataaaggaatgagtatcgtcacgg

SEQ ID NO: 603 - protein, 792 aa, Homo sapiens
MASKTKASEALKVVARCRPLSRKEEAAGHEQILTMDVKLGQVTLRNPRAAPGELPKTFTFDAVYDASSKQADLYDEREPLIDSVLQGFNGTVFAYGQTGTGKTYTMQGDLVEPELRGVIPNAFEHIFTHISRSQNQQYLVRASYLEIYQEEIRDLLSKEPGRRLELKENPETGVYIKDLSSFVTKNVKEIEHVMNLGNQTRAVGSTHMNEVSSRSHAIFIITVECSERGSDGQDHIRVGKLNLVDLAGSERQNKAGPNTAGGAATPSSGGGGGGGGSGGGAGGERPKEASKINLSLSALGNVIAALAGNRSTHIPYRDSKLTRLLQDSLGGNAKTIMVATLGPASHSYDESLSTLRFANRAKNIKNKPRVNEDPKDTLLREFQEEIARLKAQLEKRGMLGKRPRRKSSRRKKAVSAPPGYPEGPVIEAWVAEEEDDNNNNHRPPQPILESALEKNMENYLQEQKERLEEDKAAIQDDRSLVSEEKQKLLEEKEKMLEDLRREQQATELLAAKYKAMESKLLIGGRNIMDHTNEQQKMLELKRQEIAEQKRREREMQQEMMLRDEETMELRGTYTSLQQEVEVKTKKLKKLYAKLQAVKAEIQDQHDEYIRVRQDLEEAQNEQTRELKLGYLIIENFIPPEEKNKIMNRLFLDCEEEQWKFQPLVPAGVSSSQMKKRPTSAVGYKRPISQYARVAMAMGSHPRYRAENIMFLELDVSPPAVFEMEFSHDQEQDPRALHMERLMRLDSFLERPSTSKVRKSRSWCQSPQRPPPSTTHASLASASLRPATVADHE

SEQ ID NO: 604 - DNA, 4202 bp, Homo sapiens
taaagggaccgacagcccgccccgggaggaaggggcgccaggcccgaaagccgcctccccctcccagacccgagagctcgtgcggggcaaagtgaaccgagccgctgggcgtgcaaggggaagcccaagcccgttctcccggccaaagtgaactttaatcggggtggttggatgcggagacggggcggcaggacctgctagaagtggccgaagatgaatccccagcaacaacgcatggccgctatagggaccgacaaggagctgagcgacctactggacttcagtgcgatgttttccccacctgttaatagtgggaaaactagaccaactacactgggaagcagtcaattcagtggatcaggtattgatgaaagaggaggtacaacatcttggggaacaagtggtcaaccaagtccttcctatgattcatctagaggttttacagacagccctcattacagtgatcacttgaatgacagtcgattaggagcccatgaaggcttgtccccaacacctttcatgaactcaaatctgatgggaaaaacatcagagagaggctcattttccctgtacagcagagatactggattaccaggctgtcaatctagtctcctgagacaagatctggggcttgggagcccagcacagctatcttcttcaggaaaacctgggacagcatactattcattctctgctacaagttccaggaggagaccactccatgactctgcagcgcttgatcccttgcaagcaaaaaaagtcagaaaggtgcctcctggtttgccttcttctgtatatgcaccatccccaaattcagatgatttcaaccgtgaatctcctagttatccatctcctaagccaccaaccagtatgttcgctagcactttctttatgcaagatgggacccacaattcttctgacctttggagttcatcaaatgggatgagccagcctggttttggtggaattctggggacctccacttcccacatgtctcaatccagtagttatggcaaccttcattcacatgaccgcttgagttatcctccacactcagtttcaccaacagacataaacacgagtcttccaccaatgtccagctttcatcgcggcagtaccagcagttcaccttacgttgctgcctcacacactcctcccatcaatggatcagacagcattctaggaaccagagggaatgctgctggaagctcacagacaggtgatgcacttggaaaggctttggcatctatttattctcctgaccataccagcagtagttttccgtcaaatccatcaacaccagttggatcaccttcacctctcacaggtaccagtcagtggccaagacctggagggcaagcaccttcatccccaagctatgaaaactcactccactccctgcagtctcgaatggaggatcgtttagacagactggatgatgcaatccatgtgctgcggaaccatgctgtgggaccttccaccagtttgcctgctggtcacagtgatatacatagtttattgggaccatcccataatgcaccaattggaagcctcaattcaaactatggaggatcaagccttgttgcaagcagtcgatcagcttcaatggttggaactcatcgggaagactctgtcagtctcaatggcaatcattcagtcctgtctagtacagtcactacttcaagcacagacctgaaccataaaacacaagaaaattatagaggtggcttgcaaagtcagtctggaactgttgttacaacagaaatcaagactgaaaacaaagaaaaggatgaaaaccttcatgaacctccttcatcagatgacatgaagtcagatgatgaatcctcccaaaaagatatcaaggtttcatctagaggcagaacaagcagtactaatgaagatgaggatttgaaccctgaacagaagatagaaagggagaaggagaggcggatggctaacaatgccagagaacgcttacgcgtgcgggatattaatgaagcattcaaagagcttggccgaatgtgtcagcttcacttgaagagtgaaaaaccccaaacaaaactccttattcttcatcaagccgtggcagtcatccttagtctagaacagcaagtcagagagaggaaccttaaccccaaagcagcctgccttaagagaagggaagaagaaaaagtttctgccgtatcggcagagccgccaaccacactgccaggaacccatcctgggcttagtgaaactaccaaccctatgggtcatatgtaaacatcagccagttccagagttatcagtaggctagatagaaggtgacctctcctcataaggacttggacaactcagattatctgaagacacaaacctgacaggagggagaagaaaaaacaaaacacttgaaccaagaaactcaaatgtaatcctacgatcaaagcaactggtcaacacttccatcagaagtgaagataggaagctcatcagatagaacatcagcccatgagatgtttgcaacaaatcttttgttgcaagcagtgtgtcgcttctgcacaatcagagactgtctcgatctctccactcaccgtggaagttgccttgtgcctaaactgaattgacaaatgcattgtaactacaaattttatttattgttatgaaactgtaaggtctacatataaagggaaaaagttaatgtggaaagctgatctacactcagctgatgccagcatacattaaagcggttcacgtgcagagaacaaagcagtgacaaccattggcccttagcattcccggcatacctattagtgtcttaaaaaggaagggaaaagtcttttgttgccctctcctatcctcttgccatatgaatagcgttttccatgaaataggaaaatattacttggtatagcatttctcttgctctcattttttgatttatttttattttctctttgtgggtgttatatttgatctctaaatctgaacagtttatggtcacagtccagcctcctccgtgcagccctgtgtgctttgcacatttaccttacagtggtaagcagagaccatctgtgaccatagcctagctagcattttaaaaggggaaattttgttctctaggttttcccccaaataaacattgctttatttctaataataaccaagacttttcaagcttctagatctcataggaaagcttgtaatagcaaaattgtaaattacaagggaagaatctactttttagaaatcgctttgttttccaagcagtaagtactacatacagtacttgtaaagtgttagctgtaagtaagcacaaaatacatttaaaatacaaagacgattttttcaggctgtgattatggtgaacataacaaaacccagtagtcaccaaggcaggtagtgtgataaatgaacacaccactctgaggctaattacctaatggaatacaagagcaatggtcacccgtatttccttatcctagcctttatttctctgtcatttggatggctggtcaatggggaagaattgagtgggtgatttaatcaactgcaaaccatctgcccctgtcccaaaatgatgagccagattagcattaaaccagtacttgtcagtccatcttaatactgttcattaaggcactctctgtctctaatccttaggagttgttttaaaagacataatcactttgaacttccatgaaacctgtcttccaccacaacaaccctgggagagaaaaacatgctaaaggaggtatcttggcttaataattccttatagccaatatcaacagtggcaatcagcacacagaggaaaggacccaaatcactatgtagcttaaagatttctgttaatttgaaagaacaaaaacaagacagaacttctggtactctaatcaggatgattcctaacaagtcagtcatttgtgaacttagtggactttttggttactttaatttgcatatattctccagttacatcggactctatctgtggccttgttcttcatttcagtgttaatcagctaaacagaagttgttgcttatgatgtgtgagtgaacatatgccactgcctggcccttttttcttcagagcttgttgtctttttcgctatattagactttgcagtatgcccagaagctttccttcataaaatagaaagaaaaaaacatttggcttatttttcactgtagctagtcttttatacaataatcttgtaagaaaa

SEQ ID NO: 605 - protein, 682 aa, Homo sapiens
MNPQQQRMAAIGTDKELSDLLDFSAMFSPPVNSGKTRPTTLGSSQFSGSGIDERGGTTSWGTSGQPSPSYDSSRGFTDSPHYSDHLNDSRLGAHEGLSPTPFMNSNLMGKTSERGSFSLYSRDTGLPGCQSSLLRQDLGLGSPAQLSSSGKPGTAYYSFSATSSRRRPLHDSAALDPLQAKKVRKVPPGLPSSVYAPSPNSDDFNRESPSYPSPKPPTSMFASTFFMQDGTHNSSDLWSSSNGMSQPGFGGILGTSTSHMSQSSSYGNLHSHDRLSYPPHSVSPTDINTSLPPMSSFHRGSTSSSPYVAASHTPPINGSDSILGTRGNAAGSSQTGDALGKALASIYSPDHTSSSFPSNPSTPVGSPSPLTGTSQWPRPGGQAPSSPSYENSLHSLQSRMEDRLDRLDDAIHVLRNHAVGPSTSLPAGHSDIHSLLGPSHNAPIGSLNSNYGGSSLVASSRSASMVGTHREDSVSLNGNHSVLSSTVTTSSTDLNHKTQENYRGGLQSQSGTVVTTEIKTENKEKDENLHEPPSSDDMKSDDESSQKDIKVSSRGRTSSTNEDEDLNPEQKIEREKERRMANNARERLRVRDINEAFKELGRMCQLHLKSEKPQTKLLILHQAVAVILSLEQQVRERNLNPKAACLKRREEEKVSAVSAEPPTTLPGTHPGLSETTNPMGHM

SEQ ID NO: 606 - DNA, 992 bp, Homo sapiens
ttttgtgcgagagccgcagcgccgcctcttctctcgcgccctcgcctcttcctccgcctcctccttcgcctcttcctgcctcctcccggcttccgccgccgccactccagcctaatcccaaccccagggcgaaggttttcttatttatttccgttttctcgccactacagcctcctgacaaggtgatccgggcgggccccgcaggaattttatcccctcaccggcctcacactagtatcgcatgtccactatccagaacctccaatctttcgacccctttgctgatgcaactaagggtgacgacttactcccggcagggactgaggattacattcatataagaatccagcaacggaacggcagaaagacactgactactgttcagggcattgcagatgattatgacaaaaagaaacttgtgaaagctttcaaaaagaaatttgcctgtaatggtactgtgattgaacatcctgaatacggagaggttattcagcttcaaggtgaccaaagaaaaaacatctgccagtttctcttggaggttggcattgtaaaggaggaacagcttaaggttcatggattctaaaatgaacctaaatacgtggagaatttcttgaatagttttgttctctaaacccggtttggctgccttgtgaaatgattccctgcagtaaacggacttttcatttatttaatcattcaaacttccattcacatctgcatgattacagaaaacatggggtatgtagactagtaacacataagaaaattgcagtaagatggtaacaaaacctcatattgtctttacatgtttccaatggaaaatgttttgagtgtttattgttcagtttattacgtttcacttgattaaattttttttgttgttgtattaaaccatgtacgttgcagcttaacaataaaaaaaaaatctatgaatctttgtgagcaattatgctcccaaatctaagcaagtaataaagaagggggattcaaag

SEQ ID NO: 607 - protein, 113 aa, Homo sapiens
MSTIQNLQSFDPFADATKGDDLLPAGTEDYIHIRIQQRNGRKTLTTVQGIADDYDKKKLVKAFKKKFACNGTVIEHPEYGEVIQLQGDQRKNICQFLLEVGIVKEEQLKVHGF

SEQ ID NO: 608 - DNA, 2916 bp, Homo sapiens
  misc_feature (2534)..(2534): n is a, c, g, or t
  misc_feature (2536)..(2536): n is a, c, g, or t
ggggagctcggcgtcccgctccctccgcggctcatggcgacgactctcggcacatccgggaccctccggccgtggcggccgaggcgccggctgctcgggccccagccccggccgctgtggtgactccgccgcgcctcgccgtcgcccccgtgccgcccgccgcccccgccgcccccgccgccggggacatgtctaaccccggaggccggaggaacgggcccgtcaagctgcgcctgacagtactctgtgcaaaaaacctggtgaaaaaggattttttccgacttcctgatccatttgctaaggtggtggttgatggatctgggcaatgccattctacagatactgtgaagaatacgcttgatccaaagtggaatcagcattatgacctgtatattggaaagtctgattcagttacgatcagtgtatggaatcacaagaagatccataagaaacaaggtgctggatttctcggttgtgttcgtcttctttccaatgccatcaaccgcctcaaagacactggttatcagaggttggatttatgcaaactcgggccaaatgacaatgatacagttagaggacagatagtagtaagtcttcagtccagagaccgaataggcacaggaggacaagttgtggactgcagtcgtttatttgataacgatttaccagacggctgggaagaaaggagaaccgcctctggaagaatccagtatctaaaccatataacaagaactacgcaatgggagcgcccaacacgaccggcatccgaatattctagccctggcagacctcttagctgctttgttgatgagaacactccaattagtggaacaaatggtgcaacatgtggacagtcttcagatcccaggctggcagagaggagagtcaggtcacaacgacatagaaattacatgagcagaacacatttacatactcctccagacctaccagaaggctatgaacagaggacaacgcaacaaggccaggtgtatttcttacatacacagactggtgtgagcacatggcatgatccaagagtgcccagggatcttagcaacatcaattgtgaagagcttggtccattgcctcctggatgggagatccgtaatacggcaacaggcagagtttatttcgttgaccataacaacagaacaacacaatttacagatcctcggctgtctgctaacttgcatttagttttaaatcggcagaaccaattgaaagaccaacagcaacagcaagtggtatcgttatgtcctgatgacacagaatgcctgacagtcccaaggtacaagcgagacctggttcagaaactaaaaattttgcggcaagaactttcccaacaacagcctcaggcaggtcattgccgcattgaggtttccagggaagagatttttgaggaatcatatcgacaggtcatgaaaatgagaccaaaagatctctggaagcgattaatgataaaatttcgtggagaagaaggccttgactatggaggcgttgccagggaatggttgtatctcttgtcacatgaaatgttgaatccatactatggcctcttccagtattcaagagatgatatttatacattgcagatcaatcctgattctgcagttaatccggaacatttatcctatttccactttgttggacgaataatgggaatggctgtgtttcatggacattatattgatggtggtttcacattgcctttttataagcaattgcttgggaagtcaattaccttggatgacatggagttagtagatccggatcttcacaacagtttagtgtggatacttgagaatgatattacaggtgttttggaccataccttctgtgttgaacataatgcatatggtgaaattattcagcatgaacttaaaccaaatggcaaaagtatccctgttaatgaagaaaataaaaaagaatatgtcaggctctatgtgaactggagatttttacgaggcattgaggctcaattcttggctctgcagaaaggatttaatgaagtaattccacaacatctgctgaagacatttgatgagaaggagttagagctcattatttgtggacttggaaagatagatgttaatgactggaaggtaaacacccggttaaaacactgtacaccagacagcaacattgtcaaatggttctggaaagctgtggagttttttgatgaagagcgacgagcaagattgcttcagtttgtgacaggatcctctcgagtgcctctgcagggcttcaaagcattgcaaggtgctgcaggcccgagactctttaccatacaccagattgatgcctgcactaacaacctgccgaaagcccacacttgcttcaatcgaatagacattccaccctatgaaagctatgaaaagctatatgaaaagctgctaacagccattgaagaaacatgtggatttgctgtggaatgacaagcttcaaggatttacccaggactctatttatacaaccctgactgacagcctcctttcagcagagtttcaaagaatatgctgaaatacaggaaaacncncccccccccccccttttttttttttttttacattttaggacactgtgaggggaaaggacaattttgaaattccttttcaaggaaaaaaaggtctttatgctttgccatgaggccacattcagctgctatttaaacttaatatcttgaacctaaagaatgctgacttttcctacatttccagagttaggcagtattctacacttaaagactactactatttttataaaaggtaatctattcaaatttcttcacagatttcaagtctctcaaacatcaagacaacttcagcagtcggtacaagtcacatttcattttgattgaatacatgatcttgaacagctcctgtacttgctctttgtaaaaaaaaataaaattatttt

SEQ ID NO: 609 - protein, 748 aa, Homo sapiens
MSNPGGRRNGPVKLRLTVLCAKNLVKKDFFRLPDPFAKVVVDGSGQCHSTDTVKNTLDPKWNQHYDLYIGKSDSVTISVWNHKKIHKKQGAGFLGCVRLLSNAINRLKDTGYQRLDLCKLGPNDNDTVRGQIVVSLQSRDRIGTGGQVVDCSRLFDNDLPDGWEERRTASGRIQYLNHITRTTQWERPTRPASEYSSPGRPLSCFVDENTPISGTNGATCGQSSDPRLAERRVRSQRHRNYMSRTHLHTPPDLPEGYEQRTTQQGQVYFLHTQTGVSTWHDPRVPRDLSNINCEELGPLPPGWEIRNTATGRVYFVDHNNRTTQFTDPRLSANLHLVLNRQNQLKDQQQQQVVSLCPDDTECLTVPRYKRDLVQKLKILRQELSQQQPQAGHCRIEVSREEIFEESYRQVMKMRPKDLWKRLMIKFRGEEGLDYGGVAREWLYLLSHEMLNPYYGLFQYSRDDIYTLQINPDSAVNPEHLSYFHFVGRIMGMAVFHGHYIDGGFTLPFYKQLLGKSITLDDMELVDPDLHNSLVWILENDITGVLDHTFCVEHNAYGEIIQHELKPNGKSIPVNEENKKEYVRLYVNWRFLRGIEAQFLALQKGFNEVIPQHLLKTFDEKELELIICGLGKIDVNDWKVNTRLKHCTPDSNIVKWFWKAVEFFDEERRARLLQFVTGSSRVPLQGFKALQGAAGPRLFTIHQIDACTNNLPKAHTCFNRIDIPPYESYEKLYEKLLTAIEETCGFAVE

SEQ ID NO: 610 - DNA, 6210 bp, Homo sapiens
agaactcaagagcagaatctccgtgttgcaatctggttcctaaggaggaagaggaaggcagccctggagtggtttctttacagtaatttcaacagaagagtgagagatggaacccgaagaagaaaggattcgttacagccagagattgcgtggtaccatgcgacgacgctatgaagatgatggcatttcagatgatgaaattgaaggaaaaagaacttttgacttggaagagaaactgcacaccaacaaatataatgccaattttgttacttttatggaaggaaaagattttaatgtagagtatattcagcggggtggcttgagagatcctctgattttcaagaattctgatggactcggaataaaaatgccggatccagacttcactgtgaatgatgtcaaaatgtgtgtggggagtcgtcgcatggtggatgtcatggacgtgaacacacagaaaggcattgaaatgaccatggctcagtggacacgctactatgagaccccagaggaggagcgagagaaactctataatgtcatcagcctcgagtttagccacaccaggctggagaatatggtgcagaggccctccacggtggatttcattgactgggtagacaacatgtggccaaggcacttgaaggaaagccagactgaatcaacaaatgccatcttggagatgcagtaccctaaagtgcagaagtactgtctaatgagtgttcgaggctgctatactgacttccatgtggactttggtggtacctctgtttggtatcacatccatcaagggggaaaggtcttctggctcatcccccctacagcccacaacctggagctgtacgagaattggctgctgtcagggaaacagggagacatctttctgggtgaccgggtatcagattgtcagcgcattgagctcaagcagggctataccttcgtcattccctcaggctggattcatgctgtgtatactcctacagacacattagtgtttgggggcaattttttgcatagcttcaacatccctatgcagttaaaaatatacaacattgaagatcggacacgggttccaaataagtttcgctatccattctactatgagatgtgttggtatgtgttggagcgctatgtgtactgcataaccaaccgttcccacctaactaaggaatttcagaaagagtccctcagcatggatttggagttaaatgggttggagtctgggaatggggatgaggaagcagtggatcgagaaccccgacgcttgagcagcaggcgttctgtcctcactagccctgtagcgaatggagtcaacctggattatgatggactgggcaaaacctgccgaagtcttccaagtctgaagaaaactttggctggggactcatcttctgactgtagccggggctcccacaatggacaagtgtgggatccccagtgtgctccccgaaaggacaggcaagtgcatctgacccattttgagcttgaaggccttcgctgccttgtagataagttggagtctctgccactgcacaagaaatgtgtccccacagggatagaagatgaagatgctctcattgctgatgtaaagattttgctggaggagcttgccaacagcgatcccaagttagccctcactggagttcctatagtacagtggccaaaaagggataagcttaaattccccactcggccaaaggtgcgggttcctaccatccccattacgaagcctcacactatgaaaccagctccacggttaacacctgtgaggccagctgctgcctccccgattgtgtcaggagccagacggagacgagtgcgatgtcgaaaatgcaaagcctgtgtgcaaggagagtgtggtgtttgccactactgcagagacatgaagaagtttggggggcctggacgcatgaagcagtcctgtgtcctccgacagtgcttggcacccagactgcctcactcagtcacatgttccctctgtggagaggtggatcagaatgaagagacacaagactttgagaagaaactcatggaatgctgtatctgcaatgagattgttcatcctggctgcctccagatggacggagaggggttgcttaacgaagaattgccaaattgctgggaatgtccaaagtgctaccaggaggacagctcggagaaagcccagaagcggaaaatggaagagagtgacgaagaagctgtgcaagccaaagtcctgcggcccctgcggagctgcgatgagcctctcacgcccccgcctcattcacccacttccatgctgcagctcatccatgacccggtttccccccggggtatggtgactcggtcatcccctggggctggccccagcgaccaccacagtgccagccgcgatgagcgcttcaaacggcggcagttgctgcggctgcaggccacagagcgcaccatggtacgggaaaaggagaacaatcccagcggcaaaaaggagctgtctgaagttgagaaagccaagatccggggatcgtacctcactgtcacgctacagaggcccaccaaagagctccacgggacatccattgtgcccaagctgcaggccatcacggcctcctctgccaaccttcgccattccccccgtgtgctagtgcagcactgcccagcccgaaccccccagcgtggggatgaggaggggctggggggagaggaggaggaagaggaggaggaggaggaggaagatgacagtgcagaggaggggggtgcagccaggctgaatggccggggcagttgggctcaggatggagacgaaagctggatgcagcgggaggtctggatgtctgtcttccgctacctcagccgcagagaactttgtgaatgtatgcgagtgtgcaagacgtggtataaatggtgctgcgacaagagactttggacaaaaattgacttgagtaggtgtaaggccattgtgccccaggccctcagtggcatcatcaagaggcagccagtcagccttgacctcagttggaccaacatctctaaaaagcaactgacatggctcgtcaataggctgccaggactgaaagacctcctcctagcaggctgctcctggtctgcagtctctgccctcagcacctccagctgcccccttctcaggacccttgatcttcggtgggcagtaggaatcaaggaccctcaaattcgggacttgcttactccaccggctgataaaccaggtcaggacaatcgcagcaagctccggaacatgaccgacttccggctggcaggccttgacatcacagatgccacgcttcgcctcataattcgccacatgcccctcctgtctcgactcgacctcagtcactgcagccaccttacagatcagtcctccaatctactcactgctgtcgggtcttccactcgctactctctcacagagctcaatatggcaggttgcaataaattgacagaccagaccctgatctacctacggcgcattgccaacgtcaccttgatcgaccttcgaggatgcaagcagatcactcgaaaagcctgcgagcacttcatctcagacttgtccatcaacagcctctactgcctgtctgacgagaagctgatacagaagatcagctaagacacacccagcccagattcaacaggaaaccgatcttcccctgactccccaccgaggagagcctctcctcgaccctgcacgggctctgaggccagcgtcacactccctctctgctctcctgtcccttgagcccttcctctacaggtggggcagagagggtggtggacaccaggcttatctgcctgctcctctccctcctaaggaaaagggagtagcagattgatctgaggggaaagcacaggctgtgctgtcgaggcgcctgctcgcttactcgcctgccaggaggccgggctctcagtttggggtgtttgtgcaaccttcatctgcactgggccctgtgcccctcctccccatccatggtccccagcagtgcctggttctgagcaaactcccagggaagaaaacggccctgtctccatggccaggttcttgtggtgtccagtgcgcgtctctcctccatcacactctcccggcttgcgcaggaggggccagcagccccaggagtcccagacccgtgccgatcacactggtgctgttgagatctcccaaacctcacgtccttaactgtgctctccctcctttcctctcccttgagcttggttctgcccagcactcgtgcttgttcacataattaggtttcccaccccagcctacccgacttacttgctagtctctatgaggtccttattgcacttattggggttgaagctcttcagaggagctggaactgtctaccccagggacacacccatttcgttgctacccaagtggattctgagacaggcaccatctccttgttccccctctctcttttgcctcccactgactgcccttttccatgtgtcttcattctgcctgaagaaggctttcccaggatgcacgtcctcagagggagcagcctatctcccccaagctggaggcggcagaggactgggccaagccccaacctgcctcccagccaggctcctccaggcctctggtttagcggagccccctgagcccaggcctgtgtctagccccagtggctcactgaactttcagggcagtcagggggtcctgcttagaagccagtcaccagccctctgcctgcagccatggaagggggtgtgcacgtgcctctgtgtgtgtggctgagtgtattctgcgcgtgtgtgtggagggagggagggaggggagcatggtgtctcccgctccaccgccctttgttgagccccatcagctgcccccttttactttgcattgaacggcctgtccaaagatcctctctctagggcagcagagagctttttgcactttaaaaaaaaaaagaaagaaagaaaggtcggaatttcttttgggtcaatatttttaagtgtgtgaggagatgctcagtagcagcagcctatggcaagagcttataaatgattgatgcaaatttgcactctgctccccctctgtaaggatactgatagcacaacctcttccccccaccccgccccgccttttggtcgtccatccctgtccctttctggccctcttcctgtagcccagtctcaggctttcctcttcctgaagccctacagagttagggaatggagcccaggcaccaggggtctaaagtgtgagccactgagaagagagacgccaactgcacccttgccacttccaaagcaatagaggcagagtggtcccctctttgccacctaggccagttttgaccctggcattaactggccttagaagaaactggatcctggtagggggtggcattttgtttgtttcttccaatctgctgaatcttttgactgcaccttacaaacagcagtctgctcccatgaccctctgcccacttccattggtctccaggccccaataatctggggttgaaactttgaggaaatgccagtgacttattccagagtgcctcagttaggggaacttctctgtaaagaaccctgggtattgagcaaaaaccttattatcgttaatgacctataattggaagcttcctgcctttttctttggttgctcctgtggaaaatactgaaaagattactttgttttattttgttgtctttttataaaaggggaggtggagagaccccttcagagcagggattgtgccgggagagtgcctctgactttgggacatttcatccacagaaatttccaagccaatggtttcttttgggttttggtttttatgtttgttttttggggtttggaaaaacatgcatttttaccgtgcacgtaaattggtcagcagaaaagggagcccagaaaaggcagcagatggaccatgcccttgctgggttttccttttctttgggactgtgaggggaaatggtttttagaggtgagggttggtccatgtggaggaaagaagtgtctctgttgggggacagaggaacctggggagtccatcgcatgtcctacaatctgctcttagacacggccttgccaggagagcctgccctcagactgcaggaccagaacccctgcctccatctttccaagcaccggggcgaaaaaccacaaaggaaaggaagaaaatttatatatatataatataaaatcacttggtgattaaaaaaataactgctccataaataaaactcctaaagtcacttatgttt

SEQ ID NO: 611 - protein, 1162 aa, Homo sapiens
MEPEEERIRYSQRLRGTMRRRYEDDGISDDEIEGKRTFDLEEKLHTNKYNANFVTFMEGKDFNVEYIQRGGLRDPLIFKNSDGLGIKMPDPDFTVNDVKMCVGSRRMVDVMDVNTQKGIEMTMAQWTRYYETPEEEREKLYNVISLEFSHTRLENMVQRPSTVDFIDWVDNMWPRHLKESQTESTNAILEMQYPKVQKYCLMSVRGCYTDFHVDFGGTSVWYHIHQGGKVFWLIPPTAHNLELYENWLLSGKQGDIFLGDRVSDCQRIELKQGYTFVIPSGWIHAVYTPTDTLVFGGNFLHSFNIPMQLKIYNIEDRTRVPNKFRYPFYYEMCWYVLERYVYCITNRSHLTKEFQKESLSMDLELNGLESGNGDEEAVDREPRRLSSRRSVLTSPVANGVNLDYDGLGKTCRSLPSLKKTLAGDSSSDCSRGSHNGQVWDPQCAPRKDRQVHLTHFELEGLRCLVDKLESLPLHKKCVPTGIEDEDALIADVKILLEELANSDPKLALTGVPIVQWPKRDKLKFPTRPKVRVPTIPITKPHTMKPAPRLTPVRPAAASPIVSGARRRRVRCRKCKACVQGECGVCHYCRDMKKFGGPGRMKQSCVLRQCLAPRLPHSVTCSLCGEVDQNEETQDFEKKLMECCICNEIVHPGCLQMDGEGLLNEELPNCWECPKCYQEDSSEKAQKRKMEESDEEAVQAKVLRPLRSCDEPLTPPPHSPTSMLQLIHDPVSPRGMVTRSSPGAGPSDHHSASRDERFKRRQLLRLQATERTMVREKENNPSGKKELSEVEKAKIRGSYLTVTLQRPTKELHGTSIVPKLQAITASSANLRHSPRVLVQHCPARTPQRGDEEGLGGEEEEEEEEEEEDDSAEEGGAARLNGRGSWAQDGDESWMQREVWMSVFRYLSRRELCECMRVCKTWYKWCCDKRLWTKIDLSRCKAIVPQALSGIIKRQPVSLDLSWTNISKKQLTWLVNRLPGLKDLLLAGCSWSAVSALSTSSCPLLRTLDLRWAVGIKDPQIRDLLTPPADKPGQDNRSKLRNMTDFRLAGLDITDATLRLIIRHMPLLSRLDLSHCSHLTDQSSNLLTAVGSSTRYSLTELNMAGCNKLTDQTLIYLRRIANVTLIDLRGCKQITRKACEHFISDLSINSLYCLSDEKLIQKIS

SEQ ID NO: 612 - DNA, 4696 bp, Homo sapiens
tttctcgagaacctactgtgtgcatatcccgggcttagtgaagtcctaggcgggctctggcaccaccaggtgcccaagacacagctccttcccgcacctaacagggacttcccatctctctctgtgcccttagcctgctgtgcccacccaccccactgaccccgcgagcgtgctcgggcttgggagggcacgtctgtgggggtgagagacggagccacagcatttggtgactagggggaagccaggttggaagtactccatgacacacactcggagaaagtcccttcccatgctgagttcgggcctcactggccgccgagagcccctgcagatggaagacagcaacatggagcagggggttgagggtgtggagccaggcatgcccgagagcccaggtcacctcacagggcgccgcaagaattacccacttcgtaagcgcccattggttcctgagaagcccaaggcctgcaaagtgctgctgactcgcctggagaatgtggccggtccccggagtgcagatgaggctgatgagctaccgcctgacctgcccaagccccccagcccggccccatccagtgaagaccctggccttgcccagccccgcaagcggcgcctggcctccctcaatgctgaagctctcaataacctgctgctggagcgagaggacaccagcagcctggcaggcacccgccgcagtcgagcaggggatccccaccgcagccgtgaccgtgatcgtgctactgggggctggtcctcctccaagaagcggccccggctgggggaccttggaggaggaagtcgggacctgtctccagagccagcacccgatgaaggtccccgccgagatggagacccagctcccaagagactggctagcctgaacgcagctgctttcctaaaactgagccaggagcgggagctacccctgcggctgcctcgtgcccatgcagaagtagatgggcgctccactgagcccccagcacccaaggccccgaggccaaagtggcccaaggtcaatggcaagaactatcccaaggcttggcagggggccagctctggggaggctgcaggcccacctggctggcaaggctgccctgatgaaccatggccatctgcaactccttgtgggccatccgtccagccatctcataagcccctgagcaaggctctggagagccctttggggctgcgccctcacctgcccctgctgatgggtggacaggcggctctgaagccggagcctgggcgcccaggcgaggagtcacctgcccctaagcaggaactgcatcagccctctttccccacacctcagctgtcgccgctgccgatgcctggcaaccccgccgactacaatggcctgtgtgttgggcctgagctcactgcactaggcagcttctacctgtactgtggccaagaggggctgcagtgtgggggctactcgccctgccccatgcttcctgagggcaagctgtccccagtggctgcacctcacgaggaggggctcctcttagctccgagctcagtgccctcaggcacccctttccagcaccctccctggggctcctctcgctactgctctagcgaggacactggagtgaatggctacagcatctgcggagtgttgcccctgtctgttacccacgctggcactacctgtggcggctgcccatacaaaatgccttttgcagcaggctgcagatccctgggccagttggaatttcctctcccggaagctggccacccagcctcacccgcccacccactcctggggtgccctgtacccagtgtgccacctgcagcagagcccgtcccccatcttcagacacccacctcggagccccagacagtagcccgtgcgtgccctcagagcgccaaacctcccagcggttctaagtcaggtctgcgcacaggctccagctgcaggcacactgcaaggagcaaggctgcccgcaggcctagccaccccaagcagccacgtgtccagcgcccacgccctcgccgccgccgtcgccgccgcactaatggctgggtacctgttggggctgcgtgtgagaaggctgtgtatgtcttggatgagccggagccagccatccgaaagagctaccaggcggtagagcggcatggggagacaatccgagtccgggacaccgtccttctcaaatcaggcccacgaaagacctccacaccttatgtggccaagatctctgccctctgggagaaccccgagtcaggagagctgatgatgagcctcctgtggtattacagacctgagcacttacagggaggccgcagtcccagcatgcacgagcccttgcagaatgaagtgtttgcatcgcgacatcaggaccagaacagtgtggcctgcattgaggagaagtgctatgtgctgacttttgccgagtactgcaggttctgtgccatggccaagcgccgaggtgaaggcctccccagccgaaagacagcactggttcccccctctgcagactattccaccccaccccaccgcacagtgccagaggacacggaccctgagctggtgttcctttgccgccatgtctatgacttccgccacgggcgcatccttaagaacccccagtagcctcctcatgcccatgctggggctacccatgggcaagtggggctcggggtagggggcactgcttgaagcacagcacttggttagggggccacagaggcctaagtttgctggcctgtggttttcttgggggggagggcaggggcccctgtgggttctgggctccaggggagggagctggggaggccagggtataagaaaagcatcagaactctcagcttggcccaaggtaccttctgtggttcccctgggtggagatttccgaaaagtagtcttctctgaggctgggccaagcctgagggaaatggggccctaggagggtgggggcgggaaggaggggcaaggtctttcaggaaccagacccaacaggcccttctgtagcctcccccttgccctcaaagggggagtgggggccagctttacctcacccactgtgacccgccgcttccccttcagcctgggaccaggctttcctagatcccagcacagctctgagcttgttcctttgaggcatagagagccagagtctggcttccagagcattgacttcctcttcctagacttgaggccttttctctggctttcctcctttgccctgcagtagcaactggtgctgggacaagttgacccacctctcacagtcatgggtgtggcccacttgtgggagtctcctgtccacctcccagagacggccacccagcgggtctggcttcccagaaagttaactgatgattgtggggtttgtcatatctgggagggaagatgggtgctgggagagggttgggggcagggggcaaggaaaattgctacctgatttgttgaagatttttcctcttgccttacacatggaggttccaggaaacctcttgcagaacttcacacgtgattcttcaagccacacccacctgaaatcaaaccaaaggagtgctgtggctccccttgccctgccaccctttccctagtcttttgtagattgcactaatttacatcctagcaagaatcaacactgtatcagtccacggacctgctgagctgcagccacttgctctaggagctaaggacttgcattttcagtttgttcctgttgcccagaggccctgttctcacctcatgctgctccccagagtagactaacaggctcagtcccctgttgtccttgtggagactaggccttggccctggccctgagactctgtgagggggctggagcagcctggttatttcctatctgtaccaaagaggagtatggtgggagagggagtggagtgcagtgtggcttgggcctggtgctgggaacctgctagctgagcacttccacaagggcatacccctgggggcaggggctggggctgagaactgcagccctgggtcttcccttagggaggaagggcagatgaacccagcaggcttaggaggtggcactgggtgaggacagctgggcaggggctgcagagggaggtggaaatgaaccctgagggctcccccaacttgccatgccctgtcccttagtagatgagttgctcctgattggtcattgggtttgggtgaggcctggaggcttcagaggtgaatttatgcttgggaagcctgatcccaaacctgaagggaagggacttggatctccttatattgaataagctgtttggaggaaggtgtctgtctgggaggatggggcagtaaatgaggttggcagagtggcagtgggggctctgcagagccagccttggagcctgctcattctgggcccttgctgccaaggagcccagcctcacctagcaggaaaggagatgaaggccctcctcccaggaggtagggtcttggctgccccgaacttaaatgcttttgaaatctcttagatgtggaaatattttttcgaacctgaaaatgcagctggtagaatttcaatggaagcataatccatgtaaaatatattttagttgatattttgtaaaatgcactttttgtgtgttgatcctggtttcccagatctgtatttcagtgtttacaagggaggaaggacctttcctcacctcccttttgacagagattagaagtacttctttaagaaaaaaataaatttgagaaattgtattgatttag

SEQ ID NO: 613 - protein, 779 aa, Homo sapiens
MTHTRRKSLPMLSSGLTGRREPLQMEDSNMEQGVEGVEPGMPESPGHLTGRRKNYPLRKRPLVPEKPKACKVLLTRLENVAGPRSADEADELPPDLPKPPSPAPSSEDPGLAQPRKRRLASLNAEALNNLLLEREDTSSLAGTRRSRAGDPHRSRDRDRATGGWSSSKKRPRLGDLGGGSRDLSPEPAPDEGPRRDGDPAPKRLASLNAAAFLKLSQERELPLRLPRAHAEVDGRSTEPPAPKAPRPKWPKVNGKNYPKAWQGASSGEAAGPPGWQGCPDEPWPSATPCGPSVQPSHKPLSKALESPLGLRPHLPLLMGGQAALKPEPGRPGEESPAPKQELHQPSFPTPQLSPLPMPGNPADYNGLCVGPELTALGSFYLYCGQEGLQCGGYSPCPMLPEGKLSPVAAPHEEGLLLAPSSVPSGTPFQHPPWGSSRYCSSEDTGVNGYSICGVLPLSVTHAGTTCGGCPYKMPFAAGCRSLGQLEFPLPEAGHPASPAHPLLGCPVPSVPPAAEPVPHLQTPTSEPQTVARACPQSAKPPSGSKSGLRTGSSCRHTARSKAARRPSHPKQPRVQRPRPRRRRRRRTNGWVPVGAACEKAVYVLDEPEPAIRKSYQAVERHGETIRVRDTVLLKSGPRKTSTPYVAKISALWENPESGELMMSLLWYYRPEHLQGGRSPSMHEPLQNEVFASRHQDQNSVACIEEKCYVLTFAEYCRFCAMAKRRGEGLPSRKTALVPPSADYSTPPHRTVPEDTDPELVFLCRHVYDFRHGRILKNPQ

SEQ ID NO: 614 - DNA, 3111 bp, Homo sapiens
gcgagttgtgtgagccgccagtatggccgggctatggcggcgagcactggctacgtgcgactgtggggagcggcgcggtgctgggtgctgcggcggccgatgctggccgccgccggggggcgggttcccactgcagcaggagcgtggttgctccgaggccagcggacctgcgacgcctctcctccttgggcactgtggggccgaggcccggcaattgggggccaatggcgggggttttgggaagcgagcagccgcggcggaggcgcattctcggggggcgaggacgcctccgagggcggcgcggaggaaggagccggcggcgcggggggcagcgcgggcgccggggaaggcccggtcataacggcgctcacgcccatgacgatccccgatgtgtttccgcacctgccgctcatcgccatcacccgcaacccggtgttcccgcgctttatcaagattatcgaggttaaaaataagaagttggttgagctgctgagaaggaaagttcgtctcgcccagccttatgtcggcgtctttctaaagagagatgacagcaatgagtcggatgtggtcgagagcctggatgaaatctaccacacggggacgtttgcccagatccatgagatgcaggaccttggggacaagctgcgcatgatcgtcatgggacacagaagagtccatatcagcagacagctggaggtggagcccgaggagccggaggcggagaacaagcacaagccccgcaggaagtcaaagcggggcaagaaggaggcggaggacgagctgagcgccaggcacccggcggagctggcgatggagcccacccctgagctcccggctgaggtgctcatggtggaggtagagaacgttgtccacgaggacttccaggtcacggaggaggtgaaagccctgactgcagagatcgtgaagaccatccgggacatcattgccttgaaccctctctacagggagtcagtgctgcagatgatgcaggctggccagcgggtggtggacaaccccatctacctgagcgacatgggcgccgcgctcaccggggccgagtcccatgagctgcaggacgtcctggaagagaccaatattcctaagcggctgtacaaggccctctccctgctgaagaaggaatttgaactgagcaagctgcagcagcgcctggggcgggaggtggaggagaagatcaagcagacccaccgtaagtacctgctgcaggagcagctaaagatcatcaagaaggagctgggcctggagaaggacgacaaggatgccatcgaggagaagttccgggagcgcctgaaggagctcgtggtccccaagcacgtcatggatgttgtggacgaggagctgagcaagctgggcctgctggacaaccactcctcggagttcaatgtcacccgcaactacctagactggctcacgtccatcccttggggcaagtacagcaacgagaacctggacctggcgcgggcacaggcagtgctggaggaagaccactacggcatggaggacgtcaagaaacgcatcctggagttcattgccgttagccagctccgcggctccacccagggcaagatcctctgcttctatggcccccctggcgtgggtaagaccagcattgctcgctccatcgcccgcgccctgaaccgagagtacttccgcttcagcgtcgggggcatgactgacgtggctgagatcaagggccacaggcggacctacgtgggcgccatgcccgggaagatcatccagtgtttgaagaagaccaagacggagaaccccctgatcctcatcgacgaggtggacaagatcggccgaggctaccagggggacccgtcgtcggcactgctggagctgctggacccagagcagaatgccaacttcctggaccactacctggacgtgcccgtggacttgtccaaggtgctgttcatctgcacggccaacgtcacggacaccatccccgagccgctgcgagaccgtatggagatgatcaacgtgtcgggctacgtggcccaggagaagctggccattgcggagcgctacctggtgccccaggctcgcgccctgtgtggcttggatgagagcaaggccaagctgtcatcggacgtgctgacgctgctcatcaagcagtactgccgcgagagcggtgtccgcaacctgcagaagcaagtggagaaggtgttacggaaatcggcctacaagattgtcagcggcgaggccgagtccgtggaggtgacgcccgagaacctgcaggacttcgtggggaagcccgtgttcaccgtggagcgcatgtatgacgtgacaccgcccggcgtggtcatggggctggcctggaccgcaatgggaggctccacgctgtttgtggagacatccctgagacggccacaggacaaggatgccaagggtgacaaggatggcagcctggaggtgacaggccagctgggggaggtgatgaaggagagcgcccgcatagcctacaccttcgccagagccttcctcatgcagcacgcccccgccaatgactacctggtgacctcacacatccacctgcatgtgcccgagggcgccacccccaaggacggcccaagcgcaggctgcaccatcgtcacggccctgctgtccctggccatgggcaggcctgtccggcagaatctggccatgactggcgaagtctccctcacgggcaagatcctgcctgttggtggcatcaaggagaagaccattgcggccaagcgcgcaggggtgacgtgcatcgtcctgccagccgagaacaagaaggacttctacgacctggcagccttcatcaccgagggcctggaggtgcacttcgtggaacactaccgggagatcttcgacatcgccttcccggacgagcaggcagaggcgctggccgtggaacggtgacggccaccccgggactgcaggcggcggatgtcaggccctgtctgggccagaactgagcgctgtggggagcgcgcccggacctggcagtggagccaccgagcgagcagctcggtccagtgacccagatcccagggacctcagtcggcttaatcagagtgtggcatagaagctatttaatgattaaagtcatttgcagta

SEQ ID NO: 615 - protein, 959 aa, Homo sapiens
MAASTGYVRLWGAARCWVLRRPMLAAAGGRVPTAAGAWLLRGQRTCDASPPWALWGRGPAIGGQWRGFWEASSRGGGAFSGGEDASEGGAEEGAGGAGGSAGAGEGPVITALTPMTIPDVFPHLPLIAITRNPVFPRFIKIIEVKNKKLVELLRRKVRLAQPYVGVFLKRDDSNESDVVESLDEIYHTGTFAQIHEMQDLGDKLRMIVMGHRRVHISRQLEVEPEEPEAENKHKPRRKSKRGKKEAEDELSARHPAELAMEPTPELPAEVLMVEVENVVHEDFQVTEEVKALTAEIVKTIRDIIALNPLYRESVLQMMQAGQRVVDNPIYLSDMGAALTGAESHELQDVLEETNIPKRLYKALSLLKKEFELSKLQQRLGREVEEKIKQTHRKYLLQEQLKIIKKELGLEKDDKDAIEEKFRERLKELVVPKHVMDVVDEELSKLGLLDNHSSEFNVTRNYLDWLTSIPWGKYSNENLDLARAQAVLEEDHYGMEDVKKRILEFIAVSQLRGSTQGKILCFYGPPGVGKTSIARSIARALNREYFRFSVGGMTDVAEIKGHRRTYVGAMPGKIIQCLKKTKTENPLILIDEVDKIGRGYQGDPSSALLELLDPEQNANFLDHYLDVPVDLSKVLFICTANVTDTIPEPLRDRMEMINVSGYVAQEKLAIAERYLVPQARALCGLDESKAKLSSDVLTLLIKQYCRESGVRNLQKQVEKVLRKSAYKIVSGEAESVEVTPENLQDFVGKPVFTVERMYDVTPPGVVMGLAWTAMGGSTLFVETSLRRPQDKDAKGDKDGSLEVTGQLGEVMKESARIAYTFARAFLMQHAPANDYLVTSHIHLHVPEGATPKDGPSAGCTIVTALLSLAMGRPVRQNLAMTGEVSLTGKILPVGGIKEKTIAAKRAGVTCIVLPAENKKDFYDLAAFITEGLEVHFVEHYREIFDIAFPDEQAEALAVER

SEQ ID NO: 616 - DNA, 7006 bp, Homo sapiens
gtttgtcgcagcaagaacaaacagcattccttccagcaaatcaagtgcctgttttacaacagaacacttcagttgctgcaaaacaaccccagacttctgtggtacagaatcaacaacagatatcacaacagggacctatatatgatgaagtggaattggatgcattggctgaaattgagcgaatagagagagaatcagctattgaaagggagcgcttctcaaaagaagttcaagataaagataagcctttgaaaaaaagaaaacaagattcttacccacaggaggctgggggtgctacaggaggtaatagaccagcttctcaggagacgggttctacgggaaatgggtcaaggccagcattaatggttagcattgatcttcatcaggcaggaagagtggactctcaggcttctataactcaggattcagactccataaaaaagcctgaagaaatcaaacaatgtaatgatgcacctgtttctgttcttcaggaagatattgttggaagtcttaaatctacaccagaaaaccatcctgagacacctaaaaaaaagtctgatcctgagctttcaaagagtgaaatgaaacaaagtgaaagtagattagcagaatctaaaccaaatgaaaaccgattggtggagacaaaatcaagtgaaaataagttagaaactaaagttgagacccaaacagaagaacttaaacagaatgagagcagaacaactgaatgcaaacaaaacgagagcaccatagttgagcctaaacaaaatgaaaatagactgtctgacacaaaaccaaatgacaacaaacaaaataatggcagatcagaaacaacaaaatcaaggcctgaaaccccaaagcaaaagggtgaaagccggcctgagactccaaaacaaaagagtgatgggcatcctgaaaccccaaaacagaagggtgatggaaggcctgaaactccaaagcaaaaaggtgagagccgccctgaaactccaaagcaaaaaaatgaagggcgacctgaaacaccaaaacacaggcatgacaataggagggattctggaaagccatctacagagaaaaaacctgaagtgtctaaacataaacaagatactaaatctgactcacctcggttaaaatcagaacgagctgaagccttaaagcagagacctgatgggcgatctgtttctgagtcactaagacgtgaccatgataataaacaaaaatcagatgacaggggtgaatcagagcgacatcgaggggatcagtctagggttcgaagaccagaaacattgagatcctctagtagaaatgaacatggcattaaatctgatagttcaaaaactgataaactagaacgaaaacacaggcatgaatcaggggactcaagggaaagaccatcttctggggaacaaaaatcaagacctgacagtcctcgtgttaaacaaggagattctaataaatcaagatctgataaacttggttttaaatcaccaactagtaaagatgacaaaaggacagagggtaacaagagtaaagtagacactaataaagcacaccctgacaataaggcagaatttccaagttatttgttggggggcaggtctggtgcgttgaaaaattttgtcattccgaaaatcaagagggataaagatggcaatgttactcaggagacaaagaaaatggaaatgaaaggagagccgaaagacaaagtagaaaaaataggattagttgaagatctaaataaaggagctaagcctgtagttgtgctacaaaaactgtctttggatgatgttcagaaacttattaaagatagagaggacaaatcaagaagttcccttaaacctatcaagaataaaccatcaaagtcaaataaaggtagtatagatcaatcagtgttaaaagaattaccccctgaactcctggcagaaattgagtccaccatgccactttgtgaacgtgtgaaaatgaacaaacgcaagcgtagcacagttaatgaaaagccaaaatatgctgaaatcagttcagatgaagataatgatagtgatgaagcttttgaatcctctaggaaacgacataaaaaagatgatgataaagcttgggaatatgaagagcgtgacagaagaagctctggggatcataggagaagtggccactctcatgaaggaagaaggagttcaggtggtggtcgttatcgaaaccgaagtccgtcagattctgacatggaagattattctcctcctcccagccttagtgaggttgctaggaaaatgaagaaaaaagaaaaacagaagaaaaggaaagcatatgaaccaaaactaacacctgaagaaatgatggactcttcaacttttaagagattcacagcctcaatagagaatattttggataatttggaagatatggattttactgcgtttggtgatgatgatgaaattcctcaggaactgctcttaggaaaacatcagcttaatgaacttggcagtgaatctgctaaaataaaagcaatgggtataatggataagctttcaactgacaaaactgtgaaagtcttaaatatcttggagaagaatattcaggatgggtcaaagctttccactttgttaaatcataataacgatactgaagaagaagaaaggttatggagagaccttattatggagagagttacaaaatcagcggatgcttgtcttacaactatcaacattatgacatcccctaacatgccaaaagctgtgtacattgaggatgtaattgaaagagttatacagtacactaaatttcatttgcagaatacactttatcctcagtatgatcctgtttacagattagatcctcatggaggaggcttattaagttcaaaagcaaaacgggctaaatgttctacccataagcagagagtaatagtaatgctttataacaaagtttgtgacattgttagcagcttatcagaattgctagagatacaacttcttacagacacaacaattcttcaggtttcatctatgggaataacaccattttttgtggaaaatgtcagtgaactacagttgtgtgccattaagttagtcactgcagtattctcaagatatgaaaaacataggcagttaattttggaagaaatttttacttcacttgcaagattaccaaccagcaagaggagtttaaggaacttcaggttaaacagtagtgatatggatggagaacctatgtatattcagatggttacagcactggttttacaacttattcagtgtgtggtacacttaccatcatcagagaaggactctaatgcagaagaagattcaaataaaaaaattgaccaggatgttgtcattactaactcttatgaaacagctatgcgaacagcccaaaacttcctctccatcttccttaaaaaatgtggtagtaagcaaggtgaagaagattacagaccactgtttgaaaattttgttcaagaccttctttcaacagtcaataagcctgaatggccagctgctgaactactccttagtttgttagggagactgttggttcatcagttcagtaacaagtcaacagagatggctttaagagtggcatctcttgattaccttggaactgttgctgcacggctaagaaaagatgctgttacaagcaaaatggatcaaggatctatagaacgcattttaaaacaggtttcaggaggggaagatgaaatccaacaattacaaaaagcattgcttgattacttggatgaaaacactgagactgatccttcactagtgttttctcgtaaattctatatagcccagtggtttcgagacacaactctggaaacagaaaaagcaatgaaatcacaaaaagatgaagaatcatctgaaggaacacatcatgcaaaggaaattgagacaactggccaaattatgcatcgagctgaaaaccgaaaaaagtttcttagaagcattatcaaaaccacaccttctcagtttagcacattaaagatgaactctgatactgtggactatgatgatgcttgcttgattgttcgatacttggcctccatgaggccgtttgcccagagctttgatatttatttgacacagatcctacgagttcttggtgaaaatgcaattgctgttcgaacaaaagccatgaagtgtttgtctgaggttgttgctgtagaccccagtattctagcaaggcttgatatgcaacgaggtgttcatggacgattgatggataattcgactagtgtccgagaagcagcagtagaattactaggtcgatttgtcctttgtcgacctcagcttgctgaacagtattatgatatgctgattgaaagaatattggatactggtatcagtgtcaggaaaagagtaataaagattctcagagacatttgtattgaacaaccaacatttccaaaaatcacagaaatgtgtgtaaaaatgattcgcagagtcaatgatgaagagggcattaagaaattagtaaatgaaacattccagaaactctggtttactccaactccacacaatgacaaagaagcaatgacaaggaaaattttaaacattaccgatgtggttgcagcatgcagagatactggatatgactggtttgagcaactgcttcaaaacttgttgaagtccgaagaggattcctcatataaacctgtgaagaaagcttgtactcaacttgttgataacctagttgagcacattcttaaatatgaggaatctctagctgactctgacaataaaggtgtgaattctggaagattggtagcttgcataaccactttgttcttattcagcaaaataagaccccagctcatggttaaacatgcaatgactatgcaaccataccttaccactaaatgtagtacgcaaaatgatttcatggttatctgcaatgttgcaaaaatcctagagctagttgtaccactgatggagcatccaagtgaaacttttcttgccactattgaggaagatctaatgaagctcatcatcaaatatggcatgactgtagtgcaacattgtgtgagctgtcttggagctgttgtaaataaagtgacacaaaattttaaatttgtgtgggcttgtttcaatagatactatggtgccatttcaaaattaaaaagtcaacaccaagaggacccaaataacacttcacttctaacaaacaaaccagcacttcttagatcccttttcaccgttggagcactatgtcggcattttgattttgatctggaagattttaaaggcaacagcaaggttaacataaaagataaagtacttgaactattgatgtattttacaaaacactcagatgaagaagtacaaacaaaagctatcattggtctaggatttgcctttattcagcatccaagtctaatgttcgagcaagaagtgaagaatctatataataatattttatctgataagaactcctcagtcaatttaaaaatacaagtgttaaaaaacctccagacctacctacaagaagaagatacacgtatgcagcaggcagatagagactggaagaaagttgcaaaacaggaagacttaaaagaaatgggtgatgtttcctcagggatgagtagttccatcatgcagctttatctcaaacaggtgcttgaggcattttttcacacccagtcaagtgtacgccactttgccctaaatgtcattgcattgactctaaatcaaggtcttattcatccagttcagtgtgtgccatatttaattgctatgggcacagacccagaacctgctatgcggaacaaggctgatcagcaacttgtggaaatagacaaaaaatatgctggattcattcatatgaaagcagtggctggtatgaagatgtcttaccaggtacaacaggcaatcaacacatgcctaaaagatcctgtaaggggtttcagacaagacgagtcctctagcgctttgtgttcacacctttactccatgatccgtggaaaccgccaacacagacgagcctttcttatttctttactcaacctctttgatgacacagcaaaaacagacgtgactatgctcttgtatatagcagacaatctagcctgttttccataccagacacaggaagagccgttgtttataatgcatcatatagacattacactctcagtttctggtagtaacctactgcagtcattcaaggagtctatggtaaaggacaaaaggaaagagagaaaatcatcacctagtaaggaaaatgagtcaagcgacagtgaagaagaagtttccaggcctcggaagtcacggaaacgtgtagattcagattcagattcagattcagaagacgatataaattcagtgatgaaatgtttgccagaaaattcagctcctttaatcgaatttgcaaatgtgtcccagggtattttattacttctcatgttaaaacaacatttgaagaatctttgtggattttctgatagtaaaattcagaagtactctccatctgaatctgcaaaagtatatgataaagcgataaaccgaaaaacaggagttcattttcatccaaaacaaacactggacttcctgcggagtgacatggctaattccaaaatcacagaagaggtgaaaaggagtatagtaaaacagtatctagatttcaaacttctcatggaacatctggaccctgatgaagaagaagaagaaggggaggtttcagctagcacaaatgctcggaacaaagcaattacctcactgcttggaggaggcagccctaaaaataatacagcagcagagacagaagatgatgaaagtgatggggaggatagaggaggaggcacttcaggggtgaggcggaggaggagtcaacgtatttcgcagcgtattacgtaaaatgatttttatgtgcttatatatgtcagtctattaaatgtacaccaagtaatgtaatacttaaaagagaaaacattttgtagatagagattctctacttacccgtttatacatccttttgtagaaagtttaacataaaagacaataaaaaaacagaaatgagattt

SEQ ID NO: 617 - protein, 2158 aa, Homo sapiens
MVSIDLHQAGRVDSQASITQDSDSIKKPEEIKQCNDAPVSVLQEDIVGSLKSTPENHPETPKKKSDPELSKSEMKQSESRLAESKPNENRLVETKSSENKLETKVETQTEELKQNESRTTECKQNESTIVEPKQNENRLSDTKPNDNKQNNGRSETTKSRPETPKQKGESRPETPKQKSDGHPETPKQKGDGRPETPKQKGESRPETPKQKNEGRPETPKHRHDNRRDSGKPSTEKKPEVSKHKQDTKSDSPRLKSERAEALKQRPDGRSVSESLRRDHDNKQKSDDRGESERHRGDQSRVRRPETLRSSSRNEHGIKSDSSKTDKLERKHRHESGDSRERPSSGEQKSRPDSPRVKQGDSNKSRSDKLGFKSPTSKDDKRTEGNKSKVDTNKAHPDNKAEFPSYLLGGRSGALKNFVIPKIKRDKDGNVTQETKKMEMKGEPKDKVEKIGLVEDLNKGAKPVVVLQKLSLDDVQKLIKDREDKSRSSLKPIKNKPSKSNKGSIDQSVLKELPPELLAEIESTMPLCERVKMNKRKRSTVNEKPKYAEISSDEDNDSDEAFESSRKRHKKDDDKAWEYEERDRRSSGDHRRSGHSHEGRRSSGGGRYRNRSPSDSDMEDYSPPPSLSEVARKMKKKEKQKKRKAYEPKLTPEEMMDSSTFKRFTASIENILDNLEDMDFTAFGDDDEIPQELLLGKHQLNELGSESAKIKAMGIMDKLSTDKTVKVLNILEKNIQDGSKLSTLLNHNNDTEEEERLWRDLIMERVTKSADACLTTINIMTSPNMPKAVYIEDVIERVIQYTKFHLQNTLYPQYDPVYRLDPHGGGLLSSKAKRAKCSTHKQRVIVMLYNKVCDIVSSLSELLEIQLLTDTTILQVSSMGITPFFVENVSELQLCAIKLVTAVFSRYEKHRQLILEEIFTSLARLPTSKRSLRNFRLNSSDMDGEPMYIQMVTALVLQLIQCVVHLPSSEKDSNAEEDSNKKIDQDVVITNSYETAMRTAQNFLSIFLKKCGSKQGEEDYRPLFENFVQDLLSTVNKPEWPAAELLLSLLGRLLVHQFSNKSTEMALRVASLDYLGTVAARLRKDAVTSKMDQGSIERILKQVSGGEDEIQQLQKALLDYLDENTETDPSLVFSRKFYIAQWFRDTTLETEKAMKSQKDEESSEGTHHAKEIETTGQIMHRAENRKKFLRSIIKTTPSQFSTLKMNSDTVDYDDACLIVRYLASMRPFAQSFDIYLTQILRVLGENAIAVRTKAMKCLSEVVAVDPSILARLDMQRGVHGRLMDNSTSVREAAVELLGRFVLCRPQLAEQYYDMLIERILDTGISVRKRVIKILRDICIEQPTFPKITEMCVKMIRRVNDEEGIKKLVNETFQKLWFTPTPHNDKEAMTRKILNITDVVAACRDTGYDWFEQLLQNLLKSEEDSSYKPVKKACTQLVDNLVEHILKYEESLADSDNKGVNSGRLVACITTLFLFSKIRPQLMVKHAMTMQPYLTTKCSTQNDFMVICNVAKILELVVPLMEHPSETFLATIEEDLMKLIIKYGMTVVQHCVSCLGAVVNKVTQNFKFVWACFNRYYGAISKLKSQHQEDPNNTSLLTNKPALLRSLFTVGALCRHFDFDLEDFKGNSKVNIKDKVLELLMYFTKHSDEEVQTKAIIGLGFAFIQHPSLMFEQEVKNLYNNILSDKNSSVNLKIQVLKNLQTYLQEEDTRMQQADRDWKKVAKQEDLKEMGDVSSGMSSSIMQLYLKQVLEAFFHTQSSVRHFALNVIALTLNQGLIHPVQCVPYLIAMGTDPEPAMRNKADQQLVEIDKKYAGFIHMKAVAGMKMSYQVQQAINTCLKDPVRGFRQDESSSALCSHLYSMIRGNRQHRRAFLISLLNLFDDTAKTDVTMLLYIADNLACFPYQTQEEPLFIMHHIDITLSVSGSNLLQSFKESMVKDKRKERKSSPSKENESSDSEEEVSRPRKSRKRVDSDSDSDSEDDINSVMKCLPENSAPLIEFANVSQGILLLLMLKQHLKNLCGFSDSKIQKYSPSESAKVYDKAINRKTGVHFHPKQTLDFLRSDMANSKITEEVKRSIVKQYLDFKLLMEHLDPDEEEEEGEVSASTNARNKAITSLLGGGSPKNNTAAETEDDESDGEDRGGGTSGVRRRRSQRISQRIT

SEQ ID NO: 618 - DNA, 8124 bp, Homo sapiens
gtttgtcgcagcaagaacaaacagcattccttccagcaaatcaagtgcctgttttacaacagaacacttcagttgctgcaaaacaaccccagacttctgtggtacagaatcaacaacagatatcacaacagggacctatatatgatgaagtggaattggatgcattggctgaaattgagcgaatagagagagaatcagctattgaaagggagcgcttctcaaaagaagttcaagataaagataagcctttgaaaaaaagaaaacaagattcttacccacaggaggctgggggtgctacaggaggtaatagaccagcttctcaggagacgggttctacgggaaatgggtcaaggccagcattaatggttagcattgatcttcatcaggcaggaagagtggactctcaggcttctataactcaggattcagactccataaaaaagcctgaagaaatcaaacaatgtaatgatgcacctgtttctgttcttcaggaagatattgttggaagtcttaaatctacaccagaaaaccatcctgagacacctaaaaaaaagtctgatcctgagctttcaaagagtgaaatgaaacaaagtgaaagtagattagcagaatctaaaccaaatgaaaaccgattggtggagacaaaatcaagtgaaaataagttagaaactaaagttgagacccaaacagaagaacttaaacagaatgagagcagaacaactgaatgcaaacaaaacgagagcaccatagttgagcctaaacaaaatgaaaatagactgtctgacacaaaaccaaatgacaacaaacaaaataatggcagatcagaaacaacaaaatcaaggcctgaaaccccaaagcaaaagggtgaaagccggcctgagactccaaaacaaaagagtgatgggcatcctgaaaccccaaaacagaagggtgatggaaggcctgaaactccaaagcaaaaaggtgagagccgccctgaaactccaaagcaaaaaaatgaagggcgacctgaaacaccaaaacacaggcatgacaataggagggattctggaaagccatctacagagaaaaaacctgaagtgtctaaacataaacaagatactaaatctgactcacctcggttaaaatcagaacgagctgaagccttaaagcagagacctgatgggcgatctgtttctgagtcactaagacgtgaccatgataataaacaaaaatcagatgacaggggtgaatcagagcgacatcgaggggatcagtctagggttcgaagaccagaaacattgagatcctctagtagaaatgaacatggcattaaatctgatagttcaaaaactgataaactagaacgaaaacacaggcatgaatcaggggactcaagggaaagaccatcttctggggaacaaaaatcaagacctgacagtcctcgtgttaaacaaggagattctaataaatcaagatctgataaacttggttttaaatcaccaactagtaaagatgacaaaaggacagagggtaacaagagtaaagtagacactaataaagcacaccctgacaataaggcagaatttccaagttatttgttggggggcaggtctggtgcgttgaaaaattttgtcattccgaaaatcaagagggataaagatggcaatgttactcaggagacaaagaaaatggaaatgaaaggagagccgaaagacaaagtagaaaaaataggattagttgaagatctaaataaaggagctaagcctgtagttgtgctacaaaaactgtctttggatgatgttcagaaacttattaaagatagagaggacaaatcaagaagttcccttaaacctatcaagaataaaccatcaaagtcaaataaaggtagtatagatcaatcagtgttaaaagaattaccccctgaactcctggcagaaattgagtccaccatgccactttgtgaacgtgtgaaaatgaacaaacgcaagcgtagcacagttaatgaaaagccaaaatatgctgaaatcagttcagatgaagataatgatagtgatgaagcttttgaatcctctaggaaacgacataaaaaagatgatgataaagcttgggaatatgaagagcgtgacagaagaagctctggggatcataggagaagtggccactctcatgaaggaagaaggagttcaggtggtggtcgttatcgaaaccgaagtccgtcagattctgacatggaagattattctcctcctcccagccttagtgaggttgctaggaaaatgaagaaaaaagaaaaacagaagaaaaggaaagcatatgaaccaaaactaacacctgaagaaatgatggactcttcaacttttaagagattcacagcctcaatagagaatattttggataatttggaagatatggattttactgcgtttggtgatgatgatgaaattcctcaggaactgctcttaggaaaacatcagcttaatgaacttggcagtgaatctgctaaaataaaagcaatgggtataatggataagctttcaactgacaaaactgtgaaagtcttaaatatcttggagaagaatattcaggatgggtcaaagctttccactttgttaaatcataataacgatactgaagaagaagaaaggttatggagagaccttattatggagagagttacaaaatcagcggatgcttgtcttacaactatcaacattatgacatcccctaacatgccaaaagctgtgtacattgaggatgtaattgaaagagttatacagtacactaaatttcatttgcagaatacactttatcctcagtatgatcctgtttacagattagatcctcatggaggaggcttattaagttcaaaagcaaaacgggctaaatgttctacccataagcagagagtaatagtaatgctttataacaaagtttgtgacattgttagcagcttatcagaattgctagagatacaacttcttacagacacaacaattcttcaggtttcatctatgggaataacaccattttttgtggaaaatgtcagtgaactacagttgtgtgccattaagttagtcactgcagtattctcaagatatgaaaaacataggcagttaattttggaagaaatttttacttcacttgcaagattaccaaccagcaagaggagtttaaggaacttcaggttaaacagtagtgatatggatggagaacctatgtatattcagatggttacagcactggttttacaacttattcagtgtgtggtacacttaccatcatcagagaaggactctaatgcagaagaagattcaaataaaaaaattgaccaggatgttgtcattactaactcttatgaaacagctatgcgaacagcccaaaacttcctctccatcttccttaaaaaatgtggtagtaagcaaggtgaagaagattacagaccactgtttgaaaattttgttcaagaccttctttcaacagtcaataagcctgaatggccagctgctgaactactccttagtttgttagggagactgttggttcatcagttcagtaacaagtcaacagagatggctttaagagtggcatctcttgattaccttggaactgttgctgcacggctaagaaaagatgctgttacaagcaaaatggatcaaggatctatagaacgcattttaaaacaggtttcaggaggggaagatgaaatccaacaattacaaaaagcattgcttgattacttggatgaaaacactgagactgatccttcactagtgttttctcgtaaattctatatagcccagtggtttcgagacacaactctggaaacagaaaaagcaatgaaatcacaaaaagatgaagaatcatctgaaggaacacatcatgcaaaggaaattgagacaactggccaaattatgcatcgagctgaaaaccgaaaaaagtttcttagaagcattatcaaaaccacaccttctcagtttagcacattaaagatgaactctgatactgtggactatgatgatgcttgcttgattgttcgatacttggcctccatgaggccgtttgcccagagctttgatatttatttgacacagatcctacgagttcttggtgaaaatgcaattgctgttcgaacaaaagccatgaagtgtttgtctgaggttgttgctgtagaccccagtattctagcaaggcttgatatgcaacgaggtgttcatggacgattgatggataattcgactagtgtccgagaagcagcagtagaattactaggtcgatttgtcctttgtcgacctcagcttgctgaacagtattatgatatgctgattgaaagaatattggatactggtatcagtgtcaggaaaagagtaataaagattctcagagacatttgtattgaacaaccaacatttccaaaaatcacagaaatgtgtgtaaaaatgattcgcagagtcaatgatgaagagggcattaagaaattagtaaatgaaacattccagaaactctggtttactccaactccacacaatgacaaagaagcaatgacaaggaaaattttaaacattaccgatgtggttgcagcatgcagagatactggatatgactggtttgagcaactgcttcaaaacttgttgaagtccgaagaggattcctcatataaacctgtgaagaaagcttgtactcaacttgttgataacctagttgagcacattcttaaatatgaggaatctctagctgactctgacaataaaggtgtgaattctggaagattggtagcttgcataaccactttgttcttattcagcaaaataagaccccagctcatggttaaacatgcaatgactatgcaaccataccttaccactaaatgtagtacgcaaaatgatttcatggttatctgcaatgttgcaaaaatcctagagctagttgtaccactgatggagcatccaagtgaaacttttcttgccactattgaggaagatctaatgaagctcatcatcaaatatggcatgactgtagtgcaacattgtgtgagctgtcttggagctgttgtaaataaagtgacacaaaattttaaatttgtgtgggcttgtttcaatagatactatggtgccatttcaaaattaaaaagtcaacaccaagaggacccaaataacacttcacttctaacaaacaaaccagcacttcttagatcccttttcaccgttggagcactatgtcggcattttgattttgatctggaagattttaaaggcaacagcaaggttaacataaaagataaagtacttgaactattgatgtattttacaaaacactcagatgaagaagtacaaacaaaagctatcattggtctaggatttgcctttattcagcatccaagtctaatgttcgagcaagaagtgaagaatctatataataatattttatctgataagaactcctcagtcaatttaaaaatacaagtgttaaaaaacctccagacctacctacaagaagaagatacacgtatgcagcaggcagatagagactggaagaaagttgcaaaacaggaagacttaaaagaaatgggtgatgtttcctcagggatgagtagttccatcatgcagctttatctcaaacaggtgcttgaggcattttttcacacccagtcaagtgtacgccactttgccctaaatgtcattgcattgactctaaatcaaggtcttattcatccagttcagtgtgtgccatatttaattgctatgggcacagacccagaacctgctatgcggaacaaggctgatcagcaacttgtggaaatagacaaaaaatatgctggattcattcatatgaaagcagtggctggtatgaagatgtcttaccaggtacaacaggcaatcaacacatgcctaaaagatcctgtaaggggtttcagacaagacgagtcctctagcgctttgtgttcacacctttactccatgatccgtggaaaccgccaacacagacgagcctttcttatttctttactcaacctctttgatgacacagcaaaaacagacgtgactatgctcttgtatatagcagacaatctagcctgttttccataccagacacaggaagagccgttgtttataatgcatcatatagacattacactctcagtttctggtagtaacctactgcagtcattcaaggagtctatggtaaaggacaaaaggaaagagagaaaatcatcacctagtaaggaaaatgagtcaagcgacagtgaagaagaagtttccaggcctcggaagtcacggaaacgtgtagattcagattcagattcagattcagaagacgatataaattcagtgatgaaatgtttgccagaaaattcagctcctttaatcgaatttgcaaatgtgtcccagggtattttattacttctcatgttaaaacaacatttgaagaatctttgtggattttctgatagtaaaattcagaagtactctccatctgaatctgcaaaagtatatgataaagcgataaaccgaaaaacaggagttcattttcatccaaaacaaacactggacttcctgcggagtgacatggctaattccaaaatcacagaagaggtgaaaaggagtatagtaaaacagtatctagatttcaaacttctcatggaacatctggaccctgatgaagaagaagaagaaggggaggtttcagctagcacaaatgctcggaacaaagcaattacctcactgcttggaggaggcagccctaaaaataatacagcagcagagacagaagatgatgaaagtgatggggaggatagaggaggaggcacttcagggtcattgagaaggtcaaaacgaaattcagactctacggagttggcagcacagatgaatgaaagtgttgacgtcatggatgtcatcgctatttgctgtccaaagtacaaagatcgaccacaaattgcaagagtagtgcagaaaaccagcagtggcttcagtgttcagtggatggcaggctcctacagtggctcctggactgaggctaagcgccgtgatggccgcaaactggtgccttgggtagacactattaaagagtcagacattatttacaaaaaaattgctctaacgagtgctaataagctgactaataaagttgttcagactttacgatccctgtatgccgccaaggatgggacttccagctaatgaatttgtacatgcagccaaatttacaggaattttttttaaaaggcagaaaaacttgaaataccaacattctggcaaaaaaaaatcagttttatgaagagtaagtggaacctgggatgcaggaacaaaagaaggaaatgttgggcaaacatttttgtgggagctcccttcgctgttgtgcagcagaaacagattctcagttcatttttactcccactgtattatagtttaacaaaaattgtttatatcttggaaaaaaaactttctgtttaaaaaaaataaacaagtgaatgttggaaattagtctgttaatgttcttaataaagtgttcttggagtttaacctagcagcggatggctttctttagcttagcccagtttccagggaagcattgttttttccaggctgtaaaatggcagaatctcctggatatataatttattctgttgaaaaaaaaaaaagcatgcagtatctatgacctatctgcagaaggagtttttgtaaatgtagattttgatgtattaggtcaccctgaaaacaatacaagaaaagggatccccaggtaatctggtggagcgaatactgcaataaatttttttacttctctttgttacttgtctgtttccatttgaatttcttattgtaaaaatctgtttaaatccatttatattattttacagtcttttatgtaaaatttattatatcactggttttcaaagcaaaacataaaatattgtttatacagtttgtataggctgacttctgaataattggtatctattattttcattcccataagagggtgtaaacaattaactccagggttttattgtatcctgcaatatttagtattaactatatatgatttagcactgtgccaaacacattttcaagagtacattttgatataaaaagaaactatagtttaaaaaaaaaaaaaaaaaaaaaaaaaaaaaaaaaaaaa

SEQ ID NO: 619 - protein, 2265 aa, Homo sapiens
MVSIDLHQAGRVDSQASITQDSDSIKKPEEIKQCNDAPVSVLQEDIVGSLKSTPENHPETPKKKSDPELSKSEMKQSESRLAESKPNENRLVETKSSENKLETKVETQTEELKQNESRTTECKQNESTIVEPKQNENRLSDTKPNDNKQNNGRSETTKSRPETPKQKGESRPETPKQKSDGHPETPKQKGDGRPETPKQKGESRPETPKQKNEGRPETPKHRHDNRRDSGKPSTEKKPEVSKHKQDTKSDSPRLKSERAEALKQRPDGRSVSESLRRDHDNKQKSDDRGESERHRGDQSRVRRPETLRSSSRNEHGIKSDSSKTDKLERKHRHESGDSRERPSSGEQKSRPDSPRVKQGDSNKSRSDKLGFKSPTSKDDKRTEGNKSKVDTNKAHPDNKAEFPSYLLGGRSGALKNFVIPKIKRDKDGNVTQETKKMEMKGEPKDKVEKIGLVEDLNKGAKPVVVLQKLSLDDVQKLIKDREDKSRSSLKPIKNKPSKSNKGSIDQSVLKELPPELLAEIESTMPLCERVKMNKRKRSTVNEKPKYAEISSDEDNDSDEAFESSRKRHKKDDDKAWEYEERDRRSSGDHRRSGHSHEGRRSSGGGRYRNRSPSDSDMEDYSPPPSLSEVARKMKKKEKQKKRKAYEPKLTPEEMMDSSTFKRFTASIENILDNLEDMDFTAFGDDDEIPQELLLGKHQLNELGSESAKIKAMGIMDKLSTDKTVKVLNILEKNIQDGSKLSTLLNHNNDTEEEERLWRDLIMERVTKSADACLTTINIMTSPNMPKAVYIEDVIERVIQYTKFHLQNTLYPQYDPVYRLDPHGGGLLSSKAKRAKCSTHKQRVIVMLYNKVCDIVSSLSELLEIQLLTDTTILQVSSMGITPFFVENVSELQLCAIKLVTAVFSRYEKHRQLILEEIFTSLARLPTSKRSLRNFRLNSSDMDGEPMYIQMVTALVLQLIQCVVHLPSSEKDSNAEEDSNKKIDQDVVITNSYETAMRTAQNFLSIFLKKCGSKQGEEDYRPLFENFVQDLLSTVNKPEWPAAELLLSLLGRLLVHQFSNKSTEMALRVASLDYLGTVAARLRKDAVTSKMDQGSIERILKQVSGGEDEIQQLQKALLDYLDENTETDPSLVFSRKFYIAQWFRDTTLETEKAMKSQKDEESSEGTHHAKEIETTGQIMHRAENRKKFLRSIIKTTPSQFSTLKMNSDTVDYDDACLIVRYLASMRPFAQSFDIYLTQILRVLGENAIAVRTKAMKCLSEVVAVDPSILARLDMQRGVHGRLMDNSTSVREAAVELLGRFVLCRPQLAEQYYDMLIERILDTGISVRKRVIKILRDICIEQPTFPKITEMCVKMIRRVNDEEGIKKLVNETFQKLWFTPTPHNDKEAMTRKILNITDVVAACRDTGYDWFEQLLQNLLKSEEDSSYKPVKKACTQLVDNLVEHILKYEESLADSDNKGVNSGRLVACITTLFLFSKIRPQLMVKHAMTMQPYLTTKCSTQNDFMVICNVAKILELVVPLMEHPSETFLATIEEDLMKLIIKYGMTVVQHCVSCLGAVVNKVTQNFKFVWACFNRYYGAISKLKSQHQEDPNNTSLLTNKPALLRSLFTVGALCRHFDFDLEDFKGNSKVNIKDKVLELLMYFTKHSDEEVQTKAIIGLGFAFIQHPSLMFEQEVKNLYNNILSDKNSSVNLKIQVLKNLQTYLQEEDTRMQQADRDWKKVAKQEDLKEMGDVSSGMSSSIMQLYLKQVLEAFFHTQSSVRHFALNVIALTLNQGLIHPVQCVPYLIAMGTDPEPAMRNKADQQLVEIDKKYAGFIHMKAVAGMKMSYQVQQAINTCLKDPVRGFRQDESSSALCSHLYSMIRGNRQHRRAFLISLLNLFDDTAKTDVTMLLYIADNLACFPYQTQEEPLFIMHHIDITLSVSGSNLLQSFKESMVKDKRKERKSSPSKENESSDSEEEVSRPRKSRKRVDSDSDSDSEDDINSVMKCLPENSAPLIEFANVSQGILLLLMLKQHLKNLCGFSDSKIQKYSPSESAKVYDKAINRKTGVHFHPKQTLDFLRSDMANSKITEEVKRSIVKQYLDFKLLMEHLDPDEEEEEGEVSASTNARNKAITSLLGGGSPKNNTAAETEDDESDGEDRGGGTSGSLRRSKRNSDSTELAAQMNESVDVMDVIAICCPKYKDRPQIARVVQKTSSGFSVQWMAGSYSGSWTEAKRRDGRKLVPWVDTIKESDIIYKKIALTSANKLTNKVVQTLRSLYAAKDGTSS

SEQ ID NO: 620 - DNA, 3801 bp, Homo sapiens
tagactacatgaggaaataattgacttttataacttcatgtccccttgtcctgaagaagcagctatgagaagagaggtggtgaaacggatcgaaactgtggtgaaagacctttggccgacggctgatgtacagatatttggcagctttagtacaggtctttatcttccaactagcgacatagacctggtggtcttcgggaaatgggagcgtcctcctttacagctgctggagcaagccctgcggaagcacaacgtggctgagccgtgttccatcaaagtccttgacaaggctacggtaccaataataaagctcacagatcaggagactgaagtgaaagttgacatcagctttaacatggagacgggcgtccgggcagcggagttcatcaagaattacatgaagaaatattcattgctgccttacttgattttagtattgaaacagttccttctgcagagggacctgaatgaagtttttacaggtggaattagctcatacagcctaattttaatggccattagctttctacagttgcatccaagaattgatgcccggagagctgatgaaaaccttggaatgcttcttgtagaattttttgaactctatgggagaaattttaattacttgaaaaccggtattagaatcaaagaaggaggtgcctatatcgccaaagaggagatcatgaaagccatgaccagcgggtacagaccgtcgatgctgtgcattgaggaccccctgctgccagggaatgacgttggccggagctcctatggcgccatgcaggtgaagcaggtcttcgattatgcctacatagtgctcagccatgccgtgtcaccgctggccaggtcctatccaaacagagacgccgaaagtactttaggaagaatcatcaaagtaactcaggaggtgattgactaccggaggtggatcaaagagaagtggggcagcaaagcccacccgtcgccaggcatggacagcaggatcaagatcaaagagcgaatagccacatgcaatggggagcagacgcagaaccgagagcccgagtctccctatggccagcgcttgactttgtcgctgtccagcccccagctcctgtcttcaggctcctcggcctcttctgtgtcttcactttctgggagtgacgttgattcagacacaccgccctgcacaacgcccagtgtttaccagttcagtctgcaagcgccagctcctctcatggccggcttacccaccgccttgccaatgcccagtggcaaacctcagcccaccacttccagaacactgatcatgacaaccaacaatcagaccaggtttactatacctccaccgaccctaggggttgctcctgttccttgcagacaagctggtgtagaaggaactgcgtctttgaaagccgtccaccacatgtcttccccggccattccctcagcgtcccccaacccgctctcgagccctcatctgtatcataagcagcacaacggcatgaaactgtccatgaagggctctcacggccacacccaaggcggcggctacagctctgtgggtagcggaggtgtgcggccccctgtgggcaacaggggacaccaccagtataaccgcaccggctggaggaggaaaaaacacacacacacacgggacagtctgcccgtgagcctcagcagataatggctcctggctgcgtcagcctcccccacccctctgcagactgccccgcggcctcggccaccggcaggggaaccgagaccagcaccccgcacgtcagccgggctcgcggcacgcccgccgctgatcactctgcatgtttcttcgtgtggtggtcgcgtccatcttcaagaacagctcgttgtgctcatctgtgaagccttattaaacgtggacgttgttttctgccttcccaggattcttccttcagtgctgaggcaggttgggctcaggaactgcagggacgtgaacatgcgcttgcggtttgaggtagccgtgtctgttccttcgcggtttgctattttcatttcctgttcgtcaaagcagcagaggagatcaaaccccgttcgtgtgtctttcctccatggataagcttgggaggtcattgttttactgccctcacattttgtttgaaatttcagaactgtttttctatgtaaatattgaaaacttatgatttgtgcaataactcagatattttttatttaatttcctattttcacataagttatatttaagggaggagggaattttttttaaacaagcttaggtcctttcccgagctgcattttctaagttgggtcatcgtgtcggctggttgtctgacgagcatcgttacaaacaccatgatgaggggtttggggttttattttgatgtcttttcttttggtcggaagtgagtgaaggagccaggtcgccctgaaggttttccaaagggcttggctccagagccacctggcagactgcccgtggccctgctgtcgggccccaggccgttgtcctgctctgaccacagagttttaatgttttggttttcacttcttttaaactggacaacaaatccagcatttcaagtgccagaagtataactttctaaggagagaagggttgtcacattataaaatctttaggaaaatgtgaactggaaaacgcttcggtcagttttagtgacatagcctgtgatgatgggtctggtgactattattgcggaccgtggtacccagttttaggaatgtggagaaaggaattctgttgattccgttgaggaatctgtagcgtatgcattcgttctgttaagagcaaatctaggagaagtgcttcagctgcccagtgcgccgtggggagtgttttaacggatcgtgtcgcaggagagcacagcccagcgttggggccgggaccgctggcgcccgacgtcggaagcatacaggtatactatgcaagtgtattctgccacaacaaccactgtctttgttacctttttttgaacaagaatatatccatcctgcctaaccctgagtttttggagcaccacagttgtcctgggagttggttgcatcttgtaggccatctgacttcctgtttttaaaacgggggtctggtcttgctaaacactacaggtaggttggtctttgaagtccactagtggagaatgtcaagacaagatacttattaccatgacatctgatgcatgtgcagcagtggggagttctagattgatctctgaatgtgatcgacgcccagcaaggacaagctttaaaatgtctgcggtctgcccttttgaagcaggactggctcactctgtcattgggagctgtcagctgcgactgcaggttctctaggaggcattccagaatagagtagcacactgtgtctgcagttctcgatgaccgaaagttatcaaaaatatttaaaatatttaaattgtgaacctattgataaagaatatttataaaaactgatctgtaggcctgtactaatctctacgcattagcaatattgactgtaaacccacattaaggaaaccactacgggtctggcagtgcgtgtcccgtggggtgtgcattttaaaactcgattcatagacacaggtaccatgttccatttccgtcatggtgaagcaaatgaattggcctggctaccactgtggtcgcgtgctacaggtttgacaaaaagatatcatgtttcgatttttttgtgtgtggacaacaatatggaagctaaaattgacatatttttatgtaaagtttttctattctttgatttttaataaactttggaaaccaaaaaaaaaaaaaaaaaaaaaaaaaaaaaaaaaaaaa

SEQ ID NO: 621 - protein, 542 aa, Homo sapiens
MSPCPEEAAMRREVVKRIETVVKDLWPTADVQIFGSFSTGLYLPTSDIDLVVFGKWERPPLQLLEQALRKHNVAEPCSIKVLDKATVPIIKLTDQETEVKVDISFNMETGVRAAEFIKNYMKKYSLLPYLILVLKQFLLQRDLNEVFTGGISSYSLILMAISFLQLHPRIDARRADENLGMLLVEFFELYGRNFNYLKTGIRIKEGGAYIAKEEIMKAMTSGYRPSMLCIEDPLLPGNDVGRSSYGAMQVKQVFDYAYIVLSHAVSPLARSYPNRDAESTLGRIIKVTQEVIDYRRWIKEKWGSKAHPSPGMDSRIKIKERIATCNGEQTQNREPESPYGQRLTLSLSSPQLLSSGSSASSVSSLSGSDVDSDTPPCTTPSVYQFSLQAPAPLMAGLPTALPMPSGKPQPTTSRTLIMTTNNQTRFTIPPPTLGVAPVPCRQAGVEGTASLKAVHHMSSPAIPSASPNPLSSPHLYHKQHNGMKLSMKGSHGHTQGGGYSSVGSGGVRPPVGNRGHHQYNRTGWRRKKHTHTRDSLPVSLSR

SEQ ID NO: 622 - DNA, 2258 bp, Homo sapiens
gccctgtcctcaccgcggtccgcccgccgccgctaaatacccggatgcgccgcccaagcgccagacgcggagctgggaaaagggaggcagaggaggcagaggcagaggcagaggcagagcccggtgccgagaccaagcgacagaccggcggggctgggcctcgcaaagccggctcggcgagctctcccgacacccgagccggggaggaaaagcagcgactcctcgctcgcatccccgggagccgcactccagactggcccggtagtcaggggctcaggagcagatcccgaggcaggctttgctcagcctccgacgagggctggccctttggaaggcgccttcaacagccggaccagacaggccaccatgaccgagaattccacgtccgcccctgcggccaagcccaagcgggccaaggcctccaagaagtccacagaccaccccaagtattcagacatgatcgtggctgccatccaggccgagaagaaccgcgctggctcctcgcgccagtccattcagaagtatatcaagagccactacaaggtgggtgagaacgctgactcgcagatcaagttgtccatcaagcgcctggtcaccaccggtgtcctcaagcagaccaaaggggtgggggcctcggggtccttccggctagccaagagcgacgaacccaagaagtcagtggccttcaagaagaccaagaaggaaatcaagaaggtagccacgccaaagaaggcatccaagcccaagaaggctgcctccaaagccccaaccaagaaacccaaagccaccccggtcaagaaggccaagaagaagctggctgccacgcccaagaaagccaaaaaacccaagactgtcaaagccaagccggtcaaggcatccaagcccaaaaaggccaaaccagtgaaacccaaagcaaagtccagtgccaagagggccggcaagaagaagtgacaatgaagtcttttcttgcggacactccctcctgtctcctattttctgtaaataattttctccttttttctctcttgatgctcaccaccaccttttgcccccttctgttctgactttataagagacaggatttggattcttcagaaattacagaataattcatttttccttaaccagttgtgcaaggacagcaacaaccaatctaatgatgagaatgtacttatattttgttttgctattaacctacttacggggttagggatttgcggggggggcttgtgtgttttgttggcttgtttgccatgaaggtagatgtgggtggggagaagacacaaggcagtttgttctggctagatgagagggaacccaggaattgtgaggttagcaggaatatctttagggtgagtgagttttccttgagttgggcacccgttgtgagagtttcagaacctttggccagcaggagagaggtggtagggagcagccagccggcaaaggaaggaggtggaaaaaaaccgccaccgggctgacttccacctcccagtggtgagcagtgggggcccaaacccagtttccttctcatttttgttagtttgccctttcggcctccctattttcttagggaaggggagtggggtccaagtgacagctggatgggagaagccatagtttctcccagtcagctaggatgtagccattgggggatctttgtggcttcagcaaattctcttgttaaaccggagtgaaaacttcaggggaagggtggggagtcagccaagtgcctcagtgtgccctgttgaaacttaggtttttccacgcaatcgatggattgtgtcctaggaagacttttcttttcctctggatttttgttcctcctgtacaagaggtgtctttgcttggtttggtggggctgcggccacttaaaacctcccgatctctttttgagtcctttattataagtagttgtagctgcgggagggggagggggagtgggcgggcagtggatagtaagacttactgcagtcgatttgggatttgctaagtagttttacagagctagatctgtgtgcatgtgtgtgtttgtgtatatatacatatctagggctagtacttagtttcacacccgggagctgggagaaaaaacctgtacagttgtctttctcttatttttaataaaatagaaaaatcgcgcacttgcgcgtcccccccccacccccttttttaaacaagtgttacttgtgccgggaaaattttgctgtctttgtaattttaaaactttaaaataaattggaaaagggagaaactga

SEQ ID NO: 623 - protein, 194 aa, Homo sapiens
MTENSTSAPAAKPKRAKASKKSTDHPKYSDMIVAAIQAEKNRAGSSRQSIQKYIKSHYKVGENADSQIKLSIKRLVTTGVLKQTKGVGASGSFRLAKSDEPKKSVAFKKTKKEIKKVATPKKASKPKKAASKAPTKKPKATPVKKAKKKLAATPKKAKKPKTVKAKPVKASKPKKAKPVKPKAKSSAKRAGKKK

SEQ ID NO: 624 - DNA, 737 bp, Homo sapiens
ggagtttcgccgccgcagtcttcgccaccatgccgccctacaccgtggtctatttcccagttcgaggccgctgcgcggccctgcgcatgctgctggcagatcagggccagagctggaaggaggaggtggtgaccgtggagacgtggcaggagggctcactcaaagcctcctgcctatacgggcagctccccaagttccaggacggagacctcaccctgtaccagtccaataccatcctgcgtcacctgggccgcacccttgggctctatgggaaggaccagcaggaggcagccctggtggacatggtgaatgacggcgtggaggacctccgctgcaaatacatctccctcatctacaccaactatgaggcgggcaaggatgactatgtgaaggcactgcccgggcaactgaagccttttgagaccctgctgtcccagaaccagggaggcaagaccttcattgtgggagaccagatctccttcgctgactacaacctgctggacttgctgctgatccatgaggtcctagcccctggctgcctggatgcgttccccctgctctcagcatatgtggggcgcctcagcgcccggcccaagctcaaggccttcctggcctcccctgagtacgtgaacctccccatcaatggcaacgggaaacagtgagggttggggggactctgagcgggaggcagagtttgccttcctttctccaggaccaataaaatttctaagagagct

SEQ ID NO: 625 - protein, 210 aa, Homo sapiens
MPPYTVVYFPVRGRCAALRMLLADQGQSWKEEVVTVETWQEGSLKASCLYGQLPKFQDGDLTLYQSNTILRHLGRTLGLYGKDQQEAALVDMVNDGVEDLRCKYISLIYTNYEAGKDDYVKALPGQLKPFETLLSQNQGGKTFIVGDQISFADYNLLDLLLIHEVLAPGCLDAFPLLSAYVGRLSARPKLKAFLASPEYVNLPINGNGKQ

SEQ ID NO: 626 - DNA, 1293 bp, Homo sapiens
tcagacaagcactggacgtggcggccattttgttttggacaccgagcaggagctggcggccgctgcagacgaaaggcaggaaagggcaggccgggtgagcagacggatcggccgactagacagccaaccagcaacaacgaactgagctcgcatactaccgcttacgcatctaaccaaccgcccatctagctaacccgagcccctccaccgtcaactcaggttcggccggtccccggcccgcctgccggagccgtggtggcagccccgggaggagcactggcgtctgtttccttcgattctcgggattcgaagatggctgcacagtcagcgccgaaagttgtgctaaaaagcaccaccaagatgtctctaaatgagcgctttactaatatgctgaagaacaaacagccgacgccagtgaatattcgggcttcgatgcagcaacaacagcagctagccagtgccagaaacagaagactggcccagcagatggagaatagaccctctgtccaggcagcattaaaacttaagcagagcttaaagcagcgcctgggtaagagtaacatccaggcacggttaggccgacccataggggccctggccaggggagcaatcggaggacgaggcctacccataatccagagaggcttgcccagaggaggactacgtgggggacgtgccaccagaaccctacttaggggcgggatgtcactccgaggtcaaaacctgctccgaggtggacgagccgtagctccccgaatgggcttaagaagaggtggtgttcgaggtcgtggaggtcctgggagagggggcctagggcgtggagctatgggtcgtggcggaatcggtggtagaggtcggggtatgataggtcggggaagagggggctttggaggccgaggccgaggccgtggacgagggagaggtgcccttgctcgccctgtattgaccaaggagcagctggacaaccaattggatgcatatatgtcgaaaacaaaaggacacctggatgctgagttggatgcctacatggcgcagacagatcccgaaaccaatgattgaagcctgcccatcctcccatgagagactcttgttagtcaacacatctgtaaataaccttgagataacagatgagaagaaatctgattgatgctggatggacctatcacaataggctgtggacttacttgccaccagcttgtgcatttagtgtgttccttttactttttgatactgtgttgtatgaaacccttttgtcctttgatttggttttttgtttttgtttttttagggggg

SEQ ID NO: 627 - protein, 95 aa, Homo sapiens
MRRNLIDAGWTYHNRLWTYLPPACAFSVFLLLFDTVLYETLLSFDLVFCFCFFRGEGGFPLLCPDFSLNTNALALWLEHPLPTSVSPHLSYALTC

SEQ ID NO: 628 - DNA, 2248 bp, Homo sapiens
aaaaaccataaagaaaagcaaaagaatgatttgtagttaattctggggatggagggtacacaggaggacttggaaaagcctggtaacattctgtttcctaagctggtgttttctttaaactatttctaatactctagtatgtatatttcttaatttaaaaaaagtttcaaatcagacaaaactctctaagccaaaaaaaagtccaccacaagtcattaaataaagcaaataataaaacagtatgtaagttattaatttttgttaagaaattacatatgcatctacatttttgtgtttaaatggacatacaagtagtttgagaggataaacacgaaaatgtggttttggggaagtaggatttcaggaaaatttctgcatcacctgtattttttttaaaattttgaaatccatgagcatttatcagtcagactcacattatgagattatacttcttaaaatttttattgatgtaaaagaattgtacatatttatagggttatacttcttttatctttactgttgaataaggagcctaaaggtagggtccatgttttgtacatacttctctgtattcttataataagaattggaaaaaaaataaaccaaaacaactaaaaccaaaaaatgtgtgggaagtcactaacaatgtttagaaatattaagtgagaaaagcaggttaaaaggcagtattttacatatttaatattagtgcccttagtacgtgtattctgcgtcttaaaatgaaaatgctccactgtcaatggttgttttctcttggtattgtaatcagtcggtagtttttattttctttgtattttccttatttgtgtgtattacataagaaagcagaaaaaaatagaatatttataattattaaagattgaagttcttaggtgctttcagtaacattatcctcacctttggggtcgtggctgcctatctggagtgctgtcttgttaaggattaagatgagtggctgaggatttgcacttctgtaagtggctgcttcatcctttgacacctgcgctgatcatttgtgtgcgctgcacctccttcaggtgctgcactatctggcaatccagaaacctgcagaccttgctcggcacctgttaccttgtgtgattcatgcagctgtactcaaggtaaaggaagaagaaagtctcgaaaacatttcttcagttaagaagatcataaagcagataatatcccattccagtaaagttttgcacttccccaatccagaagacaagaaattggaagaaatcattcaccagattactaatgtggaagctctcattgccagagctcggtcactaaaagccaagtttggaactgagaaatgtgaacaggaggaggaaaaggaagatcttgaaaggtttgtgagttgcctgctggagcagcctgaagtgttagtcaccggtgcaggaagaggacatgctggcaggatcattcacaagctgtttgtgaatgcccagagggctgcagctatgactccaccagaggaggaattgaagagaatgggctccccagaggaaagaaggcagaactccgtgtcagacttcccaccccctgctggccgggaattcattttgcgcaccactgtgccgcgccctgctccctactccaaagctctgcctcagcggatgtacagtgttctcaccaaagaggactttagacttgcagttaaaataatcgatggggatgtgtagcccccccgtgtgaggatgacatcaccacatttctagtttcatggagctcaagatgtcttgtgtctgtgtggctagatggcctctgcttggtaatcttatttttaggcctaaaattcccacttaaatccaaagtaaaaatggttatactgaagcataaaccttgcctgtgtaattttaaaaaattaatagagctgtgcaaaccctgttatttttgtaaaaaaaaaaaaaaatacatatctatatataatatgtgtgtgtgtgtgacatatgcacacgtctctgtgtatgtgaagtaggggaggccctgggggatgacctcccagcctttatgatgcttttctctatgctgctggacttcattcttactggtccacgcagatgcaggcggcctgaggccagtgctgtaccaagtagaagacggttcctaaggacagagtttgtctgttttctaacaaagaaaaattctacaaaggagaggttgggcgttacaaaggcattgtgaatctaataaaaggaaagtgtcgctttaaaaaaaaaaa

SEQ ID NO: 629 - DNA, 574 bp, Homo sapiens
cctttctaactccgctgccgccatggctcctgtgaaaaagcttgtggtgaaggggggcaaaaaaaagaagcaagttctgaagttcactcttgattgcacccaccctgtagaagatggaatcatggatgctgccaattttgagcagtttttgcaagaaaggatcaaagtgaacggaaaagctgggaaccttggtggaggggtggtgaccatcgaaaggagcaagagcaagatcaccgtgacatccgaggtgcctttctccaaaaggtatttgaaatatctcaccaaaaaatatttgaagaagaataatctacgtgactggttgcgcgtagttgctaacagcaaagagagttacgaattacgttacttccagattaaccaggacgaagaagaggaggaagacgaggattaaatttcatttatctggaaaattttgtatgagttcttgaataaaacttgggaaccaaaatggtggtttatccttgtatctctgcagtgtggattgaacagaaaattggaaatcatagtcaaagggcttcccttggttcgccactcatttatttgtaacttgacttct

SEQ ID NO: 630 - protein, 128 aa, Homo sapiens [sequence omitted]

SEQ ID NO: 631 - DNA, 3600 bp, Homo sapiens
cccagactccagccctggaccgcgcatcccgagcccagcgcccagacagagtgtccccacaccctcctctgagacgccatgttcaactcgatgaccccaccaccaatcagtagctatggcgagccctgctgtctccggcccctccccagtcagggggcccccagtgtggggacagaaggactgtctggcccgcccttctgccaccaagctaacctcatgtccggcccccacagttatgggccagccagagagaccaacagctgcaccgagggcccactcttttcttctccccggagtgcagtcaagttgaccaagaagcgggcactgtccatctcacctctgtcggatgccagcctggacctgcagacggttatccgcacctcacccagctccctcgtagctttcatcaactcgcgatgcacatctccaggaggctcctacggtcatctctccattggcaccatgagcccatctctgggattcccagcccagatgaatcaccaaaaagggccctcgccttcctttggggtccagccttgtggtccccatgactctgcccggggtgggatgatcccacatcctcagtcccggggacccttcccaacttgccagctgaagtctgagctggacatgctggttggcaagtgccgggaggaacccttggaaggtgatatgtccagccccaactccacaggcatacaggatcccctgttggggatgctggatgggcgggaggacctcgagagagaggagaagcgtgagcctgaatctgtgtatgaaactgactgccgttgggatggctgcagccaggaatttgactcccaagagcagctggtgcaccacatcaacagcgagcacatccacggggagcggaaggagttcgtgtgccactgggggggctgctccagggagctgaggcccttcaaagcccagtacatgctggtggttcacatgcgcagacacactggcgagaagccacacaagtgcacgtttgaagggtgccggaagtcatactcacgcctcgaaaacctgaagacgcacctgcggtcacacacgggtgagaagccatacatgtgtgagcacgagggctgcagtaaagccttcagcaatgccagtgaccgagccaagcaccagaatcggacccattccaatgagaagccgtatgtatgtaagctccctggctgcaccaaacgctatacagatcctagctcgctgcgaaaacatgtcaagacagtgcatggtcctgacgcccatgtgaccaaacggcaccgtggggatggccccctgcctcgggcaccatccatttctacagtggagcccaagagggagcgggaaggaggtcccatcagggaggaaagcagactgactgtgccagagggtgccatgaagccacagccaagccctggggcccagtcatcctgcagcagtgaccactccccggcagggagtgcagccaatacagacagtggtgtggaaatgactggcaatgcagggggcagcactgaagacctctccagcttggacgagggaccttgcattgctggcactggtctgtccactcttcgccgccttgagaacctcaggctggaccagctacatcaactccggccaatagggacccggggtctcaaactgcccagcttgtcccacaccggtaccactgtgtcccgccgcgtgggccccccagtctctcttgaacgccgcagcagcagctccagcagcatcagctctgcctatactgtcagccgccgctcctccctggcctctcctttcccccctggctccccaccagagaatggagcatcctccctgcctggccttatgcctgcccagcactacctgcttcgggcaagatatgcttcagccagagggggtggtacttcgcccactgcagcatccagcctggatcggataggtggtcttcccatgcctccttggagaagccgagccgagtatccaggatacaaccccaatgcaggggtcacccggagggccagtgacccagcccaggctgctgaccgtcctgctccagctagagtccagaggttcaagagcctgggctgtgtccataccccacccactgtggcagggggaggacagaactttgatccttacctcccaacctctgtctactcaccacagccccccagcatcactgagaatgctgccatggatgctagagggctacaggaagagccagaagttgggacctccatggtgggcagtggtctgaacccctatatggacttcccacctactgatactctgggatatgggggacctgaaggggcagcagctgagccttatggagcgaggggtccaggctctctgcctcttgggcctggtccacccaccaactatggccccaacccctgtccccagcaggcctcatatcctgaccccacccaagaaacatggggtgagttcccttcccactctgggctgtacccaggccccaaggctctaggtggaacctacagccagtgtcctcgacttgaacattatggacaagtgcaagtcaagccagaacaggggtgcccagtggggtctgactccacaggactggcaccctgcctcaatgcccaccccagtgaggggcccccacatccacagcctctcttttcccattacccccagccctctcctccccaatatctccagtcaggcccctatacccagccaccccctgattatcttccttcagaacccaggccttgcctggactttgattcccccacccattccacagggcagctcaaggctcagcttgtgtgtaattatgttcaatctcaacaggagctactgtgggagggtgggggcagggaagatgcccccgcccaggaaccttcctaccagagtcccaagtttctggggggttcccaggttagcccaagccgtgctaaagctccagtgaacacatatggacctggctttggacccaacttgcccaatcacaagtcaggttcctatcccaccccttcaccatgccatgaaaattttgtagtgggggcaaatagggcttcacatagggcagcagcaccacctcgacttctgcccccattgcccacttgctatgggcctctcaaagtgggaggcacaaaccccagctgtggtcatcctgaggtgggcaggctaggagggggtcctgccttgtaccctcctcccgaaggacaggtatgtaaccccctggactctcttgatcttgacaacactcagctggactttgtggctattctggatgagccccaggggctgagtcctcctccttcccatgatcagcggggcagctctggacataccccacctccctctgggccccccaacatggctgtgggcaacatgagtgtcttactgagatccctacctggggaaacagaattcctcaactctagtgcctaaagagtagggaatctcatccatcacagatcgcatttcctaaggggtttctatccttccagaaaaattgggggagctgcagtcccctgcacaagatgccccagggatgggaggtatgggctgggggctatgtatagtctgtatacgttttgaggagaaatttgataatgacactgtttcctgataataaaggaactgcatcag

SEQ ID NO: 632 - protein, 1106 aa, Homo sapiens
MFNSMTPPPISSYGEPCCLRPLPSQGAPSVGTEGLSGPPFCHQANLMSGPHSYGPARETNSCTEGPLFSSPRSAVKLTKKRALSISPLSDASLDLQTVIRTSPSSLVAFINSRCTSPGGSYGHLSIGTMSPSLGFPAQMNHQKGPSPSFGVQPCGPHDSARGGMIPHPQSRGPFPTCQLKSELDMLVGKCREEPLEGDMSSPNSTGIQDPLLGMLDGREDLEREEKREPESVYETDCRWDGCSQEFDSQEQLVHHINSEHIHGERKEFVCHWGGCSRELRPFKAQYMLVVHMRRHTGEKPHKCTFEGCRKSYSRLENLKTHLRSHTGEKPYMCEHEGCSKAFSNASDRAKHQNRTHSNEKPYVCKLPGCTKRYTDPSSLRKHVKTVHGPDAHVTKRHRGDGPLPRAPSISTVEPKREREGGPIREESRLTVPEGAMKPQPSPGAQSSCSSDHSPAGSAANTDSGVEMTGNAGGSTEDLSSLDEGPCIAGTGLSTLRRLENLRLDQLHQLRPIGTRGLKLPSLSHTGTTVSRRVGPPVSLERRSSSSSSISSAYTVSRRSSLASPFPPGSPPENGASSLPGLMPAQHYLLRARYASARGGGTSPTAASSLDRIGGLPMPPWRSRAEYPGYNPNAGVTRRASDPAQAADRPAPARVQRFKSLGCVHTPPTVAGGGQNFDPYLPTSVYSPQPPSITENAAMDARGLQEEPEVGTSMVGSGLNPYMDFPPTDTLGYGGPEGAAAEPYGARGPGSLPLGPGPPTNYGPNPCPQQASYPDPTQETWGEFPSHSGLYPGPKALGGTYSQCPRLEHYGQVQVKPEQGCPVGSDSTGLAPCLNAHPSEGPPHPQPLFSHYPQPSPPQYLQSGPYTQPPPDYLPSEPRPCLDFDSPTHSTGQLKAQLVCNYVQSQQELLWEGGGREDAPAQEPSYQSPKFLGGSQVSPSRAKAPVNTYGPGFGPNLPNHKSGSYPTPSPCHENFVVGANRASHRAAAPPRLLPPLPTCYGPLKVGGTNPSCGHPEVGRLGGGPALYPPPEGQVCNPLDSLDLDNTQLDFVAILDEPQGLSPPPSHDQRGSSGHTPPPSGPPNMAVGNMSVLLRSLPGETEFLNSSA

SEQ ID NO: 633 - DNA, 1449 bp, Homo sapiens
cttttcctgtggcagcagccgggctgagaggagcgtggctgtctcctctctccgccatggcgtgtgctcgcccactgatatcggtgtactccgaaaagggggagtcatctggcaaaaatgtcactttgcctgctgtattcaaggctcctattcgaccagatattgtgaactttgttcacaccaacttgcgcaaaaacaacagacagccctatgctgtcagtgaattagcaggtcatcagactagtgctgagtcttggggtactggcagagctgtggctcgaattcccagagttcgaggtggtgggactcaccgctctggccagggtgcttttggaaacatgtgtcgtggaggccgaatgtttgcaccaaccaaaacctggcgccgttggcatcgtagagtgaacacaacccaaaaacgatacgccatctgttctgccctggctgcctcagccctaccagcactggtcatgtctaaaggtcatcgtattgaggaagttcctgaacttcctttggtagttgaagataaagttgaaggctacaagaagaccaaggaagctgttttgctccttaagaaacttaaagcctggaatgatatcaaaaaggtctatgcctctcagcgaatgagagctggcaaaggcaaaatgagaaaccgtcgccgtatccagcgcaggggcccgtgcatcatctataatgaggataatggtatcatcaaggccttcagaaacatccctggaattactctgcttaatgtaagcaagctgaacattttgaagcttgctcctggtgggcatgtgggacgtttctgcatttggactgaaagtgctttccggaagttagatgaattgtacggcacttggcgtaaagccgcttccctcaagagtaactacaatcttcccatgcacaagatgattaatacagatcttagcagaatcttgaaaagcccagagatccaaagagcccttcgagcaccacgcaagaagatccatcgcagagtcctaaagaagaacccactgaaaaacttgagaatcatgttgaagctaaacccatatgcaaagaccatgcgccggaacaccattcttcgccaggccaggaatcacaagctccgggtggataaggcagctgctgcagcagcggcactacaagccaaatcagatgagaaggcggcggttgcaggcaagaagcctgtggtaggtaagaaaggaaagaaggctgctgttggtgttaagaagcagaagaagcctctggtgggaaaaaaggcagcagctaccaagaaaccagcccctgaaaagaagcctgcagagaagaaacctactacagaggagaagaagcctgctgcataaactcttaaatttgattattccataaaggtcaaatcattttggacagcttcttttgaataaagacctgattatacaggcagtgagaaacatgaaaaaaaaaaaaaaaaaa

SEQ ID NO: 634 - protein, 427 aa, Homo sapiens [sequence omitted]

SEQ ID NO: 635 - DNA, 6619 bp, Homo sapiens
gaattcccttacaaacgcctccagcttgtagaggcggtcgtggaggacccagaggaggagacgaaggggaaggaggcggtggtggaggaggcaaaggccttggacgaccattgttggcgaggggcaccactccgggagaggcggcgctgggcgtcttgggggtgcgcgccgggagcctgcagcgggaccagcgtgggaacgcggctggcaggctgtggacctcgtcctcaccaccatggtcgggctccttttgttttttttcccagcgatctttttggaggtgtcccttctccccagaagccccggcaggaaagtgttgctggcaggagcgtcgtctcagcgctcggtggccagaatggacggagatgtcatcattggagccctcttctcagtccatcaccagcctccggccgagaaagtgcccgagaggaagtgtggggagatcagggagcagtatggcatccagagggtggaggccatgttccacacgttggataagatcaacgcggacccggtcctcctgcccaacatcaccctgggcagtgagatccgggactcctgctggcactcttccgtggctctggaacagagcattgagttcattagggactctctgatttccattcgagatgagaaggatgggatcaaccggtgtctgcctgacggccagtccctccccccaggcaggactaagaagcccattgcgggagtgatcggtcccggctccagctctgtagccattcaagtgcagaacctgctccagctcttcgacatcccccagatcgcttattcagccacaagcatcgacctgagtgacaaaactttgtacaaatacttcctgagggttgtcccttctgacactttgcaggcaagggccatgcttgacatagtcaaacgttacaattggacctatgtctctgcagtccacacggaagggaattatggggagagcggaatggacgctttcaaagagctggctgcccaggaaggcctctgtatcgcccattctgacaaaatctacagcaacgctggggagaagagctttgaccgactcttgcgcaaactccgagagaggcttcccaaggctagagtggtggtctgcttctgtgaaggcatgacagtgcgaggactcctgagcgccatgcggcgccttggcgtcgtgggcgagttctcactcattggaagtgatggatgggcagacagagatgaagtcattgaaggttatgaggtggaagccaacgggggaatcacgataaagctgcagtctccagaggtcaggtcatttgatgattatttcctgaaactgaggctggacactaacacgaggaatccctggttccctgagttctggcaacatcggttccagtgccgccttccaggacaccttctggaaaatcccaactttaaacgaatctgcacaggcaatgaaagcttagaagaaaactatgtccaggacagtaagatggggtttgtcatcaatgccatctatgccatggcacatgggctgcagaacatgcaccatgccctctgccctggccacgtgggcctctgcgatgccatgaagcccatcgacggcagcaagctgctggacttcctcatcaagtcctcattcattggagtatctggagaggaggtgtggtttgatgagaaaggagacgctcctggaaggtatgatatcatgaatctgcagtacactgaagctaatcgctatgactatgtgcacgttggaacctggcatgaaggagtgctgaacattgatgattacaaaatccagatgaacaagagtggagtggtgcggtctgtgtgcagtgagccttgcttaaagggccagattaaggttatacggaaaggagaagtgagctgctgctggatttgcacggcctgcaaagagaatgaatatgtgcaagatgagttcacctgcaaagcttgtgacttgggatggtggcccaatgcagatctaacaggctgtgagcccattcctgtgcgctatcttgagtggagcaacatcgaatccattatagccatcgccttttcatgcctgggaatccttgttaccttgtttgtcaccctaatctttgtactgtaccgggacacaccagtggtcaaatcctccagtcgggagctctgctacatcatcctagctggcatcttccttggttatgtgtgcccattcactctcattgccaaacctactaccacctcctgctacctccagcgcctcttggttggcctctcctctgcgatgtgctactctgctttagtgactaaaaccaatcgtattgcacgcatcctggctggcagcaagaagaagatctgcacccggaagcccaggttcatgagtgcctgggctcaggtgatcattgcctcaattctgattagtgtgcaactaaccctggtggtaaccctgatcatcatggaaccccctatgcccattctgtcctacccaagtatcaaggaagtctaccttatctgcaataccagcaacctgggtgtggtggcccctttgggctacaatggactcctcatcatgagctgtacctactatgccttcaagacccgcaacgtgcccgccaacttcaacgaggccaaatatatcgcgttcaccatgtacaccacctgtatcatctggctagcttttgtgcccatttactttgggagcaactacaagatcatcacaacttgctttgcagtgagtctcagtgtaacagtggctctggggtgcatgttcactcccaagatgtacatcattattgccaagcctgagaggaatgtccgcagtgccttcaccacctctgatgttgtccgcatgcatgttggcgatggcaagctgccctgccgctccaacactttcctcaacatcttccgaagaaagaaggcaggggcagggaatgccaattctaatggcaagtctgtgtcatggtctgaaccaggtggaggacaggtgcccaagggacagcatatgtggcaccgcctctctgtgcacgtgaagaccaatgagacggcctgcaaccaaacagccgtcatcaaacccctcactaaaagttaccaaggctctggcaagagcctgaccttttcagataccagcaccaagaccctttacaacgtagaggaggaggaggatgcccagccgattcgctttagcccgcctggtagcccttccatggtggtgcacaggcgcgtgccaagcgcggcgaccactccgcctctgccgccccacctgaccgcagaggagacccccctcttcctggccgaaccagccctccccaagggcttgccccctcctctccagcagcagcagcaaccccctccacagcagaaatcgctgatggaccagctccagggagtggtcagcaacttcagtaccgcgatcccggattttcacgcggtgctggcaggccccgggggtcccgggaacgggctgcggtccctgtacccgcccccgccaccgccgcagcacctgcagatgctgccgctgcagctgagcacctttggggaggagctggtctccccgcccgcggacgacgacgacgacagcgagaggtttaagctcctccaggagtacgtgtatgagcacgagcgggaagggaacacggaagaagacgaactggaagaggaggaggaggacctgcaggcggccagcaaactgaccccggatgattcgcctgcgctgacgcctccgtcgcctttccgcgactcggtggcctcgggcagctcggtgcccagctccccagtgtccgagtcggtgctctgcacccctcccaacgtatcctacgcctctgtcattctgcgggactacaagcaaagctcttccaccctgtaagggggaagggtccacatagaaaagcaagacaagccagagatctcccacacctccagagatgtgcaaacagctgggaggaaaagcctgggagtggggggcctcgtcgggaggacaggagaccgctgctgctgctgccgctactgctgctgctgccttaagtaggaagagagggaaggacaccaagcaaaaaatgttcaggccaggattcggattcttgaattactcgaagccttctctgggaagaaagggaattctgacaaagcacaattccatatggtatgtaacttttatcacaaatcaaatagtgacatcacaaacataatgtcctcttttgcacaattgtgcatagatatatatatgcccacacacactgggccatgcttggcaaggaacagaccacgtggcatccagtcggatcatgagttcacctgatgcattcggagtgagctggtggagccagacagagcaggtgcggggaagggaagggccaggccagacccatcccaaacggatgatgggatgatgggacagcagttccttgctcagaagcccttctccccgctgggctgacagactcctcatcttcaggagactcaggaatggagcggtacaggggtctctcttcatccaccgcaacccatccagtgccagctttgagattgcacttgaagaaaggtgcatggaccccctgctgctctgcagattccctttatttaggaaaacaggaataagagcaaaattatcaccaaaaagtgcttcatcaggcgtgctacaggaggaaggagctagaaatagaacaatccatcagcatgagactttgaaaaaaaaaacacatgatcagcttctcatgttccatattcacttattggcgatttggggaaaaggccggaacaagagattgttacgagagtggcagaaacccttttgtagattgacttgtgtttgtgccaagcgggctttccattgaccttcagttaaagaacaaaccatgtgacaaaattgttaccttccacttactgtagcaaataatacctacaagttgaacttctaagatgcgtatatgtacaatttggtgccattatttctcctacgtattagagaaacaaatccatctttgaatctaatggtgtactcatagcaactattactggtttaaatgacaaataattctatcctattgtcactgaagtccttgtaactagcgagtgaatgtgttcctgtgtccttgtatatgtgcgatcgtaaaatttgtgcaatgtaatgtcaaattgacctgtcaatgtcaacctagtagtcaatctaactgcaattagaaattgtcttttgaatatactatatatattttttatgttccaataatgttttatacatcattgtcatcaatatctacagaagctctttgacggtttgaatactatggctcaaggttttcatatgcagctcggatggacatttttcttctaagatggaacttatttttcagatattttctgatgtggagatatgttattaatgaagtggtttgaaaatttgttatattaaaagtgcacaaaaactgagagtgaaaataaaaggtacattttataagcttgcacacattattaacacataagattgaacaaagcatttagattattccaggttatatcatttttttaaagattttccacagctacttgagtgtctaacatacagtaacatctaactcagctaataatttgtaaaatctttatcaatcacattgtggcctcttttaatttttatgttcatggacttttattcctgtgtcttggctgtcataactttttatttctgctatttgctgttgtgtaatatccatggacatgtaatccacttactccatctttacaatccctttttaccaccaataaaaggattttttcttgctgttttgatttcttctattatttgtggaatgaattataccccccttaaatatctttgtttatgccttatgttcagtcatattttaatatgcttccttcatattgaagctgctgatttctcagccaaaaatcatcttagaatctttaaatatccattgcatcatttgttcagaatttaacatccattccaatgttggaggcttgtattacttatatttcatcatattctattgccaagtttagtcagttccacaccaagaatgaactgcatttcctttaaaaattattttaaaacacctttattgaaaagatctcatgactgagatgtggactttggttccatgttttcattgtaagaaagcagagagcggaaaatcaatggctccagtgattaatagatgggtttttagtaattgacaaattcatgagggaaagcatatgatctctttattagtgaatcatgcttattttttactcttaacgccactaatatacatccctaatatcacagggcttgtgcattcagatttttaaaaaattaggatagataaggaaacaacttatattcaagtgtaagatgatatcaggttggtctaagacttttggtgaacacgttcattcaactgtgatcactttattactctgaatgcctactattatcctgattatggggtctcctgaataaatagagtattagtctttatgtcatcattgttcaaaattggagatgtacacatacataccctataccaagagggccgaaactcttcaccttgatgtatgttctgatacaagttgttcagcttcttgtaaatgtgttttccttcggcttgttactgccttttgtcaaataatcttgacaatgctgtataataaatattttctatttatt

SEQ ID NO: 636 - protein, 1194 aa, Homo sapiens
MVGLLLFFFPAIFLEVSLLPRSPGRKVLLAGASSQRSVARMDGDVIIGALFSVHHQPPAEKVPERKCGEIREQYGIQRVEAMFHTLDKINADPVLLPNITLGSEIRDSCWHSSVALEQSIEFIRDSLISIRDEKDGINRCLPDGQSLPPGRTKKPIAGVIGPGSSSVAIQVQNLLQLFDIPQIAYSATSIDLSDKTLYKYFLRVVPSDTLQARAMLDIVKRYNWTYVSAVHTEGNYGESGMDAFKELAAQEGLCIAHSDKIYSNAGEKSFDRLLRKLRERLPKARVVVCFCEGMTVRGLLSAMRRLGVVGEFSLIGSDGWADRDEVIEGYEVEANGGITIKLQSPEVRSFDDYFLKLRLDTNTRNPWFPEFWQHRFQCRLPGHLLENPNFKRICTGNESLEENYVQDSKMGFVINAIYAMAHGLQNMHHALCPGHVGLCDAMKPIDGSKLLDFLIKSSFIGVSGEEVWFDEKGDAPGRYDIMNLQYTEANRYDYVHVGTWHEGVLNIDDYKIQMNKSGVVRSVCSEPCLKGQIKVIRKGEVSCCWICTACKENEYVQDEFTCKACDLGWWPNADLTGCEPIPVRYLEWSNIESIIAIAFSCLGILVTLFVTLIFVLYRDTPVVKSSSRELCYIILAGIFLGYVCPFTLIAKPTTTSCYLQRLLVGLSSAMCYSALVTKTNRIARILAGSKKKICTRKPRFMSAWAQVIIASILISVQLTLVVTLIIMEPPMPILSYPSIKEVYLICNTSNLGVVAPLGYNGLLIMSCTYYAFKTRNVPANFNEAKYIAFTMYTTCIIWLAFVPIYFGSNYKIITTCFAVSLSVTVALGCMFTPKMYIIIAKPERNVRSAFTTSDVVRMHVGDGKLPCRSNTFLNIFRRKKAGAGNANSNGKSVSWSEPGGGQVPKGQHMWHRLSVHVKTNETACNQTAVIKPLTKSYQGSGKSLTFSDTSTKTLYNVEEEEDAQPIRFSPPGSPSMVVHRRVPSAATTPPLPPHLTAEETPLFLAEPALPKGLPPPLQQQQQPPPQQKSLMDQLQGVVSNFSTAIPDFHAVLAGPGGPGNGLRSLYPPPPPPQHLQMLPLQLSTFGEELVSPPADDDDDSERFKLLQEYVYEHEREGNTEEDELEEEEEDLQAASKLTPDDSPALTPPSPFRDSVASGSSVPSSPVSESVLCTPPNVSYASVILRDYKQSSSTL

SEQ ID NO: 637 - DNA, 3556 bp, Homo sapiens
tgttgggtgggagcacaggcaccgggcaccatggggaaggccgagaactatgagctctactcggtggagctgggtcctggccctggcggggacatggctgccaagatgagcaagaagaagaaggcgggtggcgggggtggcaagaggaaggagaagctggagaacatgaagaaggagatggagattaacgaccaccagctgtcagtggcggagctggaacagaaataccagaccagtgccaccaagggcctctctgcgagcctggctgctgagctgctgctgcgggatgggcccaacgcactgcggccaccacggggcaccccagagtacgtcaagttcgcgaggcagctggccgggggcctgcagtgcctcatgtgggttgccgccgccatctgcctcatcgcctttgccatccaggctagtgagggggacctcaccaccgacgacaatctgtacctggcaatcgctctcattgctgtggttgtcgtcaccggctgctttggctactaccaggaattcaagagcaccaacatcatcgccagctttaagaaccttgtgccacagcaagccactgtcatccgcgatggagacaaattccagatcaacgctgaccaactggtggtgggcgacctggtggagatgaaaggtggggacagagtgcccgccgacatccgcatcctggcggcccagggctgcaaggtggacaactcctcgctgacaggggagtctgagccacaaacccgctcacccgagtgcacgcacgagagccctctggagacccgcaacatcgccttcttctccaccatgtgccttgagggcaccgcgcagggcctggtggtgaacacgggcgaccgcaccatcattgggcgcatcgcatcgctggcgtcgggggtggaaaacgagaagacacccatcgctatcgagatcgagcattttgtggacatcatcgcgggcctggccattctcttcggtgccacattttttattgtggccatgtgcattggctacaccttcctgcgggccatggtcttcttcatggccatcgtggtggcctatgtgcctgaggggctgctggccactgtcacagtctgcctgtccctgacagccaagcgcctggccagtaagaactgcgtggtcaagaacctggaggcggtggagacattgggctccacttcggtgatctgctcggacaagacagggactctcactcagaaccgcatgactgtgtcccatctgtggtttgacaaccacatccacacagctgacaccacggaagaccagtcagggcagacgtttgaccagtcctcggagacgtggcgggcgctgtgccgggtgctcaccctgtgcaaccgcgccgccttcaagtccggccaggatgcagtgcctgtgcccaagcgcatcgtgattggagacgcatcggagacggcgctgctcaagttctcggagctgacgctgggcaacgccatgggctaccgggaccgcttcccaaaagtctgcgagatacccttcaactccaccaacaagttccagctgtccatccatacgctggaggacccgcgggacccgcgacacttgctggtgatgaagggcgcccccgagcgcgtgctggagcgctgcagctccatccttatcaagggccaggagctgccgctggacgagcagtggcgcgaggccttccagaccgcctacctcagcctgggaggcctgggcgaacgcgtgctcggcttctgccagctctacctgaatgagaaggactacccgcctggctatgccttcgacgtagaggccatgaactttccatctagcggcctctgctttgcgggacttgtatccatgattgacccaccccgggccaccgtccctgatgctgtgctcaagtgtcgcaccgcaggcatccgggtgatcatggtaacgggtgaccaccccatcaccgccaaggccattgcagccagtgtgggcatcatctcggaaggcagcgagacagtggaggacatcgctgcccgcctccgtgtgcccgtagaccaggttaatcgcaaggatgcccgtgcctgtgtgatcaatggcatgcagctgaaggacatggacccatcggaactggtcgaggccctgcgcacccaccccgagatggtgtttgcgcgcaccagcccccagcagaagctggtgatcgtggagagctgccagcggctgggtgcgattgtggccgtcacgggggatggtgtgaatgactccccagctctgaagaaggcagacatcggagtagccatgggcatcgctggctcagatgctgccaaaaatgcagctgacatgatcctgctggatgacaactttgcctccattgtgacaggcgtggagcagggtcgactgatcttcgacaacctgaagaagtctattgcctacacattgaccaagaacatcccagagctgacaccctacctcatctacatcaccgtcagcgtgcccctgcccctcgggtgcatcaccatcctcttcatcgaactctgcactgacattttcccatctgtgtccctggcatatgaaaaggccgagagtgacatcatgcacctgcgtccacgcaacccaaagcgtgacagattggtcaacgagcccctggctgcctactcctacttccagattggtgccattcagtcctttgctggcttcactgactacttcacggcaatggcccaggagggctggttcccactgctgtgcgtggggctgcgggcgcagtgggaggaccaccacctacaagatctgcaggacagctacggccaggagtggacattcgggcagcgcctgtaccagcagtacacctgctacaccgtgttcttcatcagcattgaggtgtgccagatcgccgatgtcctcatccgcaagacgcgccgtctctctgccttccagcaaggcttcttcaggaataagatcctggtgatcgccatcgtgttccaggtctgcatcggctgcttcctgtgctactgccccggcatgcccaacatcttcaacttcatgcccattcggttccagtggtggctggtccccctgccctacggcatcctcatcttcgtctatgatgagatccggaagcttggagttcgctgttgcccagggagctggtgggaccaggaactctactattagagggacgactgccttcaagcatccctgcaactgccacagcaggtgggggcagggcacgtgggaccctctggacagccaccaagatatctgagcaaccaagagtcccagccccaccagtatctgcttctgtagcccacggcaccccaaacttggagggacctgcccactcccctcccccattcccaaggttcgcacctcctggagcagcagcgcctgggcagtcctctgggctggcctcgggaaagccgccacctgtggtggcggtggggctctgacagggagtacagctgaccgcttctggagggtgtttctgttcttaggactccagtccaggctggacggctgcctgagggcccttcgttaaagacacgcttgtgtcctgggcgatggtaataaaaccagctcatgctgactgtgc

SEQ ID NO: 638 - protein, 1035 aa, Homo sapiens
MGKAENYELYSVELGPGPGGDMAAKMSKKKKAGGGGGKRKEKLENMKKEMEINDHQLSVAELEQKYQTSATKGLSASLAAELLLRDGPNALRPPRGTPEYVKFARQLAGGLQCLMWVAAAICLIAFAIQASEGDLTTDDNLYLAIALIAVVVVTGCFGYYQEFKSTNIIASFKNLVPQQATVIRDGDKFQINADQLVVGDLVEMKGGDRVPADIRILAAQGCKVDNSSLTGESEPQTRSPECTHESPLETRNIAFFSTMCLEGTAQGLVVNTGDRTIIGRIASLASGVENEKTPIAIEIEHFVDIIAGLAILFGATFFIVAMCIGYTFLRAMVFFMAIVVAYVPEGLLATVTVCLSLTAKRLASKNCVVKNLEAVETLGSTSVICSDKTGTLTQNRMTVSHLWFDNHIHTADTTEDQSGQTFDQSSETWRALCRVLTLCNRAAFKSGQDAVPVPKRIVIGDASETALLKFSELTLGNAMGYRDRFPKVCEIPFNSTNKFQLSIHTLEDPRDPRHLLVMKGAPERVLERCSSILIKGQELPLDEQWREAFQTAYLSLGGLGERVLGFCQLYLNEKDYPPGYAFDVEAMNFPSSGLCFAGLVSMIDPPRATVPDAVLKCRTAGIRVIMVTGDHPITAKAIAASVGIISEGSETVEDIAARLRVPVDQVNRKDARACVINGMQLKDMDPSELVEALRTHPEMVFARTSPQQKLVIVESCQRLGAIVAVTGDGVNDSPALKKADIGVAMGIAGSDAAKNAADMILLDDNFASIVTGVEQGRLIFDNLKKSIAYTLTKNIPELTPYLIYITVSVPLPLGCITILFIELCTDIFPSVSLAYEKAESDIMHLRPRNPKRDRLVNEPLAAYSYFQIGAIQSFAGFTDYFTAMAQEGWFPLLCVGLRAQWEDHHLQDLQDSYGQEWTFGQRLYQQYTCYTVFFISIEVCQIADVLIRKTRRLSAFQQGFFRNKILVIAIVFQVCIGCFLCYCPGMPNIFNFMPIRFQWWLVPLPYGILIFVYDEIRKLGVRCCPGSWWDQELYY

SEQ ID NO: 639 - DNA, 1377 bp, Homo sapiens
ggccttcagccctctgtggtcccctctccccggggggctttgggattcttgtcaagctccttcaagagcctgcaagcacttaaccagccacccagagttccctcactgaagatctgagcatgacccgggacgaggcactgccggactctcattctgcacaggacttctatgagaattatgagcccaaagagatcctgggcaggggcgttagcagtgtggtcaggcgatgcatccacaagcccacgagccaggagtacgccgtgaaggtcatcgacgtcaccggtggaggcagcttcagcccggaggaggtgcgggagctgcgagaagccacgctgaaggaggtggacatcctgcgcaaggtctcagggcaccccaacatcatacagctgaaggacacttatgagaccaacactttcttcttcttggtgtttgacctgatgaagagaggggagctctttgactacctcactgagaaggtcaccttgagtgagaaggaaaccagaaagatcatgcgagctctgctggaggtgatctgcaccttgcacaaactcaacatcgtgcaccgggacctgaagcccgagaacattctcttggatgacaacatgaacatcaagctcacagactttggcttttcctgccagctggagccgggagagaggctgcgagaggtctgcgggacccccagttacctggcccctgagattatcgagtgctccatgaatgaggaccacccgggctacgggaaagaggtggacatgtggagcactggcgtcatcatgtacacgctgctggccggctccccgcccttctggcaccggaagcagatgctgatgctgaggatgatcatgagcggcaactaccagtttggctcgcccgagtgggatgattactcggacaccgtgaaggacctggtctcccgattcctggtggtgcaaccccagaaccgctacacagcggaagaggccttggcacaccccttcttccagcagtacttggtggaggaagtgcggcacttcagcccccgggggaagttcaaggtgatcgctctgaccgtgctggcttcagtgcggatctactaccagtaccgccgggtgaagcctgtgacccgggagatcgtcatccgagacccctatgccctccggcctctgcgccggctcatcgacgcctacgctttccgaatctatggccactgggtgaagaaggggcagcagcagaaccgggcagcccttttcgagaacacacccaaggccgtgctcctctccctggccgaggaggactactgaggggctggccagtcagggagggctagggggcaggtggggaggggaagccatggaaatacaagtcaaaggggtaaaaaaaaaaaaaaaaaaaaaa

SEQ ID NO: 640 - protein, 387 aa, Homo sapiens
MTRDEALPDSHSAQDFYENYEPKEILGRGVSSVVRRCIHKPTSQEYAVKVIDVTGGGSFSPEEVRELREATLKEVDILRKVSGHPNIIQLKDTYETNTFFFLVFDLMKRGELFDYLTEKVTLSEKETRKIMRALLEVICTLHKLNIVHRDLKPENILLDDNMNIKLTDFGFSCQLEPGERLREVCGTPSYLAPEIIECSMNEDHPGYGKEVDMWSTGVIMYTLLAGSPPFWHRKQMLMLRMIMSGNYQFGSPEWDDYSDTVKDLVSRFLVVQPQNRYTAEEALAHPFFQQYLVEEVRHFSPRGKFKVIALTVLASVRIYYQYRRVKPVTREIVIRDPYALRPLRRLIDAYAFRIYGHWVKKGQQQNRAALFENTPKAVLLSLAEEDY

SEQ ID NO: 641 - DNA, 1323 bp, Homo sapiens
atccagccaggtgggagccccgcagatgaggtctctgaaggtgtgcctgaaccagtgccaacctgccctgtctgcagcatcggcctgatggggtggtgactgatccctcagggctccggagccatgtggcccaacggcagttccctggggccctgtttccggcccacaaacattaccctggaggagagacggctgatcgcctcgccctggttcgccgcctccttctgcgtggtgggcctggcctccaacctgctggccctgagcgtgctggcgggcgcgcggcaggggggttcgcacacgcgctcctccttcctcaccttcctctgcggcctggtcctcaccgacttcctggggctgctggtgaccggtaccatcgtggtgtcccagcacgccgcgctcttcgagtggcacgccgtggaccctggctgccgtctctgtcgcttcatgggcgtcgtcatgatcttcttcggcctgtccccgctgctgctgggggccgccatggcctcagagcgctacctgggtatcacccggcccttctcgcgcccggcggtcgcctcgcagcgccgcgcctgggccaccgtggggctggtgtgggcggccgcgctggcgctgggcctgctgcccctgctgggcgtgggtcgctacaccgtgcaatacccggggtcctggtgcttcctgacgctgggcgccgagtccggggacgtggccttcgggctgctcttctccatgctgggcggcctctcggtcgggctgtccttcctgctgaacacggtcagcgtggccaccctgtgccacgtctaccacgggcaggaggcggcccagcagcgtccccgggactccgaggtggagatgatggctcagctcctggggatcatggtggtggccagcgtgtgttggctgccccttctggtcttcattgcccagacagtgctgcgaaacccgcctgccatgagccccgccgggcagctgtcccgcaccacggagaaggagctgctcatctacttgcgcgtggccacctggaaccagatcctggacccctgggtgtatatcctgttccgccgcgccgtgctccggcgtctccagcctcgcctcagcacccggcccaggtcgctgtccctccagccccagctcacgcagcgctccgggctgcagtaggaagtggacagagcgcccctcccgcgcctttccgcggagcccttggcccctcggacagcccatctgcctgttctgaggattcaggggctgggggtgctggatggacagtgggcatcagcagcagggttttgggttgaccccaatccaacccggggacccccaactcct

SEQ ID NO: 642 - protein, 343 aa, Homo sapiens
MWPNGSSLGPCFRPTNITLEERRLIASPWFAASFCVVGLASNLLALSVLAGARQGGSHTRSSFLTFLCGLVLTDFLGLLVTGTIVVSQHAALFEWHAVDPGCRLCRFMGVVMIFFGLSPLLLGAAMASERYLGITRPFSRPAVASQRRAWATVGLVWAAALALGLLPLLGVGRYTVQYPGSWCFLTLGAESGDVAFGLLFSMLGGLSVGLSFLLNTVSVATLCHVYHGQEAAQQRPRDSEVEMMAQLLGIMVVASVCWLPLLVFIAQTVLRNPPAMSPAGQLSRTTEKELLIYLRVATWNQILDPWVYILFRRAVLRRLQPRLSTRPRSLSLQPQLTQRSGLQ

SEQ ID NO: 643 - DNA, 618 bp, Homo sapiens
cttttgcgggtggcggcgaacgcggagagcacgccatgaaggcctcgggcacgctacgagagtacaaggtagtgggtcgctgcctgcccacccccaaatgccacacgccgcccctctaccgcatgcgaatctttgcgcctaatcatgtcgtcgccaagtcccgcttctggtactttgtatctcagttaaagaagatgaagaagtcttcaggggagattgtctactgtgggcaggtgtttgagaagtcccccctgcgggtgaagaacttcgggatctggctgcgctatgactcccggagcggcacccacaacatgtaccgggaataccgggacctgaccaccgcaggcgctgtcacccagtgctaccgagacatgggtgcccggcaccgcgcccgagcccactccattcagatcatgaaggtggaggagatcgcggccagcaagtgccgccggccggctgtcaagcagttccacgactccaagatcaagttcccgctgccccaccgggtcctgcgccgtcagcacaagccacgcttcaccaccaagaggcccaacaccttcttctaggtgcagggccctcgtccgggtgtgccccaaataaactcaggaacgccccggt

SEQ ID NO: 644 - protein, 176 aa, Homo sapiens [sequence omitted]

SEQ ID NO: 645 - DNA, 2478 bp, Homo sapiens
ctcagcttctttgcgtaaccaatactggaaggcatttaaaggacctctgccgcctcagaccttgcagttaactccgccctgacccacccttcccgatgcagtccctgatgcaggctcccctcctgatcgccctgggcttgcttctcgcgacccctgcgcaagcccacctgaaaaagccatcccagctcagtagcttttcctgggataactgtgatgaagggaaggaccctgcggtgatcagaagcctgactctggagcctgaccccatcgtcgttcctggaaatgtgaccctcagtgtcgtgggcagcaccagtgtccccctgagttctcctctgaaggtggatttagttttggagaaggaggtggctggcctctggatcaagatcccatgcacagactacattggcagctgtacctttgaacacttctgtgatgtgcttgacatgttaattcctactggggagccctgcccagagcccctgcgtacctatgggcttccttgccactgtcccttcaaagaaggaacctactcactgcccaagagcgaattcgttgtgcctgacctggagctgcccagttggctcaccaccgggaactaccgcatagagagcgtcctgagcagcagtgggaagcgtctgggctgcatcaagatcgctgcctctctaaagggcatatagcatggcatctgccacagcagaatggagcggtgtgaggaaggtcccttttcctctgttttgtgtttgccaaggccaaactcccactctctgcccccctttaatcccctttctacagtgagtccactaccctcactgaaaatcattttgtaccacttacattttaggctggggcaagcagccctgacctaagggagaatgagttggacagttcttgatagcccagggcatctgctgggctgaccacgttactcatccccgttaacattctctctaaagagcctcgttcatttccaaagcagttaaggaatgggaacagagtgttttaggacctgaagaatctttatgactctctctctttctctctttttttttttgtcactaagttaaaagcgaagtgagagtattaacgtttttgttctcctccggccccctgttacaatgaaggggcaaaagtatttgctcttagtctattcctcccttaacttctgtgactaatttttatttcctttctagatttgcccaattaatactagggtgcagtgtatcctggagaggtagggtgtgtgggggaggaatcccttgggggagatattaggagtgctctgttgtttacaaactcaggtacccgcagggcctagcaagagacttaaatgactgataagaaccgtgagaaacatgttgcttccaggcttgatttcgatttttcgctttttttttttgggacggagtctcgctttgtcaccaggctggagtgcagtggtgcaatctcacctcactgcaacctccgcctcctgggttcaagcaattctcctgcctcagcctcccaagtagcttggactacaggccctgccaccacgcccggctaatttgtgtatttttagtagagatggggtttcaccatgttggccaggatggtctcgatctcttgacctcgtgatccgtccaccttggccttgcaaagcgctggattacaggcatgagccactacacccagccgatttttcctttttgattaaagatgctattacaatgtaaatatttcttacacagaaagtcacagcacatgtgcccattgatacaaggctgctgaggcctggtctccagttggaaatataattaagggtggcagggactggagtcagttggagagtgcatagccagtctgtgaagacaactgccagatactggcaatactccagcctggtgacagagtgagactctgtctcaaaaaaaaagtttcaatgtttactcctagagaagccaaaaatccagatttgtatatgaaatcttaccattttaaaagattggcagctaattatttttttaaaaagctgtgcagtgtgatgtgtcccaaacggactggctcatgggtggccacgtcacaacctctgatctcagaccgtgcatgccttgtcctcttaagacaactcctgtggcaccgtttctccctccacagggccaaagccatagtgtccggtcccaaggacaaggctcttccagtgctaggagaggtatgagcagcctctcacctgtgagctgtggggatcacaaggctgcctgcctcagtcttggagtcctgttgggtgaatgaggcagatgggaaagagcctcaccagcagctgcttttggagcaggggtccaaggaagagagggtggcctcgacatcaaactgcctggatttttctaccaccctgttacatcataacaacttctgaaacacacaccagccctgagttctgggctcatttgaagcctggaatagcaataaatctttttaacttgcaaaaaaaaaaaaaaaaaa

SEQ ID NO: 646 - protein, 193 aa, Homo sapiens
MQSLMQAPLLIALGLLLATPAQAHLKKPSQLSSFSWDNCDEGKDPAVIRSLTLEPDPIVVPGNVTLSVVGSTSVPLSSPLKVDLVLEKEVAGLWIKIPCTDYIGSCTFEHFCDVLDMLIPTGEPCPEPLRTYGLPCHCPFKEGTYSLPKSEFVVPDLELPSWLTTGNYRIESVLSSSGKRLGCIKIAASLKGI

SEQ ID NO: 647 - DNA, 371 bp, Homo sapiens
tctttctggtctcggccgcagaagcgagatgacgaagggaacgtcatcgtttggaaagcgtcgcaataagacgcacacgttgtgccgccgctgtggctctaaggcctaccaccttcagaagtcgacctgtggcaaatgtggctaccctgccaagcgcaagagaaagtataactggagtgccaaggctaaaagacgaaataccaccggaactggtcgaatgaggcacctaaaaattgtataccgcagattcaggcatggattccgtgaaggaacaacacctaaacccaagagggcagctgttgcagcatccagttcatcttaagaatgtcaacgattagtcatgcaataaatgttctggttttaaaaaatac

SEQ ID NO: 648 - protein, 97 aa, Homo sapiens [sequence omitted]

SEQ ID NO: 649 - DNA, 2080 bp, Homo sapiens
ttttttttttttttttaacaatcggatctttcaggaactaatagagcgagaagtcactcattaccacaacagtgccacttatgtggaatctgctcccatgacccaagcacctcacaccaggtcatacctccaacatgaggatcaaatttcagcatgaaatttgaagggagaaaatacccaaactgtattcaatactaagaaactgcatatgagaatattactgtattgttaatagctataggggagggagccatgttgtagactaatcaatccatttatgttcaatttgtttatgttagaaaacctgcactttctctgatattggtagcagtgtaagttcagacttagtaataaaagaaaataactaataaaccattaatgatggggttgtcattttttgcagaagtcatatgatagacatactgtgtaaaattaaataagtcagtgtagaaaaacctccagatgccaaattttaatctgaacaaaaaattcctgctagagtaaaaccacatgaatgcattgtgtgtgaaaaattcttcatacgttcattcatcccttcataggcacatcatatctcattctggaaacaacccatatgggtgtgaggaatgcggaaagaagccatgtacatgtaaacaatgtcagaaaacttccctttctgtcacaagggttcacagagacacagtaatgcacactggaaatggacattatggttgtacaatatgtgagaaagtttttaatattcccagttcatttcagatacatcagagaaatcacactggagagaaaccctatgaatgtatggaatgtgggaaagccttaggtttttcccgttctcttaatagacataaaaggattcacactggagaaaaacgctatgaatgtaagcaatgtgggaaagccttcagtcgttccagtcaccttcgtgaccatgaaagaactcatactggagagaaaccctatgaatgtaagcactgtgggaaagccttccgttactccaattgccttcattaccatgaaagaactcacactggagagaaaccttatgtgtgcatggaatgtggcaaagctttcagttgtctcagttccttgcaaggacatataaaggctcatgctggtgaagaaccctatccatgtaagcaatgtgggaaagccttcagatacgccagttcccttcagaaacacgagaaaactcatattgcacagaaaccctatgtatgtaacaattgtggtaaaggcttcagatgttccagttcccttcgtgaccatgaaaggactcatactggagagaaaccctatgaatgtcagaaatgtggcaaagcctttagtcgtgctagtaccctttggaagcataaaaaaactcatactggagaaaagccctataaatgtaaaaaaatgtaaaggctttaatcactacagtttttgtcaaaaacatgaacagtcacatacttgagagaaactgtgaatgtaaggtgtaggaaagtacttaattttcccagatttcctcaaatacatgaaacgaatcaaactggagataaaccctatgactataagcaataaggtaaagcattcaatttttccatttctttttgaaaacttgaaaggactcactgaagaaaatccatatgaatgtttaaaatgtggtaaggcctgcagttgttccagtggtatttgatggtataacataactcattctagagaaaaactttatgaaggtatcgaatgtgagaatgccttcatttatcctataactcactcagagacacatggtaacacatactccagattgaccttataaataaaagaatgcccaccagattgaaatcctagaaatacagaaaattctgaattttaacaattactttaaaggtcatgtgaaaactcccactggaaataaatcctgtaaatgtaaatattatggaaaaccttatggaaaataattatagtacaattctcaagaaaattcactatgtgaatgagatgttttaggagctataaataaattgaatatattggttgctcatttttgaagagagtctctagaatatagattttcacttcttttgaaaaaaaaaaaaaa

SEQ ID NO: 650 - protein, 296 aa, Homo sapiens
MNALCVKNSSYVHSSLHRHIISHSGNNPYGCEECGKKPCTCKQCQKTSLSVTRVHRDTVMHTGNGHYGCTICEKVFNIPSSFQIHQRNHTGEKPYECMECGKALGFSRSLNRHKRIHTGEKRYECKQCGKAFSRSSHLRDHERTHTGEKPYECKHCGKAFRYSNCLHYHERTHTGEKPYVCMECGKAFSCLSSLQGHIKAHAGEEPYPCKQCGKAFRYASSLQKHEKTHIAQKPYVCNNCGKGFRCSSSLRDHERTHTGEKPYECQKCGKAFSRASTLWKHKKTHTGEKPYKCKKM

SEQ ID NO: 651 - DNA, 1059 bp, Homo sapiens
gctctcgtcttctgcggctctcggtgccctctccttttcgtttccggaaacatggcctccggtgtggctgtctctgatggtgtcatcaaggtgttcaacgacatgaaggtgcgtaagtcttcaacgccagaggaggtgaagaagcgcaagaaggcggtgctcttctgcctgagtgaggacaagaagaacatcatcctggaggagggcaaggagatcctggtgggcgatgtgggccagactgtcgacgatccctacgccacctttgtcaagatgctgccagataaggactgccgctatgccctctatgatgcaacctatgagaccaaggagagcaagaaggaggatctggtgtttatcttctgggcccccgagtctgcgccccttaagagcaaaatgatttatgccagctccaaggacgccatcaagaagaagctgacagggatcaagcatgaattgcaagcaaactgctacgaggaggtcaaggaccgctgcaccctggcagagaagctggggggcagtgcggtcatctccctggagggcaagcctttgtgagccccttctggccccctgcctggagcatctggcagccccacacctgcccttgggggttgcaggctgcccccttcctgccagaccggaggggctggggggatcccagcagggggaggcaatcccttcaccccagttgccaaacagaccccccaccccctggattttccttctccctccatcccttgacggttctggccttcccaaactgcttttgatcttttgattcctcttgggctgaagcagaccaagttccccccaggcaccccagttgtgggggagcctgtattttttttaacaacatccccattccccacctggtcctcccccttcccatgctgccaacttctaaccgcaatagtgactctgtgcttgtctgtttagttctgtgtataaatggaatgttgtggagatgacccctccctgtgccggctggttcctctcccttttcccctggtcacggctactcatggaagcaggaccagtaagggaccttcgattaaaaaaaaa

SEQ ID NO: 652 - protein, 166 aa, Homo sapiens
MASGVAVSDGVIKVFNDMKVRKSSTPEEVKKRKKAVLFCLSEDKKNIILEEGKEILVGDVGQTVDDPYATFVKMLPDKDCRYALYDATYETKESKKEDLVFIFWAPESAPLKSKMIYASSKDAIKKKLTGIKHELQANCYEEVKDRCTLAEKLGGSAVISLEGKPL

SEQ ID NO: 653 - DNA, 753 bp, Homo sapiens
gttttgcagacgccaccgccgaggaaaaccgtgtactattagccatggtcaaccccaccgtgttcttcgacattgccgtcgacggcgagcccttgggccgcgtctcctttgagctgtttgcagacaaggtcccaaagacagcagaaaattttcgtgctctgagcactggagagaaaggatttggttataagggttcctgctttcacagaattattccagggtttatgtgtcagggtggtgacttcacacgccataatggcactggtggcaagtccatctatggggagaaatttgaagatgagaacttcatcctaaagcatacgggtcctggcatcttgtccatggcaaatgctggacccaacacaaatggttcccagtttttcatctgcactgccaagactgagtggttggatggcaagcatgtggtgtttggcaaagtgaaagaaggcatgaatattgtggaggccatggagcgctttgggtccaggaatggcaagaccagcaagaagatcaccattgctgactgtggacaactcgaataagtttgacttgtgttttatcttaaccaccagatcattccttctgtagctcaggagagcacccctccaccccatttgctcgcagtatcctagaatctttgtgctctcgctgcagttccctttgggttccatgttttccttgttccctcccatgcctagctggattgcagagttaagtttatgattatgaaataaaaactaaataacaattgtc

SEQ ID NO: 654 - protein, 165 aa, Homo sapiens
MVNPTVFFDIAVDGEPLGRVSFELFADKVPKTAENFRALSTGEKGFGYKGSCFHRIIPGFMCQGGDFTRHNGTGGKSIYGEKFEDENFILKHTGPGILSMANAGPNTNGSQFFICTAKTEWLDGKHVVFGKVKEGMNIVEAMERFGSRNGKTSKKITIADCGQLE

SEQ ID NO: 655 - DNA, 632 bp, Homo sapiens
ctctcggctttcggctcggaggaggccaaggtgcaacttccttcggtcgtcccgaatccgggttcatccgacaccagccgcctccaccatgccgccgaagttcgaccccaacgagatcaaagtcgtatacctgaggtgcaccggaggtgaagtcggtgccacttctgccctggcccccaagatcggccccctgggtctgtctccaaaaaaagttggtgatgacattgccaaggcaacgggtgactggaagggcctgaggattacagtgaaactgaccattcagaacagacaggcccagattgaggtggtgccttctgcctctgccctgatcatcaaagccctcaaggaaccaccaagagacagaaagaaacagaaaaacattaaacacagtgggaatatcacttttgatgagattgtcaacattgctcgacagatgcggcaccgatccttagccagagaactctctggaaccattaaagagatcctggggactgcccagtcagtgggctgtaatgttgatggccgccatcctcatgacatcatcgatgacatcaacagtggtgctgtggaatgcccagccagttaagcacaaaggaaaacatttcaataaaggatcatttgacaactggtga

SEQ ID NO: 656 - protein, 165 aa, Homo sapiens [sequence omitted]

SEQ ID NO: 657 - DNA, 737 bp, Homo sapiens
ttccggcgttgttgaccctatttcccgtgctgcaccgcagcccctttctcttccggttctaggcgcttcgggagccgcggcttatggtgcagacatggccaagtccaagaaccacaccacacacaaccagtcccgaaaatggcacagaaatggtatcaagaaaccccgatcacaaagatacgaatctcttaagggggtggaccccaagttcctgaggaacatgcgctttgccaagaagcacaacaaaaagggcctaaagaagatgcaggccaacaatgccaaggccatgagtgcacgtgccgaggctatcaaggccctcgtaaagcccaaggaggttaagcccaagatcccaaagggtgtcagccgcaagctcgatcgacttgcctacattgcccaccccaagcttgggaagcgtgctcgtgcccgtattgccaaggggctcaggctgtgccggccaaaggccaaggccaaggccaaggccaaggatcaaaccaaggcccaggctgcagccccagcttcagttccagctcaggctcccaaacgtacccaggcccctacaaaggcttcagagtagatatctctgccaacatgaggacagaaggactggtgcgaccccccacccccgcccctgggctaccatctgcatggggctggggtcctcctgtgctatttgtacaaataaacctgaggcaggaaaaaaaaaaaaaaaaaaaaaaaaaaaaaaaaaaaaaaaaaaa

SEQ ID NO: 658 - protein, 159 aa, Homo sapiens [sequence omitted]

SEQ ID NO: 659 - DNA, 442 bp, Homo sapiens
cttcctttccaacttggacgctgcagaatggctcccgcaaagaagggtggcgagaagaaaaagggccgttctgccatcaacgaagtggtaacccgagaatacaccatcaacattcacaagcgcatccatggagtgggcttcaagaagcgtgcacctcgggcactcaaagagattcggaaatttgccatgaaggagatgggaactccagatgtgcgcattgacaccaggctcaacaaagctgtctgggccaaaggaataaggaatgtgccataccgaatccgtgtgcggctgtccagaaaacgtaatgaggatgaagattcaccaaataagctatatactttggttacctatgtacctgttaccactttcaaaaatctacagacagtcaatgtggatgagaactaatcgctgatcgtcagatcaaataaagttataaaattgc

SEQ ID NO: 660 - protein, 125 aa, Homo sapiens [sequence omitted]

SEQ ID NO: 661 - DNA, 3911 bp, Homo sapiens
  misc_feature (432)..(432): n is a, c, g, or t
  misc_feature (847)..(847): n is a, c, g, or t
  misc_feature (904)..(904): n is a, c, g, or t
  misc_feature (1401)..(1401): n is a, c, g, or t
  misc_feature (1600)..(1600): n is a, c, g, or t
  misc_feature (1631)..(1631): n is a, c, g, or t
aaaccctgttcttgggtgggtgtgggtataatactaagttgagatgatatcatttacgggggaaggcgctttgtgaagtaggccttatttctcttgtcctttcgtacagggaggaatttgaagtagatagaaaccgacctggattactccggtctgaactcagatcacgtaggactttaatcgttgaacaaacgaacctttaatagcggctgcaccattgggatgtcctgatccaacatcgaggtcgtaaaccctattgttgatatggactctagaataggattgcgctgttatccctagggtaacttgttccgttggtcaagttattggatcaattgagtatagtagttcgctctgactggtgaagtcttagcatgtactgctcggaggttgggttctgctccgaggtcgccccaaccgaaatttttaatncaggtttggtagtttagggcctgtgggtttgttaggtactgtttgcattaataaattaaagctccatagggtcttctcgtcttgctgtgtcatgcccgcctcttcacgggcaggtcaatttcactggttaaaagtaagagacagctgtaccctcgtggagccattcatacaggtccctagttaaggaacaagtgattatgctacctttgcacggttagggtaccgcggccgttaaacatgtgtcactgggcaggcggtgcccctaatactggtgatgctagaggtgatgtttttggtaaacaggcggggtaagatttgccgagttccttttactttttttaacctttccttatgagcatgcctgtgttgggttgacagtgagggtaataatgacttgttggttgattgtagatantgggctgttaattgtcagttcagtgttttaatctgacgcaggcttatgcggaggagnatgttttcatgttacttatactaacattagttcttctatagggtgatagattggtccaattgggtgtgaggagttcagttatatgtttgggattttttaggtagtgggtgttgagcttgaacgctttcttaattggtggctgcttttaggcctactatgggtgttaaattttttactctctctacaaggttttttcctagtgtccaaagagctgttcctctttggactaatagttaaatttacaaggggatttagagggttctgtgggcaaatttaaagttgaactaagattctatcttggacaaccagctatcaccaggctcggtaggtttgtcgcctctacctataaatcttcccactattttgctaaaagagcacacccgtctatgtacggaattccgggaagaacttaagcgacaatcttgaacaccccttctcatgtgatgtgaaatgaaaccatttggaaaagtttcttctagccagtaatagattttttntttaattgctctgccttgtgccgagagatgttcttttaagatgaatcttttgatgtctgataccaccaaatataggtggtagggagagttggaggctggccctttgagcaggccattagcttacttgctgggcatttccgatagcttattgcctacccttttgctggaaacaagctgatttgaaaaaccaaatctatgnagactgcagctaaggattttatcggtagacntaagagcttttgtccttgtggatattttagtggaaccacatcagtctcaatactgtcattttacactgactcagagcagctgacttcattccttgccacgatatatatttaaggcaggcattgtaacagacataaagacaacttatctgtttcagcaggaaggattcagtttatgaactctcagaccagatcatgttgaacaaggagactttgatgtgtgtcatgaggaaactcattctttacttcccagtcaatttaaaggccagctatcctgagctactcgaatgaatgcactggttaaacattggaaatagtttgtttatatccttgtctctctctaggccaattgtgattacatgactcgactctacatctcgtcaaacaaggcctaggtctggttgctgtagactgctcgccctcaacaaataaaatctggttgactagcctccttgtatatacaactattatttgttaagaagaaattatcgtcaattttctactaccttccaattgtcagctctttttttcctctctggtttttcctacactttacagaaaaagacattgatctatactgccattccctctaatcctgccatactcagtcaaaaggaatgacttaagatgaagatgatcatctgctcgagtcaaaatatacattgtatataagaattggtgattagaaaagcaaaaaacctaaaacttaaatctaggagtctgtatactgtctccatgtctccatgcctcagatctcatctaaatctttgaacagcaccattcaaccaatctgaggccttgacttgcttgtaagatgattctcagagatcggctgagttaaaaaagatgacgacttgattaccaaagaaagtagggccaactttgacaaatctggctctgctgaccctgtcactcccagatgtagcatagactcctaaacagaacctcaagtctgattgaggataaggccttctcctgagctgaaagttctttggcagatgagcaagaaactgaaagctgatgtacctgactggctctgtaagatcagaaaactgtatccagaataagccctatggattaacccctgagtacccagagtaaaaactaatttacagaacttccttattgatctgctggttcttccagatcatattctggctattggtatggctggcctttctgaaggtaccctgcttgtctattttcctgactcagctcttgcctgcctttttcacatgttgctgcaattagactcaccgtgaggactacagtcaatttcagtctatcttgtgcccaatacaacaaggatttttaatagtaacaacccacacctcacccactaggactcaatgttcacaacaggaaggaccattgctgcatactccttgaccagcaacttttttgaagatatttttaagtgcagagtaggcctctattcctgtatgtaattgttcattttcagcacctggaacctcatctatcgggtctggaaggaatacagcagttcgaaagccgcgtccatttctctccttcagtagtgcagaaatgagtccgattcaccagtacacacagaactgtaccagttcaacctagcaaaagaagaaaagtttccactgtacttaaaatttacagctgactcaaattgcctcacagaattacttgatgtagaaggctagtcgtcttacttcggatcagcaggacagttgggctctcagactcatgaccactgagtttgcttgtgttgaaactgtggtttcatccaacatatgctattggacatgattattattccattcaaatggattacagacttcttgaggacaggacaaacttatctctcatggtgtttttttagaatacttttataaccaaggaagaaaccatgccagctgttaccattcaacttcttaagcagagattaagctttttcatatctgttcttatcctggacatcagtagtttttaattgcccagcatccgttccatcttgtaacaactccctgatgtttcttaaaaccacctcttcctattttcagtctgtggtttggacagtctgacccaaccttgagctttgtgggtgaacatgtaattcagacctcatcaatcagcaaatccatctgaactgtggaggagaagctctctttactgagggtgctttagctttgtaggatgaaaacctcaaactaacagggcctaccatgtagagaatgaagccagtgcaggggaaagcagagccaaaatatggagagacttgaatcctgatgacagcgtttgtgcccctgg

SEQ ID NO: 662 - DNA, 666 bp, Homo sapiens
gatcccggtgccagggaccctgcccagttccaggcgtcgcctaacccagaaacgactgggcgccgcgtcctggaaaggccccagcgcacggacatctgaggagctgtttccgttcctctgcccgccatgccgttcctggagctggacacgaatttgcccgccaaccgagtgcccgcggggctggagaaacgactctgcgccgccgctgcctccatcctgggcaaacctgcggaccgcgtgaacgtgacggtacggccgggcctggccatggcgctgagcgggtccaccgagccctgcgcgcagctgtccatctcctccatcggcgtagtgggcaccgcggaggacaaccgcagccacagcgcccacttctttgagtttctcaccaaggagctagccctgggccaggaccggatacttatccgctttttccccttggagtcctggcagattggcaagatagggacggtcatgacttttttatgattgggcacggagggatccagggcatctgtgaactggctgcttcttccagagagatctcttggcagagtgagggcctggagataaccagctttggattatcccgcatgcaacattcctgtgatcacataatcctcttcttcatcctcatatgaaataaatgaagagagcttcctcattcaaaaa

SEQ ID NO: 663 - protein, 118 aa, Homo sapiens
MPFLELDTNLPANRVPAGLEKRLCAAAASILGKPADRVNVTVRPGLAMALSGSTEPCAQLSISSIGVVGTAEDNRSHSAHFFEFLTKELALGQDRILIRFFPLESWQIGKIGTVMTFL

SEQ ID NO: 664 - DNA, 960 bp, Homo sapiens
tgggggagcagagggcagcacttcctccagctccaaaagagtgcacccaccccaacgttaccaatacactcgtgcaggcggaaagctccgacgccggtgtgcgtctacgctgggggcgtggcctgactgcgcggccagacgccagcgccatggaggagtacgctcgggagccctgcccatggcgaattgtggatgattgcggtggagccttcactatgggtgtcatcggtggcggagtcttccaggccatcaagggtttccgcaatgcccctgttggaattcggcaccggttgagaggtagtgccaatgctgtgaggatccgagccccccagattggaggtagcttcgcagtgtgggggggcctgttctccaccattgactgtggcctggtgcggcttcggggcaaggaggatccctggaactctatcaccagtggagcattgaccggggctgtgctggctgcccgcagtggcccactggccatggtgggctcagcaatgatggggggcatcctgttggccctcattgagggcgttggcatcctcctcactcgctacacagcccagcagttccgaaatgcgcccccattcctggaggaccccagccagctgccccctaaggatggcaccccggccccaggctaccccagctatcagcagtaccactgaggaagccactgccaccatgggagctacttcctcggttccctccccgatggtctacctcgaagggagggctggctcccagttagccctgggaccctccagagagggtttctactctgctccctagtcccagggtgggggtggggcaccccagctgccctgacagatgggtcccctttttctctctcagggcaccccagccccacactcacatgtacgaagttctcaccccagctcctttgtgtggcaccctgatgagtatttaaagcccgttttgaaatgccaaaaaaaaaaa

SEQ ID NO: 665 - protein, 172 aa, Homo sapiens
MEEYAREPCPWRIVDDCGGAFTMGVIGGGVFQAIKGFRNAPVGIRHRLRGSANAVRIRAPQIGGSFAVWGGLFSTIDCGLVRLRGKEDPWNSITSGALTGAVLAARSGPLAMVGSAMMGGILLALIEGVGILLTRYTAQQFRNAPPFLEDPSQLPPKDGTPAPGYPSYQQYH

SEQ ID NO: 666 - DNA, 7108 bp, Homo sapiens
aaaactgcgactgcgcggcgtgagctcgctgagacttcctggaccccgcaccaggctgtggggtttctcagataactgggcccctgcgctcaggaggccttcaccctctgctctgggtaaagttcattggaacagaaagaaatggatttatctgctcttcgcgttgaagaagtacaaaatgtcattaatgctatgcagaaaatcttagagtgtcccatctgtctggagttgatcaaggaacctgtctccacaaagtgtgaccacatattttgcaaattttgcatgctgaaacttctcaaccagaagaaagggccttcacagtgtcctttatgtaagaatgatataaccaaaaggagcctacaagaaagtacgagatttagtcaacttgttgaagagctattgaaaatcatttgtgcttttcagcttgacacaggtttggagtatgcaaacagctataattttgcaaaaaaggaaaataactctcctgaacatctaaaagatgaagtttctatcatccaaagtatgggctacagaaaccgtgccaaaagacttctacagagtgaacccgaaaatccttccttgcaggaaaccagtctcagtgtccaactctctaaccttggaactgtgagaactctgaggacaaagcagcggatacaacctcaaaagacgtctgtctacattgaattgggatctgattcttctgaagataccgttaataaggcaacttattgcagtgtgggagatcaagaattgttacaaatcacccctcaaggaaccagggatgaaatcagtttggattctgcaaaaaaggctgcttgtgaattttctgagacggatgtaacaaatactgaacatcatcaacccagtaataatgatttgaacaccactgagaagcgtgcagctgagaggcatccagaaaagtatcagggtagttctgtttcaaacttgcatgtggagccatgtggcacaaatactcatgccagctcattacagcatgagaacagcagtttattactcactaaagacagaatgaatgtagaaaaggctgaattctgtaataaaagcaaacagcctggcttagcaaggagccaacataacagatgggctggaagtaaggaaacatgtaatgataggcggactcccagcacagaaaaaaaggtagatctgaatgctgatcccctgtgtgagagaaaagaatggaataagcagaaactgccatgctcagagaatcctagagatactgaagatgttccttggataacactaaatagcagcattcagaaagttaatgagtggttttccagaagtgatgaactgttaggttctgatgactcacatgatggggagtctgaatcaaatgccaaagtagctgatgtattggacgttctaaatgaggtagatgaatattctggttcttcagagaaaatagacttactggccagtgatcctcatgaggctttaatatgtaaaagtgaaagagttcactccaaatcagtagagagtaatattgaagacaaaatatttgggaaaacctatcggaagaaggcaagcctccccaacttaagccatgtaactgaaaatctaattataggagcatttgttactgagccacagataatacaagagcgtcccctcacaaataaattaaagcgtaaaaggagacctacatcaggccttcatcctgaggattttatcaagaaagcagatttggcagttcaaaagactcctgaaatgataaatcagggaactaaccaaacggagcagaatggtcaagtgatgaatattactaatagtggtcatgagaataaaacaaaaggtgattctattcagaatgagaaaaatcctaacccaatagaatcactcgaaaaagaatctgctttcaaaacgaaagctgaacctataagcagcagtataagcaatatggaactcgaattaaatatccacaattcaaaagcacctaaaaagaataggctgaggaggaagtcttctaccaggcatattcatgcgcttgaactagtagtcagtagaaatctaagcccacctaattgtactgaattgcaaattgatagttgttctagcagtgaagagataaagaaaaaaaagtacaaccaaatgccagtcaggcacagcagaaacctacaactcatggaaggtaaagaacctgcaactggagccaagaagagtaacaagccaaatgaacagacaagtaaaagacatgacagcgatactttcccagagctgaagttaacaaatgcacctggttcttttactaagtgttcaaataccagtgaacttaaagaatttgtcaatcctagccttccaagagaagaaaaagaagagaaactagaaacagttaaagtgtctaataatgctgaagaccccaaagatctcatgttaagtggagaaagggttttgcaaactgaaagatctgtagagagtagcagtatttcattggtacctggtactgattatggcactcaggaaagtatctcgttactggaagttagcactctagggaaggcaaaaacagaaccaaataaatgtgtgagtcagtgtgcagcatttgaaaaccccaagggactaattcatggttgttccaaagataatagaaatgacacagaaggctttaagtatccattgggacatgaagttaaccacagtcgggaaacaagcatagaaatggaagaaagtgaacttgatgctcagtatttgcagaatacattcaaggtttcaaagcgccagtcatttgctccgttttcaaatccaggaaatgcagaagaggaatgtgcaacattctctgcccactctgggtccttaaagaaacaaagtccaaaagtcacttttgaatgtgaacaaaaggaagaaaatcaaggaaagaatgagtctaatatcaagcctgtacagacagttaatatcactgcaggctttcctgtggttggtcagaaagataagccagttgataatgccaaatgtagtatcaaaggaggctctaggttttgtctatcatctcagttcagaggcaacgaaactggactcattactccaaataaacatggacttttacaaaacccatatcgtataccaccactttttcccatcaagtcatttgttaaaactaaatgtaagaaaaatctgctagaggaaaactttgaggaacattcaatgtcacctgaaagagaaatgggaaatgagaacattccaagtacagtgagcacaattagccgtaataacattagagaaaatgtttttaaagaagccagctcaagcaatattaatgaagtaggttccagtactaatgaagtgggctccagtattaatgaaataggttccagtgatgaaaacattcaagcagaactaggtagaaacagagggccaaaattgaatgctatgcttagattaggggttttgcaacctgaggtctataaacaaagtcttcctggaagtaattgtaagcatcctgaaataaaaaagcaagaatatgaagaagtagttcagactgttaatacagatttctctccatatctgatttcagataacttagaacagcctatgggaagtagtcatgcatctcaggtttgttctgagacacctgatgacctgttagatgatggtgaaataaaggaagatactagttttgctgaaaatgacattaaggaaagttctgctgtttttagcaaaagcgtccagaaaggagagcttagcaggagtcctagccctttcacccatacacatttggctcagggttaccgaagaggggccaagaaattagagtcctcagaagagaacttatctagtgaggatgaagagcttccctgcttccaacacttgttatttggtaaagtaaacaatataccttctcagtctactaggcatagcaccgttgctaccgagtgtctgtctaagaacacagaggagaatttattatcattgaagaatagcttaaatgactgcagtaaccaggtaatattggcaaaggcatctcaggaacatcaccttagtgaggaaacaaaatgttctgctagcttgttttcttcacagtgcagtgaattggaagacttgactgcaaatacaaacacccaggatcctttcttgattggttcttccaaacaaatgaggcatcagtctgaaagccagggagttggtctgagtgacaaggaattggtttcagatgatgaagaaagaggaacgggcttggaagaaaataatcaagaagagcaaagcatggattcaaacttaggtgaagcagcatctgggtgtgagagtgaaacaagcgtctctgaagactgctcagggctatcctctcagagtgacattttaaccactcagcagagggataccatgcaacataacctgataaagctccagcaggaaatggctgaactagaagctgtgttagaacagcatgggagccagccttctaacagctacccttccatcataagtgactcttctgcccttgaggacctgcgaaatccagaacaaagcacatcagaaaaagcagtattaacttcacagaaaagtagtgaataccctataagccagaatccagaaggcctttctgctgacaagtttgaggtgtctgcagatagttctaccagtaaaaataaagaaccaggagtggaaaggtcatccccttctaaatgcccatcattagatgataggtggtacatgcacagttgctctgggagtcttcagaatagaaactacccatctcaagaggagctcattaaggttgttgatgtggaggagcaacagctggaagagtctgggccacacgatttgacggaaacatcttacttgccaaggcaagatctagagggaaccccttacctggaatctggaatcagcctcttctctgatgaccctgaatctgatccttctgaagacagagccccagagtcagctcgtgttggcaacataccatcttcaacctctgcattgaaagttccccaattgaaagttgcagaatctgcccagagtccagctgctgctcatactactgatactgctgggtataatgcaatggaagaaagtgtgagcagggagaagccagaattgacagcttcaacagaaagggtcaacaaaagaatgtccatggtggtgtctggcctgaccccagaagaatttatgctcgtgtacaagtttgccagaaaacaccacatcactttaactaatctaattactgaagagactactcatgttgttatgaaaacagatgctgagtttgtgtgtgaacggacactgaaatattttctaggaattgcgggaggaaaatgggtagttagctatttctgggtgacccagtctattaaagaaagaaaaatgctgaatgagcatgattttgaagtcagaggagatgtggtcaatggaagaaaccaccaaggtccaaagcgagcaagagaatcccaggacagaaagatcttcagggggctagaaatctgttgctatgggcccttcaccaacatgcccacagatcaactggaatggatggtacagctgtgtggtgcttctgtggtgaaggagctttcatcattcacccttggcacaggtgtccacccaattgtggttgtgcagccagatgcctggacagaggacaatggcttccatgcaattgggcagatgtgtgaggcacctgtggtgacccgagagtgggtgttggacagtgtagcactctaccagtgccaggagctggacacctacctgataccccagatcccccacagccactactgactgcagccagccacaggtacagagcccaggaccccaagaatgagcttacaaagtggcctttccaggccctgggagctcctctcactcttcagtccttctactgtcctggctactaaatattttatgtacatcagcctgaaaaggacttctggctatgcaagggtcccttaaagattttctgcttgaagtctcccttggaaatctgccatgagcacaaaattatggtaatttttcacctgagaagattttaaaaccatttaaacgccaccaattgagcaagatgctgattcattatttatcagccctattctttctattcaggctgttgttggcttagggctggaagcacagagtggcttggcctcaagagaatagctggtttccctaagtttacttctctaaaaccctgtgttcacaaaggcagagagtcagacccttcaatggaaggagagtgcttgggatcgattatgtgacttaaagtcagaatagtccttgggcagttctcaaatgttggagtggaacattggggaggaaattctgaggcaggtattagaaatgaaaaggaaacttgaaacctgggcatggtggctcacgcctgtaatcccagcactttgggaggccaaggtgggcagatcactggaggtcaggagttcgaaaccagcctggccaacatggtgaaaccccatctctactaaaaatacagaaattagccggtcatggtggtggacacctgtaatcccagctactcaggtggctaaggcaggagaatcacttcagcccgggaggtggaggttgcagtgagccaagatcataccacggcactccagcctgggtgacagtgagactgtggctcaaaaaaaaaaaaaaaaaaggaaaatgaaactaggaaaggtttcttaaagtctgagatatatttgctagatttctaaagaatgtgttctaaaacagcagaagattttcaagaaccggtttccaaagacagtcttctaattcctcattagtaataagtaaaatgtttattgttgtagctctggtatataatccattcctcttaaaatataagacctctggcatgaatatttcatatctataaaatgacagatcccaccaggaaggaagctgttgctttctttgaggtgatttttttcctttgctccctgttgctgaaaccatacagcttcataaataattttgcttgctgaaggaagaaaaagtgtttttcataaacccattatccaggactgtttatagctgttggaaggactaggtcttccctagcccccccagtgtgcaagggcagtgaagacttgattgtacaaaatacgttttgtaaatgttgtgctgttaacactgcaaataaacttggtagcaaaca

SEQ ID NO: 667 - protein, 1863 aa, Homo sapiens
MDLSALRVEEVQNVINAMQKILECPICLELIKEPVSTKCDHIFCKFCMLKLLNQKKGPSQCPLCKNDITKRSLQESTRFSQLVEELLKIICAFQLDTGLEYANSYNFAKKENNSPEHLKDEVSIIQSMGYRNRAKRLLQSEPENPSLQETSLSVQLSNLGTVRTLRTKQRIQPQKTSVYIELGSDSSEDTVNKATYCSVGDQELLQITPQGTRDEISLDSAKKAACEFSETDVTNTEHHQPSNNDLNTTEKRAAERHPEKYQGSSVSNLHVEPCGTNTHASSLQHENSSLLLTKDRMNVEKAEFCNKSKQPGLARSQHNRWAGSKETCNDRRTPSTEKKVDLNADPLCERKEWNKQKLPCSENPRDTEDVPWITLNSSIQKVNEWFSRSDELLGSDDSHDGESESNAKVADVLDVLNEVDEYSGSSEKIDLLASDPHEALICKSERVHSKSVESNIEDKIFGKTYRKKASLPNLSHVTENLIIGAFVTEPQIIQERPLTNKLKRKRRPTSGLHPEDFIKKADLAVQKTPEMINQGTNQTEQNGQVMNITNSGHENKTKGDSIQNEKNPNPIESLEKESAFKTKAEPISSSISNMELELNIHNSKAPKKNRLRRKSSTRHIHALELVVSRNLSPPNCTELQIDSCSSSEEIKKKKYNQMPVRHSRNLQLMEGKEPATGAKKSNKPNEQTSKRHDSDTFPELKLTNAPGSFTKCSNTSELKEFVNPSLPREEKEEKLETVKVSNNAEDPKDLMLSGERVLQTERSVESSSISLVPGTDYGTQESISLLEVSTLGKAKTEPNKCVSQCAAFENPKGLIHGCSKDNRNDTEGFKYPLGHEVNHSRETSIEMEESELDAQYLQNTFKVSKRQSFAPFSNPGNAEEECATFSAHSGSLKKQSPKVTFECEQKEENQGKNESNIKPVQTVNITAGFPVVGQKDKPVDNAKCSIKGGSRFCLSSQFRGNETGLITPNKHGLLQNPYRIPPLFPIKSFVKTKCKKNLLEENFEEHSMSPEREMGNENIPSTVSTISRNNIRENVFKEASSSNINEVGSSTNEVGSSINEIGSSDENIQAELGRNRGPKLNAMLRLGVLQPEVYKQSLPGSNCKHPEIKKQEYEEVVQTVNTDFSPYLISDNLEQPMGSSHASQVCSETPDDLLDDGEIKEDTSFAENDIKESSAVFSKSVQKGELSRSPSPFTHTHLAQGYRRGAKKLESSEENLSSEDEELPCFQHLLFGKVNNIPSQSTRHSTVATECLSKNTEENLLSLKNSLNDCSNQVILAKASQEHHLSEETKCSASLFSSQCSELEDLTANTNTQDPFLIGSSKQMRHQSESQGVGLSDKELVSDDEERGTGLEENNQEEQSMDSNLGEAASGCESETSVSEDCSGLSSQSDILTTQQRDTMQHNLIKLQQEMAELEAVLEQHGSQPSNSYPSIISDSSALEDLRNPEQSTSEKAVLTSQKSSEYPISQNPEGLSADKFEVSADSSTSKNKEPGVERSSPSKCPSLDDRWYMHSCSGSLQNRNYPSQEELIKVVDVEEQQLEESGPHDLTETSYLPRQDLEGTPYLESGISLFSDDPESDPSEDRAPESARVGNIPSSTSALKVPQLKVAESAQSPAAAHTTDTAGYNAMEESVSREKPELTASTERVNKRMSMVVSGLTPEEFMLVYKFARKHHITLTNLITEETTHVVMKTDAEFVCERTLKYFLGIAGGKWVVSYFWVTQSIKERKMLNEHDFEVRGDVVNGRNHQGPKRARESQDRKIFRGLEICCYGPFTNMPTDQLEWMVQLCGASVVKELSSFTLGTGVHPIVVVQPDAWTEDNGFHAIGQMCEAPVVTREWVLDSVALYQCQELDTYLIPQIPHSHY

SEQ ID NO: 668 - DNA, 7365 bp, Homo sapiens
ggcagtttgtaggtcgcgagggaagcgctgaggatcaggaagggggcactgagtgtccgtgggggaatcctcgtgataggaactggaatatgccttgagggggacactatgtctttaaaaacgtcggctggtcatgaggtcaggagttccagaccagcctgaccaacgtggtgaaactccgtctctactaaaaatacaaaaattagccgggcgtggtgccgctccagctactcaggaggctgaggcaggagaatcgctagaacccgggaggcggaggttgcagtgagccgagatcgcgccattgcactccagcctgggcgacagagcgagactgtctcaaaacaaaacaaaacaaaacaaaacaaaaaacaccggctgttcattggaacagaaagaaatggatttatctgctcttcgcgttgaagaagtacaaaatgtcattaatgctatgcagaaaatcttagagtgtcccatctgtctggagttgatcaaggaacctgtctccacaaagtgtgaccacatattttgcaaattttgcatgctgaaacttctcaaccagaagaaagggccttcacagtgtcctttatgtaagaatgatataaccaaaaggagcctacaagaaagtacgagatttagtcaacttgttgaagagctattgaaaatcatttgtgcttttcagcttgacacaggtttggagtatgcaaacagctataattttgcaaaaaaggaaaataactctcctgaacatctaaaagatgaagtttctatcatccaaagtatgggctacagaaaccgtgccaaaagacttctacagagtgaacccgaaaatccttccttgcaggaaaccagtctcagtgtccaactctctaaccttggaactgtgagaactctgaggacaaagcagcggatacaacctcaaaagacgtctgtctacattgaattgggatctgattcttctgaagataccgttaataaggcaacttattgcagtgtgggagatcaagaattgttacaaatcacccctcaaggaaccagggatgaaatcagtttggattctgcaaaaaaggctgcttgtgaattttctgagacggatgtaacaaatactgaacatcatcaacccagtaataatgatttgaacaccactgagaagcgtgcagctgagaggcatccagaaaagtatcagggtagttctgtttcaaacttgcatgtggagccatgtggcacaaatactcatgccagctcattacagcatgagaacagcagtttattactcactaaagacagaatgaatgtagaaaaggctgaattctgtaataaaagcaaacagcctggcttagcaaggagccaacataacagatgggctggaagtaaggaaacatgtaatgataggcggactcccagcacagaaaaaaaggtagatctgaatgctgatcccctgtgtgagagaaaagaatggaataagcagaaactgccatgctcagagaatcctagagatactgaagatgttccttggataacactaaatagcagcattcagaaagttaatgagtggttttccagaagtgatgaactgttaggttctgatgactcacatgatggggagtctgaatcaaatgccaaagtagctgatgtattggacgttctaaatgaggtagatgaatattctggttcttcagagaaaatagacttactggccagtgatcctcatgaggctttaatatgtaaaagtgaaagagttcactccaaatcagtagagagtaatattgaagacaaaatatttgggaaaacctatcggaagaaggcaagcctccccaacttaagccatgtaactgaaaatctaattataggagcatttgttactgagccacagataatacaagagcgtcccctcacaaataaattaaagcgtaaaaggagacctacatcaggccttcatcctgaggattttatcaagaaagcagatttggcagttcaaaagactcctgaaatgataaatcagggaactaaccaaacggagcagaatggtcaagtgatgaatattactaatagtggtcatgagaataaaacaaaaggtgattctattcagaatgagaaaaatcctaacccaatagaatcactcgaaaaagaatctgctttcaaaacgaaagctgaacctataagcagcagtataagcaatatggaactcgaattaaatatccacaattcaaaagcacctaaaaagaataggctgaggaggaagtcttctaccaggcatattcatgcgcttgaactagtagtcagtagaaatctaagcccacctaattgtactgaattgcaaattgatagttgttctagcagtgaagagataaagaaaaaaaagtacaaccaaatgccagtcaggcacagcagaaacctacaactcatggaaggtaaagaacctgcaactggagccaagaagagtaacaagccaaatgaacagacaagtaaaagacatgacagcgatactttcccagagctgaagttaacaaatgcacctggttcttttactaagtgttcaaataccagtgaacttaaagaatttgtcaatcctagccttccaagagaagaaaaagaagagaaactagaaacagttaaagtgtctaataatgctgaagaccccaaagatctcatgttaagtggagaaagggttttgcaaactgaaagatctgtagagagtagcagtatttcattggtacctggtactgattatggcactcaggaaagtatctcgttactggaagttagcactctagggaaggcaaaaacagaaccaaataaatgtgtgagtcagtgtgcagcatttgaaaaccccaagggactaattcatggttgttccaaagataatagaaatgacacagaaggctttaagtatccattgggacatgaagttaaccacagtcgggaaacaagcatagaaatggaagaaagtgaacttgatgctcagtatttgcagaatacattcaaggtttcaaagcgccagtcatttgctccgttttcaaatccaggaaatgcagaagaggaatgtgcaacattctctgcccactctgggtccttaaagaaacaaagtccaaaagtcacttttgaatgtgaacaaaaggaagaaaatcaaggaaagaatgagtctaatatcaagcctgtacagacagttaatatcactgcaggctttcctgtggttggtcagaaagataagccagttgataatgccaaatgtagtatcaaaggaggctctaggttttgtctatcatctcagttcagaggcaacgaaactggactcattactccaaataaacatggacttttacaaaacccatatcgtataccaccactttttcccatcaagtcatttgttaaaactaaatgtaagaaaaatctgctagaggaaaactttgaggaacattcaatgtcacctgaaagagaaatgggaaatgagaacattccaagtacagtgagcacaattagccgtaataacattagagaaaatgtttttaaagaagccagctcaagcaatattaatgaagtaggttccagtactaatgaagtgggctccagtattaatgaaataggttccagtgatgaaaacattcaagcagaactaggtagaaacagagggccaaaattgaatgctatgcttagattaggggttttgcaacctgaggtctataaacaaagtcttcctggaagtaattgtaagcatcctgaaataaaaaagcaagaatatgaagaagtagttcagactgttaatacagatttctctccatatctgatttcagataacttagaacagcctatgggaagtagtcatgcatctcaggtttgttctgagacacctgatgacctgttagatgatggtgaaataaaggaagatactagttttgctgaaaatgacattaaggaaagttctgctgtttttagcaaaagcgtccagaaaggagagcttagcaggagtcctagccctttcacccatacacatttggctcagggttaccgaagaggggccaagaaattagagtcctcagaagagaacttatctagtgaggatgaagagcttccctgcttccaacacttgttatttggtaaagtaaacaatataccttctcagtctactaggcatagcaccgttgctaccgagtgtctgtctaagaacacagaggagaatttattatcattgaagaatagcttaaatgactgcagtaaccaggtaatattggcaaaggcatctcaggaacatcaccttagtgaggaaacaaaatgttctgctagcttgttttcttcacagtgcagtgaattggaagacttgactgcaaatacaaacacccaggatcctttcttgattggttcttccaaacaaatgaggcatcagtctgaaagccagggagttggtctgagtgacaaggaattggtttcagatgatgaagaaagaggaacgggcttggaagaaaataatcaagaagagcaaagcatggattcaaacttaggtgaagcagcatctgggtgtgagagtgaaacaagcgtctctgaagactgctcagggctatcctctcagagtgacattttaaccactcagcagagggataccatgcaacataacctgataaagctccagcaggaaatggctgaactagaagctgtgttagaacagcatgggagccagccttctaacagctacccttccatcataagtgactcttctgcccttgaggacctgcgaaatccagaacaaagcacatcagaaaaagcagtattaacttcacagaaaagtagtgaataccctataagccagaatccagaaggcctttctgctgacaagtttgaggtgtctgcagatagttctaccagtaaaaataaagaaccaggagtggaaaggtcatccccttctaaatgcccatcattagatgataggtggtacatgcacagttgctctgggagtcttcagaatagaaactacccatctcaagaggagctcattaaggttgttgatgtggaggagcaacagctggaagagtctgggccacacgatttgacggaaacatcttacttgccaaggcaagatctagagggaaccccttacctggaatctggaatcagcctcttctctgatgaccctgaatctgatccttctgaagacagagccccagagtcagctcgtgttggcaacataccatcttcaacctctgcattgaaagttccccaattgaaagttgcagaatctgcccagagtccagctgctgctcatactactgatactgctgggtataatgcaatggaagaaagtgtgagcagggagaagccagaattgacagcttcaacagaaagggtcaacaaaagaatgtccatggtggtgtctggcctgaccccagaagaatttatgctcgtgtacaagtttgccagaaaacaccacatcactttaactaatctaattactgaagagactactcatgttgttatgaaaacagatgctgagtttgtgtgtgaacggacactgaaatattttctaggaattgcgggaggaaaatgggtagttagctatttctgggtgacccagtctattaaagaaagaaaaatgctgaatgagcatgattttgaagtcagaggagatgtggtcaatggaagaaaccaccaaggtccaaagcgagcaagagaatcccaggacagaaagatcttcagggggctagaaatctgttgctatgggcccttcaccaacatgcccacagatcaactggaatggatggtacagctgtgtggtgcttctgtggtgaaggagctttcatcattcacccttggcacaggtgtccacccaattgtggttgtgcagccagatgcctggacagaggacaatggcttccatgcaattgggcagatgtgtgaggcacctgtggtgacccgagagtgggtgttggacagtgtagcactctaccagtgccaggagctggacacctacctgataccccagatcccccacagccactactgactgcagccagccacaggtacagagccacaggaccccaagaatgagcttacaaagtggcctttccaggccctgggagctcctctcactcttcagtccttctactgtcctggctactaaatattttatgtacatcagcctgaaaaggacttctggctatgcaagggtcccttaaagattttctgcttgaagtctcccttggaaatctgccatgagcacaaaattatggtaatttttcacctgagaagattttaaaaccatttaaacgccaccaattgagcaagatgctgattcattatttatcagccctattctttctattcaggctgttgttggcttagggctggaagcacagagtggcttggcctcaagagaatagctggtttccctaagtttacttctctaaaaccctgtgttcacaaaggcagagagtcagacccttcaatggaaggagagtgcttgggatcgattatgtgacttaaagtcagaatagtccttgggcagttctcaaatgttggagtggaacattggggaggaaattctgaggcaggtattagaaatgaaaaggaaacttgaaacctgggcatggtggctcacgcctgtaatcccagcactttgggaggccaaggtgggcagatcactggaggtcaggagttcgaaaccagcctggccaacatggtgaaaccccatctctactaaaaatacagaaattagccggtcatggtggtggacacctgtaatcccagctactcaggtggctaaggcaggagaatcacttcagcccgggaggtggaggttgcagtgagccaagatcataccacggcactccagcctgggtgacagtgagactgtggctcaaaaaaaaaaaaaaaaaaggaaaatgaaactaggaaaggtttcttaaagtctgagatatatttgctagatttctaaagaatgtgttctaaaacagcagaagattttcaagaaccggtttccaaagacagtcttctaattcctcattagtaataagtaaaatgtttattgttgtagctctggtatataatccattcctcttaaaatataagacctctggcatgaatatttcatatctataaaatgacagatcccaccaggaaggaagctgttgctttctttgaggtgatttttttcctttgctccctgttgctgaaaccatacagcttcataaataattttgcttgctgaaggaagaaaaagtgtttttcataaacccattatccaggactgtttatagctgttggaaggactaggtcttccctagcccccccagtgtgcaagggcagtgaagacttgattgtacaaaatacgttttgtaaatgttgtgctgttaacactgcaaataaacttggtagcaaaca

SEQ ID NO: 669 - DNA, 7102 bp, Homo sapiens
aaaactgcgactgcgcggcgtgagctcgctgagacttcctggaccccgcaccaggctgtggggtttctcagataactgggcccctgcgctcaggaggccttcaccctctgctctggttcattggaacagaaagaaatggatttatctgctcttcgcgttgaagaagtacaaaatgtcattaatgctatgcagaaaatcttagagtgtcccatctgtctggagttgatcaaggaacctgtctccacaaagtgtgaccacatattttgcaaattttgcatgctgaaacttctcaaccagaagaaagggccttcacagtgtcctttatgtaagaatgatataaccaaaaggagcctacaagaaagtacgagatttagtcaacttgttgaagagctattgaaaatcatttgtgcttttcagcttgacacaggtttggagtatgcaaacagctataattttgcaaaaaaggaaaataactctcctgaacatctaaaagatgaagtttctatcatccaaagtatgggctacagaaaccgtgccaaaagacttctacagagtgaacccgaaaatccttccttgcaggaaaccagtctcagtgtccaactctctaaccttggaactgtgagaactctgaggacaaagcagcggatacaacctcaaaagacgtctgtctacattgaattgggatctgattcttctgaagataccgttaataaggcaacttattgcagtgtgggagatcaagaattgttacaaatcacccctcaaggaaccagggatgaaatcagtttggattctgcaaaaaaggctgcttgtgaattttctgagacggatgtaacaaatactgaacatcatcaacccagtaataatgatttgaacaccactgagaagcgtgcagctgagaggcatccagaaaagtatcagggtagttctgtttcaaacttgcatgtggagccatgtggcacaaatactcatgccagctcattacagcatgagaacagcagtttattactcactaaagacagaatgaatgtagaaaaggctgaattctgtaataaaagcaaacagcctggcttagcaaggagccaacataacagatgggctggaagtaaggaaacatgtaatgataggcggactcccagcacagaaaaaaaggtagatctgaatgctgatcccctgtgtgagagaaaagaatggaataagcagaaactgccatgctcagagaatcctagagatactgaagatgttccttggataacactaaatagcagcattcagaaagttaatgagtggttttccagaagtgatgaactgttaggttctgatgactcacatgatggggagtctgaatcaaatgccaaagtagctgatgtattggacgttctaaatgaggtagatgaatattctggttcttcagagaaaatagacttactggccagtgatcctcatgaggctttaatatgtaaaagtgaaagagttcactccaaatcagtagagagtaatattgaagacaaaatatttgggaaaacctatcggaagaaggcaagcctccccaacttaagccatgtaactgaaaatctaattataggagcatttgttactgagccacagataatacaagagcgtcccctcacaaataaattaaagcgtaaaaggagacctacatcaggccttcatcctgaggattttatcaagaaagcagatttggcagttcaaaagactcctgaaatgataaatcagggaactaaccaaacggagcagaatggtcaagtgatgaatattactaatagtggtcatgagaataaaacaaaaggtgattctattcagaatgagaaaaatcctaacccaatagaatcactcgaaaaagaatctgctttcaaaacgaaagctgaacctataagcagcagtataagcaatatggaactcgaattaaatatccacaattcaaaagcacctaaaaagaataggctgaggaggaagtcttctaccaggcatattcatgcgcttgaactagtagtcagtagaaatctaagcccacctaattgtactgaattgcaaattgatagttgttctagcagtgaagagataaagaaaaaaaagtacaaccaaatgccagtcaggcacagcagaaacctacaactcatggaaggtaaagaacctgcaactggagccaagaagagtaacaagccaaatgaacagacaagtaaaagacatgacagcgatactttcccagagctgaagttaacaaatgcacctggttcttttactaagtgttcaaataccagtgaacttaaagaatttgtcaatcctagccttccaagagaagaaaaagaagagaaactagaaacagttaaagtgtctaataatgctgaagaccccaaagatctcatgttaagtggagaaagggttttgcaaactgaaagatctgtagagagtagcagtatttcattggtacctggtactgattatggcactcaggaaagtatctcgttactggaagttagcactctagggaaggcaaaaacagaaccaaataaatgtgtgagtcagtgtgcagcatttgaaaaccccaagggactaattcatggttgttccaaagataatagaaatgacacagaaggctttaagtatccattgggacatgaagttaaccacagtcgggaaacaagcatagaaatggaagaaagtgaacttgatgctcagtatttgcagaatacattcaaggtttcaaagcgccagtcatttgctccgttttcaaatccaggaaatgcagaagaggaatgtgcaacattctctgcccactctgggtccttaaagaaacaaagtccaaaagtcacttttgaatgtgaacaaaaggaagaaaatcaaggaaagaatgagtctaatatcaagcctgtacagacagttaatatcactgcaggctttcctgtggttggtcagaaagataagccagttgataatgccaaatgtagtatcaaaggaggctctaggttttgtctatcatctcagttcagaggcaacgaaactggactcattactccaaataaacatggacttttacaaaacccatatcgtataccaccactttttcccatcaagtcatttgttaaaactaaatgtaagaaaaatctgctagaggaaaactttgaggaacattcaatgtcacctgaaagagaaatgggaaatgagaacattccaagtacagtgagcacaattagccgtaataacattagagaaaatgtttttaaagaagccagctcaagcaatattaatgaagtaggttccagtactaatgaagtgggctccagtattaatgaaataggttccagtgatgaaaacattcaagcagaactaggtagaaacagagggccaaaattgaatgctatgcttagattaggggttttgcaacctgaggtctataaacaaagtcttcctggaagtaattgtaagcatcctgaaataaaaaagcaagaatatgaagaagtagttcagactgttaatacagatttctctccatatctgatttcagataacttagaacagcctatgggaagtagtcatgcatctcaggtttgttctgagacacctgatgacctgttagatgatggtgaaataaaggaagatactagttttgctgaaaatgacattaaggaaagttctgctgtttttagcaaaagcgtccagaaaggagagcttagcaggagtcctagccctttcacccatacacatttggctcagggttaccgaagaggggccaagaaattagagtcctcagaagagaacttatctagtgaggatgaagagcttccctgcttccaacacttgttatttggtaaagtaaacaatataccttctcagtctactaggcatagcaccgttgctaccgagtgtctgtctaagaacacagaggagaatttattatcattgaagaatagcttaaatgactgcagtaaccaggtaatattggcaaaggcatctcaggaacatcaccttagtgaggaaacaaaatgttctgctagcttgttttcttcacagtgcagtgaattggaagacttgactgcaaatacaaacacccaggatcctttcttgattggttcttccaaacaaatgaggcatcagtctgaaagccagggagttggtctgagtgacaaggaattggtttcagatgatgaagaaagaggaacgggcttggaagaaaataatcaagaagagcaaagcatggattcaaacttaggtgaagcagcatctgggtgtgagagtgaaacaagcgtctctgaagactgctcagggctatcctctcagagtgacattttaaccactcagcagagggataccatgcaacataacctgataaagctccagcaggaaatggctgaactagaagctgtgttagaacagcatgggagccagccttctaacagctacccttccatcataagtgactcttctgcccttgaggacctgcgaaatccagaacaaagcacatcagaaaaagcagtattaacttcacagaaaagtagtgaataccctataagccagaatccagaaggcctttctgctgacaagtttgaggtgtctgcagatagttctaccagtaaaaataaagaaccaggagtggaaaggtcatccccttctaaatgcccatcattagatgataggtggtacatgcacagttgctctgggagtcttcagaatagaaactacccatctcaagaggagctcattaaggttgttgatgtggaggagcaacagctggaagagtctgggccacacgatttgacggaaacatcttacttgccaaggcaagatctagagggaaccccttacctggaatctggaatcagcctcttctctgatgaccctgaatctgatccttctgaagacagagccccagagtcagctcgtgttggcaacataccatcttcaacctctgcattgaaagttccccaattgaaagttgcagaatctgcccagagtccagctgctgctcatactactgatactgctgggtataatgcaatggaagaaagtgtgagcagggagaagccagaattgacagcttcaacagaaagggtcaacaaaagaatgtccatggtggtgtctggcctgaccccagaagaatttatgctcgtgtacaagtttgccagaaaacaccacatcactttaactaatctaattactgaagagactactcatgttgttatgaaaacagatgctgagtttgtgtgtgaacggacactgaaatattttctaggaattgcgggaggaaaatgggtagttagctatttctgggtgacccagtctattaaagaaagaaaaatgctgaatgagcatgattttgaagtcagaggagatgtggtcaatggaagaaaccaccaaggtccaaagcgagcaagagaatcccaggacagaaagatcttcagggggctagaaatctgttgctatgggcccttcaccaacatgcccacagatcaactggaatggatggtacagctgtgtggtgcttctgtggtgaaggagctttcatcattcacccttggcacaggtgtccacccaattgtggttgtgcagccagatgcctggacagaggacaatggcttccatgcaattgggcagatgtgtgaggcacctgtggtgacccgagagtgggtgttggacagtgtagcactctaccagtgccaggagctggacacctacctgataccccagatcccccacagccactactgactgcagccagccacaggtacaggccacaggaccccaagaatgagcttacaaagtggcctttccaggccctgggagctcctctcactcttcagtccttctactgtcctggctactaaatattttatgtacatcagcctgaaaaggacttctggctatgcaagggtcccttaaagattttctgcttgaagtctcccttggaaatctgccatgagcacaaaattatggtaatttttcacctgagaagattttaaaaccatttaaacgccaccaattgagcaagatgctgattcattatttatcagccctattctttctattcaggctgttgttggcttagggctggaagcacagagtggcttggcctcaagagaatagctggtttccctaagtttacttctctaaaaccctgtgttcacaaaggcagagagtcagacccttcaatggaaggagagtgcttgggatcgattatgtgacttaaagtcagaatagtccttgggcagttctcaaatgttggagtggaacattggggaggaaattctgaggcaggtattagaaatgaaaaggaaacttgaaacctgggcatggtggctcacgcctgtaatcccagcactttgggaggccaaggtgggcagatcactggaggtcaggagttcgaaaccagcctggccaacatggtgaaaccccatctctactaaaaatacagaaattagccggtcatggtggtggacacctgtaatcccagctactcaggtggctaaggcaggagaatcacttcagcccgggaggtggaggttgcagtgagccaagatcataccacggcactccagcctgggtgacagtgagactgtggctcaaaaaaaaaaaaaaaaaaggaaaatgaaactaggaaaggtttcttaaagtctgagatatatttgctagatttctaaagaatgtgttctaaaacagcagaagattttcaagaaccggtttccaaagacagtcttctaattcctcattagtaataagtaaaatgtttattgttgtagctctggtatataatccattcctcttaaaatataagacctctggcatgaatatttcatatctataaaatgacagatcccaccaggaaggaagctgttgctttctttgaggtgatttttttcctttgctccctgttgctgaaaccatacagcttcataaataattttgcttgctgaaggaagaaaaagtgtttttcataaacccattatccaggactgtttatagctgttggaaggactaggtcttccctagcccccccagtgtgcaagggcagtgaagacttgattgtacaaaatacgttttgtaaatgttgtgctgttaacactgcaaataaacttggtagcaaaca

SEQ ID NO: 670 - DNA, 6419 bp, Homo sapiens
aaaactgcgactgcgcggcgtgagctcgctgagacttcctggaccccgcaccaggctgtggggtttctcagataactgggcccctgcgctcaggaggccttcaccctctgctctgggtaaagctgcttgtgaattttctgagacggatgtaacaaatactgaacatcatcaacccagtaataatgatttgaacaccactgagaagcgtgcagctgagaggcatccagaaaagtatcagggtagttctgtttcaaacttgcatgtggagccatgtggcacaaatactcatgccagctcattacagcatgagaacagcagtttattactcactaaagacagaatgaatgtagaaaaggctgaattctgtaataaaagcaaacagcctggcttagcaaggagccaacataacagatgggctggaagtaaggaaacatgtaatgataggcggactcccagcacagaaaaaaaggtagatctgaatgctgatcccctgtgtgagagaaaagaatggaataagcagaaactgccatgctcagagaatcctagagatactgaagatgttccttggataacactaaatagcagcattcagaaagttaatgagtggttttccagaagtgatgaactgttaggttctgatgactcacatgatggggagtctgaatcaaatgccaaagtagctgatgtattggacgttctaaatgaggtagatgaatattctggttcttcagagaaaatagacttactggccagtgatcctcatgaggctttaatatgtaaaagtgaaagagttcactccaaatcagtagagagtaatattgaagacaaaatatttgggaaaacctatcggaagaaggcaagcctccccaacttaagccatgtaactgaaaatctaattataggagcatttgttactgagccacagataatacaagagcgtcccctcacaaataaattaaagcgtaaaaggagacctacatcaggccttcatcctgaggattttatcaagaaagcagatttggcagttcaaaagactcctgaaatgataaatcagggaactaaccaaacggagcagaatggtcaagtgatgaatattactaatagtggtcatgagaataaaacaaaaggtgattctattcagaatgagaaaaatcctaacccaatagaatcactcgaaaaagaatctgctttcaaaacgaaagctgaacctataagcagcagtataagcaatatggaactcgaattaaatatccacaattcaaaagcacctaaaaagaataggctgaggaggaagtcttctaccaggcatattcatgcgcttgaactagtagtcagtagaaatctaagcccacctaattgtactgaattgcaaattgatagttgttctagcagtgaagagataaagaaaaaaaagtacaaccaaatgccagtcaggcacagcagaaacctacaactcatggaaggtaaagaacctgcaactggagccaagaagagtaacaagccaaatgaacagacaagtaaaagacatgacagcgatactttcccagagctgaagttaacaaatgcacctggttcttttactaagtgttcaaataccagtgaacttaaagaatttgtcaatcctagccttccaagagaagaaaaagaagagaaactagaaacagttaaagtgtctaataatgctgaagaccccaaagatctcatgttaagtggagaaagggttttgcaaactgaaagatctgtagagagtagcagtatttcattggtacctggtactgattatggcactcaggaaagtatctcgttactggaagttagcactctagggaaggcaaaaacagaaccaaataaatgtgtgagtcagtgtgcagcatttgaaaaccccaagggactaattcatggttgttccaaagataatagaaatgacacagaaggctttaagtatccattgggacatgaagttaaccacagtcgggaaacaagcatagaaatggaagaaagtgaacttgatgctcagtatttgcagaatacattcaaggtttcaaagcgccagtcatttgctccgttttcaaatccaggaaatgcagaagaggaatgtgcaacattctctgcccactctgggtccttaaagaaacaaagtccaaaagtcacttttgaatgtgaacaaaaggaagaaaatcaaggaaagaatgagtctaatatcaagcctgtacagacagttaatatcactgcaggctttcctgtggttggtcagaaagataagccagttgataatgccaaatgtagtatcaaaggaggctctaggttttgtctatcatctcagttcagaggcaacgaaactggactcattactccaaataaacatggacttttacaaaacccatatcgtataccaccactttttcccatcaagtcatttgttaaaactaaatgtaagaaaaatctgctagaggaaaactttgaggaacattcaatgtcacctgaaagagaaatgggaaatgagaacattccaagtacagtgagcacaattagccgtaataacattagagaaaatgtttttaaagaagccagctcaagcaatattaatgaagtaggttccagtactaatgaagtgggctccagtattaatgaaataggttccagtgatgaaaacattcaagcagaactaggtagaaacagagggccaaaattgaatgctatgcttagattaggggttttgcaacctgaggtctataaacaaagtcttcctggaagtaattgtaagcatcctgaaataaaaaagcaagaatatgaagaagtagttcagactgttaatacagatttctctccatatctgatttcagataacttagaacagcctatgggaagtagtcatgcatctcaggtttgttctgagacacctgatgacctgttagatgatggtgaaataaaggaagatactagttttgctgaaaatgacattaaggaaagttctgctgtttttagcaaaagcgtccagaaaggagagcttagcaggagtcctagccctttcacccatacacatttggctcagggttaccgaagaggggccaagaaattagagtcctcagaagagaacttatctagtgaggatgaagagcttccctgcttccaacacttgttatttggtaaagtaaacaatataccttctcagtctactaggcatagcaccgttgctaccgagtgtctgtctaagaacacagaggagaatttattatcattgaagaatagcttaaatgactgcagtaaccaggtaatattggcaaaggcatctcaggaacatcaccttagtgaggaaacaaaatgttctgctagcttgttttcttcacagtgcagtgaattggaagacttgactgcaaatacaaacacccaggatcctttcttgattggttcttccaaacaaatgaggcatcagtctgaaagccagggagttggtctgagtgacaaggaattggtttcagatgatgaagaaagaggaacgggcttggaagaaaataatcaagaagagcaaagcatggattcaaacttaggtgaagcagcatctgggtgtgagagtgaaacaagcgtctctgaagactgctcagggctatcctctcagagtgacattttaaccactcagcagagggataccatgcaacataacctgataaagctccagcaggaaatggctgaactagaagctgtgttagaacagcatgggagccagccttctaacagctacccttccatcataagtgactcttctgcccttgaggacctgcgaaatccagaacaaagcacatcagaaaaagcagtattaacttcacagaaaagtagtgaataccctataagccagaatccagaaggcctttctgctgacaagtttgaggtgtctgcagatagttctaccagtaaaaataaagaaccaggagtggaaaggtcatccccttctaaatgcccatcattagatgataggtggtacatgcacagttgctctgggagtcttcagaatagaaactacccatctcaagaggagctcattaaggttgttgatgtggaggagcaacagctggaagagtctgggccacacgatttgacggaaacatcttacttgccaaggcaagatctagagggaaccccttacctggaatctggaatcagcctcttctctgatgaccctgaatctgatccttctgaagacagagccccagagtcagctcgtgttggcaacataccatcttcaacctctgcattgaaagttccccaattgaaagttgcagaatctgcccagagtccagctgctgctcatactactgatactgctgggtataatgcaatggaagaaagtgtgagcagggagaagccagaattgacagcttcaacagaaagggtcaacaaaagaatgtccatggtggtgtctggcctgaccccagaagaatttatgctcgtgtacaagtttgccagaaaacaccacatcactttaactaatctaattactgaagagactactcatgttgttatgaaaacagatgctgagtttgtgtgtgaacggacactgaaatattttctaggaattgcgggaggaaaatgggtagttagctatttctgggtgacccagtctattaaagaaagaaaaatgctgaatgagcatgattttgaagtcagaggagatgtggtcaatggaagaaaccaccaaggtccaaagcgagcaagagaatcccaggacagaaagatcttcagggggctagaaatctgttgctatgggcccttcaccaacatgcccacagatcaactggaatggatggtacagctgtgtggtgcttctgtggtgaaggagctttcatcattcacccttggcacaggtgtccacccaattgtggttgtgcagccagatgcctggacagaggacaatggcttccatgcaattgggcagatgtgtgaggcacctgtggtgacccgagagtgggtgttggacagtgtagcactctaccagtgccaggagctggacacctacctgataccccagatcccccacagccactactgactgcagccagccacaggtacagagcacaggaccccaagaatgagcttacaaagtggcctttccaggccctgggagctcctctcactcttcagtccttctactgtcctggctactaaatattttatgtacatcagcctgaaaaggacttctggctatgcaagggtcccttaaagattttctgcttgaagtctcccttggaaatctgccatgagcacaaaattatggtaatttttcacctgagaagattttaaaaccatttaaacgccaccaattgagcaagatgctgattcattatttatcagccctattctttctattcaggctgttgttggcttagggctggaagcacagagtggcttggcctcaagagaatagctggtttccctaagtttacttctctaaaaccctgtgttcacaaaggcagagagtcagacccttcaatggaaggagagtgcttgggatcgattatgtgacttaaagtcagaatagtccttgggcagttctcaaatgttggagtggaacattggggaggaaattctgaggcaggtattagaaatgaaaaggaaacttgaaacctgggcatggtggctcacgcctgtaatcccagcactttgggaggccaaggtgggcagatcactggaggtcaggagttcgaaaccagcctggccaacatggtgaaaccccatctctactaaaaatacagaaattagccggtcatggtggtggacacctgtaatcccagctactcaggtggctaaggcaggagaatcacttcagcccgggaggtggaggttgcagtgagccaagatcataccacggcactccagcctgggtgacagtgagactgtggctcaaaaaaaaaaaaaaaaaaggaaaatgaaactaggaaaggtttcttaaagtctgagatatatttgctagatttctaaagaatgtgttctaaaacagcagaagattttcaagaaccggtttccaaagacagtcttctaattcctcattagtaataagtaaaatgtttattgttgtagctctggtatataatccattcctcttaaaatataagacctctggcatgaatatttcatatctataaaatgacagatcccaccaggaaggaagctgttgctttctttgaggtgatttttttcctttgctccctgttgctgaaaccatacagcttcataaataattttgcttgctgaaggaagaaaaagtgtttttcataaacccattatccaggactgtttatagctgttggaaggactaggtcttccctagcccccccagtgtgcaagggcagtgaagacttgattgtacaaaatacgttttgtaaatgttgtgctgttaacactgcaaataaacttggtagcaaaca

SEQ ID NO: 671 - protein, 1567 aa, Homo sapiens
MNVEKAEFCNKSKQPGLARSQHNRWAGSKETCNDRRTPSTEKKVDLNADPLCERKEWNKQKLPCSENPRDTEDVPWITLNSSIQKVNEWFSRSDELLGSDDSHDGESESNAKVADVLDVLNEVDEYSGSSEKIDLLASDPHEALICKSERVHSKSVESNIEDKIFGKTYRKKASLPNLSHVTENLIIGAFVTEPQIIQERPLTNKLKRKRRPTSGLHPEDFIKKADLAVQKTPEMINQGTNQTEQNGQVMNITNSGHENKTKGDSIQNEKNPNPIESLEKESAFKTKAEPISSSISNMELELNIHNSKAPKKNRLRRKSSTRHIHALELVVSRNLSPPNCTELQIDSCSSSEEIKKKKYNQMPVRHSRNLQLMEGKEPATGAKKSNKPNEQTSKRHDSDTFPELKLTNAPGSFTKCSNTSELKEFVNPSLPREEKEEKLETVKVSNNAEDPKDLMLSGERVLQTERSVESSSISLVPGTDYGTQESISLLEVSTLGKAKTEPNKCVSQCAAFENPKGLIHGCSKDNRNDTEGFKYPLGHEVNHSRETSIEMEESELDAQYLQNTFKVSKRQSFAPFSNPGNAEEECATFSAHSGSLKKQSPKVTFECEQKEENQGKNESNIKPVQTVNITAGFPVVGQKDKPVDNAKCSIKGGSRFCLSSQFRGNETGLITPNKHGLLQNPYRIPPLFPIKSFVKTKCKKNLLEENFEEHSMSPEREMGNENIPSTVSTISRNNIRENVFKEASSSNINEVGSSTNEVGSSINEIGSSDENIQAELGRNRGPKLNAMLRLGVLQPEVYKQSLPGSNCKHPEIKKQEYEEVVQTVNTDFSPYLISDNLEQPMGSSHASQVCSETPDDLLDDGEIKEDTSFAENDIKESSAVFSKSVQKGELSRSPSPFTHTHLAQGYRRGAKKLESSEENLSSEDEELPCFQHLLFGKVNNIPSQSTRHSTVATECLSKNTEENLLSLKNSLNDCSNQVILAKASQEHHLSEETKCSASLFSSQCSELEDLTANTNTQDPFLIGSSKQMRHQSESQGVGLSDKELVSDDEERGTGLEENNQEEQSMDSNLGEAASGCESETSVSEDCSGLSSQSDILTTQQRDTMQHNLIKLQQEMAELEAVLEQHGSQPSNSYPSIISDSSALEDLRNPEQSTSEKAVLTSQKSSEYPISQNPEGLSADKFEVSADSSTSKNKEPGVERSSPSKCPSLDDRWYMHSCSGSLQNRNYPSQEELIKVVDVEEQQLEESGPHDLTETSYLPRQDLEGTPYLESGISLFSDDPESDPSEDRAPESARVGNIPSSTSALKVPQLKVAESAQSPAAAHTTDTAGYNAMEESVSREKPELTASTERVNKRMSMVVSGLTPEEFMLVYKFARKHHITLTNLITEETTHVVMKTDAEFVCERTLKYFLGIAGGKWVVSYFWVTQSIKERKMLNEHDFEVRGDVVNGRNHQGPKRARESQDRKIFRGLEICCYGPFTNMPTDQLEWMVQLCGASVVKELSSFTLGTGVHPIVVVQPDAWTEDNGFHAIGQMCEAPVVTREWVLDSVALYQCQELDTYLIPQIPHSHY

SEQ ID NO: 672 - DNA, 3559 bp, Homo sapiens
aaaactgcgactgcgcggcgtgagctcgctgagacttcctggaccccgcaccaggctgtggggtttctcagataactgggcccctgcgctcaggaggccttcaccctctgctctgggtaaagttcattggaacagaaagaaatggatttatctgctcttcgcgttgaagaagtacaaaatgtcattaatgctatgcagaaaatcttagagtgtcccatctgtctggagttgatcaaggaacctgtctccacaaagtgtgaccacatattttgcaaattttgcatgctgaaacttctcaaccagaagaaagggccttcacagtgtcctttatgtaagaatgatataaccaaaaggagcctacaagaaagtacgagatttagtcaacttgttgaagagctattgaaaatcatttgtgcttttcagcttgacacaggtttggagtatgcaaacagctataattttgcaaaaaaggaaaataactctcctgaacatctaaaagatgaagtttctatcatccaaagtatgggctacagaaaccgtgccaaaagacttctacagagtgaacccgaaaatccttccttgcaggaaaccagtctcagtgtccaactctctaaccttggaactgtgagaactctgaggacaaagcagcggatacaacctcaaaagacgtctgtctacattgaattgggtgaagcagcatctgggtgtgagagtgaaacaagcgtctctgaagactgctcagggctatcctctcagagtgacattttaaccactcagcagagggataccatgcaacataacctgataaagctccagcaggaaatggctgaactagaagctgtgttagaacagcatgggagccagccttctaacagctacccttccatcataagtgactcttctgcccttgaggacctgcgaaatccagaacaaagcacatcagaaaaagcagtattaacttcacagaaaagtagtgaataccctataagccagaatccagaaggcctttctgctgacaagtttgaggtgtctgcagatagttctaccagtaaaaataaagaaccaggagtggaaaggtcatccccttctaaatgcccatcattagatgataggtggtacatgcacagttgctctgggagtcttcagaatagaaactacccatctcaagaggagctcattaaggttgttgatgtggaggagcaacagctggaagagtctgggccacacgatttgacggaaacatcttacttgccaaggcaagatctagagggaaccccttacctggaatctggaatcagcctcttctctgatgaccctgaatctgatccttctgaagacagagccccagagtcagctcgtgttggcaacataccatcttcaacctctgcattgaaagttccccaattgaaagttgcagaatctgcccagagtccagctgctgctcatactactgatactgctgggtataatgcaatggaagaaagtgtgagcagggagaagccagaattgacagcttcaacagaaagggtcaacaaaagaatgtccatggtggtgtctggcctgaccccagaagaatttatgctcgtgtacaagtttgccagaaaacaccacatcactttaactaatctaattactgaagagactactcatgttgttatgaaaacagatgctgagtttgtgtgtgaacggacactgaaatattttctaggaattgcgggaggaaaatgggtagttagctatttctgggtgacccagtctattaaagaaagaaaaatgctgaatgagcatgattttgaagtcagaggagatgtggtcaatggaagaaaccaccaaggtccaaagcgagcaagagaatcccaggacagaaagatcttcagggggctagaaatctgttgctatgggcccttcaccaacatgcccacagatcaactggaatggatggtacagctgtgtggtgcttctgtggtgaaggagctttcatcattcacccttggcacaggtgtccacccaattgtggttgtgcagccagatgcctggacagaggacaatggcttccatgcaattgggcagatgtgtgaggcacctgtggtgacccgagagtgggtgttggacagtgtagcactctaccagtgccaggagctggacacctacctgataccccagatcccccacagccactactgactgcagccagccacaggtacagagcacaggaccccaagaatgagcttacaaagtggcctttccaggccctgggagctcctctcactcttcagtccttctactgtcctggctactaaatattttatgtacatcagcctgaaaaggacttctggctatgcaagggtcccttaaagattttctgcttgaagtctcccttggaaatctgccatgagcacaaaattatggtaatttttcacctgagaagattttaaaaccatttaaacgccaccaattgagcaagatgctgattcattatttatcagccctattctttctattcaggctgttgttggcttagggctggaagcacagagtggcttggcctcaagagaatagctggtttccctaagtttacttctctaaaaccctgtgttcacaaaggcagagagtcagacccttcaatggaaggagagtgcttgggatcgattatgtgacttaaagtcagaatagtccttgggcagttctcaaatgttggagtggaacattggggaggaaattctgaggcaggtattagaaatgaaaaggaaacttgaaacctgggcatggtggctcacgcctgtaatcccagcactttgggaggccaaggtgggcagatcactggaggtcaggagttcgaaaccagcctggccaacatggtgaaaccccatctctactaaaaatacagaaattagccggtcatggtggtggacacctgtaatcccagctactcaggtggctaaggcaggagaatcacttcagcccgggaggtggaggttgcagtgagccaagatcataccacggcactccagcctgggtgacagtgagactgtggctcaaaaaaaaaaaaaaaaaaggaaaatgaaactaggaaaggtttcttaaagtctgagatatatttgctagatttctaaagaatgtgttctaaaacagcagaagattttcaagaaccggtttccaaagacagtcttctaattcctcattagtaataagtaaaatgtttattgttgtagctctggtatataatccattcctcttaaaatataagacctctggcatgaatatttcatatctataaaatgacagatcccaccaggaaggaagctgttgctttctttgaggtgatttttttcctttgctccctgttgctgaaaccatacagcttcataaataattttgcttgctgaaggaagaaaaagtgtttttcataaacccattatccaggactgtttatagctgttggaaggactaggtcttccctagcccccccagtgtgcaagggcagtgaagacttgattgtacaaaatacgttttgtaaatgttgtgctgttaacactgcaaataaacttggtagcaaaca

SEQ ID NO: 673 - protein, 680 aa, Homo sapiens
MDLSALRVEEVQNVINAMQKILECPICLELIKEPVSTKCDHIFCKFCMLKLLNQKKGPSQCPLCKNDITKRSLQESTRFSQLVEELLKIICAFQLDTGLEYANSYNFAKKENNSPEHLKDEVSIIQSMGYRNRAKRLLQSEPENPSLQETSLSVQLSNLGTVRTLRTKQRIQPQKTSVYIELGEAASGCESETSVSEDCSGLSSQSDILTTQQRDTMQHNLIKLQQEMAELEAVLEQHGSQPSNSYPSIISDSSALEDLRNPEQSTSEKAVLTSQKSSEYPISQNPEGLSADKFEVSADSSTSKNKEPGVERSSPSKCPSLDDRWYMHSCSGSLQNRNYPSQEELIKVVDVEEQQLEESGPHDLTETSYLPRQDLEGTPYLESGISLFSDDPESDPSEDRAPESARVGNIPSSTSALKVPQLKVAESAQSPAAAHTTDTAGYNAMEESVSREKPELTASTERVNKRMSMVVSGLTPEEFMLVYKFARKHHITLTNLITEETTHVVMKTDAEFVCERTLKYFLGIAGGKWVVSYFWVTQSIKERKMLNEHDFEVRGDVVNGRNHQGPKRARESQDRKIFRGLEICCYGPFTNMPTDQLEWMVQLCGASVVKELSSFTLGTGVHPIVVVQPDAWTEDNGFHAIGQMCEAPVVTREWVLDSVALYQCQELDTYLIPQIPHSHY

SEQ ID NO: 674 - DNA, 1909 bp, Homo sapiens
gctggtggtggcgcgcggcgcggcgcggcgatggcggcgggtggcagcgatccgcgggctggcgacgtagaggaggacgcctcacagctcatctttcctaaagagtttgaaacagctgagacacttctaaattcagaagttcatatgcttctggaacatcgaaagcagcagaatgagagtgcagaggacgaacaggagctctcagaagtcttcatgaaaacattaaactacacagcccgtttcagtcgtttcaaaaacagagagaccattgccagtgttcgtagcttgctactccagaaaaagcttcataagtttgagttggcctgtttggccaacctttgcccagagactgctgaggagtccaaggctctaatcccaagcttggagggacggtttgaagatgaggagctgcagcagattcttgatgatatccagacaaagcgcagctttcagtattaatctccaaacatcactgctgctcggagaaaccacatccccaggcataacaccaccttcccactgtctggggctgacttgcacagaaattctgttgaagacagttgagaattcctttggagaaaacagcccagcttggcgtggggttaggttgctgtttcaaataactcacaggcccaggtgacatggaatcttggagcagccttgtgcagtggcagccagtggcttcctgaacgtgcctctgcgaagtgtgagatgaggggtcacataaccacactgttgactacctcattcctggtttttggcctccacatcatcttttttcttaatatttcatgttttaatttcagggtgtttatactttttgaaactagaccagaagatagtagactttatagagaaagaccagttttacctagatactaaaggaagaattaaaccgctgttagtttgaaatgctttttttttttttttttaaatggagatagggtcttaactcttgtccaggctggaggagtgcagtcgtacagtcatggctcactgaagtcttgaccccgctgcctcagcctcccaaataactggggccacaggtgtgcaccacaactctcagctaatttttaaaattttttatagaggtggggttttactatgctgtccagactggtcttaaactcctgggctcaagtgatccccctgccttggcctcccaaactggtgagattacaggcatgagccaccacaactggcctgaaattcttaaaggatgggagtgtcgatgacagcaccttggcatcgttgtgcctaacctgggagacggaagaagcacgccatgggaagtgtttacacttgggggacaagtgctaagtattgtggagcccatagccccttgagatagatggctactttgcctttcttcttgaactgtcttgcagaatgtggatttggggtaagtggtcttgaaggattcatttagtcaccctcaaattaagatttttacttcatctttcttgggcctgcacctccaagataacaaagaagaagcaatggtcgtgccaaagaggtccacaaccaggtgtgcactgttcactgcagcccatttgctgtatgaactgtggttgttgtgtgcccaatgacaaggctactaagaaattcatcatttgaaacgtagaggccgcagcagtcagcgatgtttctgaaatgagcatccttgacgcctgtgtacttcccaggctggatgtgaagctacattaccatgtgagttgtgccattcacagcacagtggtgaggaattgagctcatgaagcaggcaaggaccgaacacctccaccccaacgtagacctgcaggtgctgccccatgacctccaccaaagcccatataaggagcggagttgttaaggactgaagaaaaacttctctggagaaaaataaaattgcaattctacttaaaaaaaa

SEQ ID NO: 675 - protein, 142 aa, Homo sapiens
MAAGGSDPRAGDVEEDASQLIFPKEFETAETLLNSEVHMLLEHRKQQNESAEDEQELSEVFMKTLNYTARFSRFKNRETIASVRSLLLQKKLHKFELACLANLCPETAEESKALIPSLEGRFEDEELQQILDDIQTKRSFQY

SEQ ID NO: 676 - DNA, 2924 bp, Homo sapiens
ggcccataagtacctgcctgccttagatgagttcccccatcctccaaagaggcttaggtcagacccagacgcgtgccccaccatgcccctgttggccatgctgctccgcgggctgacacagatccagagtcggatcctgggcccggggaggaagtgctgtgcgctggccaacctggctgacatgctgactgtgtttgcgctgacagaggacgacccccaggaggtgtctgcaaccgtgtatctggacaaactggccacggtgatctctgtgtggaactcggacacccagaatccctaccaccagcaggcgctggcagagaaggtgaaggaggcagaacgggatgtcagcctgacctcgctggccaaactccccagtgagaccattttcgtgggctgcgagttcctgcaccacctgctgcgggagtggggggaggagttgcaggccgtgctccgcagcagccaggggacaagttacgacagctaccggctgtgcgacagtctgacttccttcagccagaacgcgacgctctacctgaaccgcaccagcctgtccaaggaggacaggcaggtggtctctgagctggcggagtgtgtcagggacttcctgaggaaaacgagcacggtgctgaagaacagggccttggaggatatcacagcttccattgccatggccgtcatccagcagaagatggaccgccatatggaagtgtgctacatttttgcctctgagaagaagtgggccttctcggacgagtgggtagcctgcctggggagtaacagggccctcttccgagagccagacttggtgttgaggctgctggaaacagtgatagacgtcagcacagctgacagagccatccctgagtctcagatccggcaggtgatccacctgatcctggaatgttacgcagacctctccctgccaggtaaaaataaagtccttgcaggtatcctgcgttcctgggggcgaaagggcctctctgaaaagttgctggcttatgtggagggttttcaggaagacctcaatacaacttttaaccagctcactcagagtgcctccgaacagggcttggcaaaagctgtggcctccgtggcccgcctggtcatagtgcacccggaagtcacggtgaagaaaatgtgcagcctggctgtggtcaatctcggcacccacaagttcctggcccagattctcactgccttccctgcccttaggtttgtggaagtgcagggtcccaattcatctgccactttcatggtgtcatgcctcaaagaaaccgtctggatgaagttctctacacccaaggaagaaaagcaatttttagagctcctgaactgcctgatgagtcccgtgaaaccccaagggattccagtggctgctcttcttgagccagacgaggtgctgaaggaatttgtcctgcctttcttgaggttagatgttgaagaggtagacctcagtctgaggatcttcatccagactctagaggcaaacgcgtgccgagaggaatactggctccagacctgctccccgtttccactcctcttcagcttgtgccagctcttggaccgcttcagcaaatactggcagcttcccaaggagaagcggtgcctctctttggataggaaggatctagcgatccatatcctggagctcctgtgtgagattgtatcagccaatgctgagaccttctccccggatgtctggatcaagtccctgtcctggctccaccgcaagttagaacagctagactggactgtgggcctgaggctgaagagcttcttcgaggggcacttcaagtgtgaagtgccagccacactttttgagatctgtaagctttcagaagacgagtggacctcccaggcccacccagggtacggggctggcacggggctcctggcctggatggagtgctgctgcgtctccagcggcatctcggagaggatgctgtctctcttggtggtggacgtgggcaatcctgaggaggtcagactgttcagcaaaggctttctggtggccctggtgcaagtcatgccttggtgcagccctcaggagtggcagcgccttcaccagctgaccaggagactgctggagaagcagctcctccatgtcccttatagcctggaatatattcagtttgttcccctgctcaacctgaagccctttgcccaggagttgcaactctccgtcctcttcctgaggactttccagtttctctgcagccatagctgtcgtaattggcttcctctggaaggctggaaccacgtggtcaaactcctctgtggcagtctgacccgcctcctggactcagtcagggcgatacaggcagctggcccttgggttcaaggaccagagcaggacctgacccaggaagccctgtttgtttacacccaggtgttctgccatgctctgcacatcatggccatgctccacccggaggtctgtgagccactctacgttttagccttggaaaccctcacctgctatgagactttgagcaagaccaacccttctgtcagctccttgctccagagggcacacgagcagcgcttcttaaagtccattgctgagggcattggccctgaagaacggcgccaaaccctgttgcagaagatgagcagcttctgacttggcgtggggagctgggccccaacatggcgggtctgcagaagatcagcagcttcttacctgtgcgggagcgaaaaagctgggcttcaacatggcaggtctgtaggggtcagacccaagcagcctggactttacagttatgtgaaactgtccacaaaaagtcatggcaataatggtgtaaagaaaatagtttcttgggtatttgtaacgtacaaactatcataaaaattctcctctttcgcatctcaaaaaaaaaaaaaaaaaaaaaaaaaaaaaaaaaaaaaaaaaaaaaaaaaaaaaa

SEQ ID NO: 677 - protein, 1058 aa, Homo sapiens
MDLGPLNICEEMTILHGGFLLAEQLFHPKALAELTKSDWERVGRPIVEALREISSAAAHSQPFAWKKKALIIIWAKVLQPHPVTPSDTETRWQEDLFFSVGNMIPTINHTILFELLKSLEASGLFIQLLMALPTTICHAELERFLEHVTVDTSAEDVAFFLDIWWEVMKHKGHPQDPLLSQFSAMAHKYLPALDEFPHPPKRLRSDPDACPTMPLLAMLLRGLTQIQSRILGPGRKCCALANLADMLTVFALTEDDPQEVSATVYLDKLATVISVWNSDTQNPYHQQALAEKVKEAERDVSLTSLAKLPSETIFVGCEFLHHLLREWGEELQAVLRSSQGTSYDSYRLCDSLTSFSQNATLYLNRTSLSKEDRQVVSELAECVRDFLRKTSTVLKNRALEDITASIAMAVIQQKMDRHMEVCYIFASEKKWAFSDEWVACLGSNRALFREPDLVLRLLETVIDVSTADRAIPESQIRQVIHLILECYADLSLPGKNKVLAGILRSWGRKGLSEKLLAYVEGFQEDLNTTFNQLTQSASEQGLAKAVASVARLVIVHPEVTVKKMCSLAVVNLGTHKFLAQILTAFPALRFVEVQGPNSSATFMVSCLKETVWMKFSTPKEEKQFLELLNCLMSPVKPQGIPVAALLEPDEVLKEFVLPFLRLDVEEVDLSLRIFIQTLEANACREEYWLQTCSPFPLLFSLCQLLDRFSKYWPLPKEKRCLSLDRKDLAIHILELLCEIVSANAETFSPDVWIKSLSWLHRKLEQLDWTVGLRLKSFFEGHFKCEVPATLFEICKLSEDEWTSQAHPGYGAGTGLLAWMECCCVSSGISERMLSLLVVDVGNPEEVRLFSKGFLVALVQVMPWCSPQEWQRLHQLTRRLLEKQLLHVPYSLEYIQFVPLLNLKPFAQELQLSVLFLRTFQFLCSHSCRNWLPLEGWNHVVKLLCGSLTRLLDSVRAIQAAGPWVQGPEQDLTQEALFVYTQVFCHALHIMAMLHPEVCEPLYVLALETLTCYETLSKTNPSVSSLLQRAHEQRFLKSIAEGIGPEERRQTLLQKMSSF

SEQ ID NO: 678 - DNA, 3472 bp, Homo sapiens
tggcggccgccggcgtcgccgccatggacctaggacccttgaacatctgtgaagaaatgactattctgcatggaggcttcttgctggccgagcagctgttccaccctaaggcactggcagaattaacaaagtctgactgggaacgtgttggacggcccatcgtggaggccttaagggagatctcctcggctgcagcacactcccagccctttgcctggaagaagaaagccctgatcatcatctgggccaaggttctgcagccgcaccccgtgaccccgtccgacacagagacacggtggcaggaagacctgttcttctcggtgggcaacatgatccccaccatcaaccacaccatcctcttcgagctgctcaaatccctggaagcttctggactctttatccagctcctgatggccctgcccaccaccatctgccatgcagaactagagcgctttctggaacatgtgaccgttgacacttctgccgaagacgtggccttcttcctggacatctggtgggaggtgatgaagcacaagggtcacccgcaggaccccctgctctcccagtttagtgcaatggcccataagtacctgcctgccttagatgagttcccccatcctccaaagaggcttaggtcagacccagacgcgtgccccaccatgcccctgttggccatgctgctccgcgggctgacacagatccagagtcggatcctgggcccggggaggaagtgctgtgcgctggccaacctggctgacatgctgactgtgtttgcgctgacagaggacgacccccaggaggtgtctgcaaccgtgtatctggacaaactggccacggtgatctctgtgtggaactcggacacccagaatccctaccaccagcaggcgctggcagagaaggtgaaggaggcagaacgggatgtcagcctgacctcgctggccaaactccccagtgagaccattttcgtgggctgcgagttcctgcaccacctgctgcgggagtggggggaggagttgcaggccgtgctccgcagcagccaggggacaagttacgacagctaccggctgtgcgacagtctgacttccttcagccagaacgcgacgctctacctgaaccgcaccagcctgtccaaggaggacaggcaggtggtctctgagctggcggagtgtgtcagggacttcctgaggaaaacgagcacggtgctgaagaacagggccttggaggatatcacagcttccattgccatggccgtcatccagcagaagatggaccgccatatggaagtgtgctacatttttgcctctgagaagaagtgggccttctcggacgagtgggtagcctgcctggggagtaacagggccctcttccgagagccagacttggtgttgaggctgctggaaacagtgatagacgtcagcacagctgacagagccatccctgagtctcagatccggcaggtgatccacctgatcctggaatgttacgcagacctctccctgccaggtaaaaataaagtccttgcaggtatcctgcgttcctgggggcgaaagggcctctctgaaaagttgctggcttatgtggagggttttcaggaagacctcaatacaacttttaaccagctcactcagagtgcctccgaacagggcttggcaaaagctgtggcctccgtggcccgcctggtcatagtgcacccggaagtcacggtgaagaaaatgtgcagcctggctgtggtcaatctcggcacccacaagttcctggcccagattctcactgccttccctgcccttaggtttgtggaagtgcagggtcccaattcatctgccactttcatggtgtcatgcctcaaagaaaccgtctggatgaagttctctacacccaaggaagaaaagcaatttttagagctcctgaactgcctgatgagtcccgtgaaaccccaagggattccagtggctgctcttcttgagccagacgaggtgctgaaggaatttgtcctgcctttcttgaggttagatgttgaagaggtagacctcagtctgaggatcttcatccagactctagaggcaaacgcgtgccgagaggaatactggctccagacctgctccccgtttccactcctcttcagcttgtgccagctcttggaccgctttagcaaatactggccgcttcccaaggagaagcggtgcctctctttggataggaaggatctagcgatccatatcctggagctcctgtgtgagattgtatcagccaatgctgagaccttctccccggatgtctggatcaagtccctgtcctggctccaccgcaagttagaacagctagactggactgtgggcctgaggctgaagagcttcttcgaggggcacttcaagtgtgaagtgccagccacactttttgagatctgtaagctttcagaagacgagtggacctcccaggcccacccagggtacggggctggcacggggctcctggcctggatggagtgctgctgcgtctccagcggcatctcggagaggatgctgtctctcttggtggtggacgtgggcaatcctgaggaggtcagactgttcagcaaaggctttctggtggccctggtgcaagtcatgccttggtgcagccctcaggagtggcagcgccttcaccagctgaccaggagactgctggagaagcagctcctccatgtcccttatagcctggaatatattcagtttgttcccctgctcaacctgaagccctttgcccaggagttgcaactctccgtcctcttcctgaggactttccagtttctctgcagccatagctgtcgtaattggcttcctctggaaggctggaaccacgtggtcaaactcctctgtggcagtctgacccgcctcctggactcagtcagggcgatacaggcagctggcccttgggttcaaggaccagagcaggacctgacccaggaagccctgtttgtttacacccaggtgttctgccatgctctgcacatcatggccatgctccacccggaggtctgtgagccactctacgttttagccttggaaaccctcacctgctatgagactttgagcaagaccaacccttctgtcagctccttgctccagagggcacacgagcagcgcttcttaaagtccattgctgagggcattggccctgaagaacggcgccaaaccctgttgcagaagatgagcagcttctgacttggcgtggggagctgggccccaacatggcgggtctgcagaagatcagcagcttcttacctgtgcgggagcgaaaaagctgggcttcaacatggcaggtctgtaggggtcagacccgagcagcctggactttacagttatgtgaaactgtccacaaaaagtcatggcaataatggtgtaaagaaaatagtttcttgggtatttgtaacgtacaaactatcataaaaattctcctctttcgcatctcaaaaaaaaaaaaaaaaaaaaaaaaa

SEQ ID NO: 679 - DNA, 2139 bp, Homo sapiens
cctttttggagacagattcgcagtggtcgcttcttctccttggatttgttaaggattccaagtaactcttatttggagagaagacgatctgcacttcgcattttggcattgacatttaattttagggtcctttatatagaagggagagtaggtaaactgatttttttttttaacagggagggtttgacaatctttggcagacttggagcaaaagattgaggtgcatttcatgcctccttttgagagtcttgctctgtcgcccaggctgtagtgcagtggcgcaatcttggctgcaacctcagcctcccaagtagctgggattacaaacataagccaccacgcccagccctcatacctcttttaaaagtcgacctgttttgcagaaagtctgctgtttttgtactaaaggctttggaatttggcatttagctaggaatgcacattctttcacctcattcatactttaagaaccacagaagtgactctgcttggccagaaggcacactgtgttggtggttatattaaaagtccttgagtattttgcttttcatgatcttgctcactgcaacttccgcctcccaggttcaggcgattctcctgcctcagcctcccaagtagctgcgactacaggcgtgtagcaccacacctggctaatttttgtatttttagtagagatgaggtttcaccatattggccaggctgttctcaactcctgacctcgtgatccgcccacctcagcctcctaaagtgctgggattacagctgtgagccaccctgcccggccacttttgtatgatttctaatgtatttgtaatttacctaacaaattgcctaatctgctatgttaatgtatttatgaattaaaataaatacgactgcatgtttgtggttcatttttgtggaggtggctgtggtgacatcagccaagaatctgaatggtactgttgaaggaaactagcatgatagcttcagttctaaaggccctgaaacctagtctcaggtgggtcccccttgggttcactttatattggcagtttattgggaaaatggatattaggtcctgaccaataggaccgtaagtctgggttgagtgcaagatgagttagaccgattctttagcttcctgcagtgtagtggaggaaaaatcgatggtagcaacgggaggttgtatccctagctgatgagttgtatgagcctctactacctggcgcacctccgcctgaagattgccagaattgcttgcctcatgacgtgagtcacaatggaaactttgtcaagccccctgcactggctgccaacataaatgttcagtaccctgaaggatgggactgaagggggatcatctagaaggtaaagttacctactggcataggggaggtgggacagccgttaagccatttggaacttgatggagacaggtttgagggaggtgggtgagattggagtttggtggactgtagagcttgcttgccaaggtgttgaggtcagggttggtttgagaatggaagctagttactagctatgattgtgggggaacacagcttgatttttcttacaagctaagaggagtgaggcagtgtttaagagggcatgttaaatgcagccaggcttggtggctcacacccgtaatcccagcacttaggctaaggcaggcggatcacaacatctagagatcctggccaacgcggtgaaaccctgtctgtactaaaaatacaaaataactgggcatggtggtgtgcacctgtgggaggctgaggcagaattgctggaacccgggagatggaggttgtactgagctgagaccttgccactgcgctccagcctggtgacagagttaagtctcaaaaaaaaggcatcttcctaaagcaattgtatttgtgcttacctgtgccaggcactgttctaggtaagcactaagtgggctttaatacagcatattccaatggggaatcccaggaaccaaaagactaattgtccaagtccacaactagaagtggcacctctgcagaaacaagcatcaaattccctgctcaggaagaagccagatgagtcagccccattcgtctgtatgcccagtcccatccgtgtcctgctgtaactacatagatctcacctgagtaaagtgatttttttctgaat

SEQ ID NO: 680 - DNA, 1523 bp, Homo sapiens
cagcacagctgacagccgtgctcaggaagtttctggatcctaggctcatctccacagaggagaacacacaggcagcagagaccatggggcccctctcagcccctccctgcacagagcacatcaaatggaaggggctcctggtcacagcatcacttttaaacttctggaacctgcccaccactgcccaagtcacgattgaagcccagccaccaaaagtttccgaggggaaggatgttcttctacttgtccacaatttgccccagaatcttactggctacatctggtacaaagggcaaatcagggacctctaccattacattacatcatatgtagtagacggtcaaataattatatatgggcctgcatatagtggacgagaaacagcatattccaatgcatccctgctgatccagaatgtcacccgggaggacgcaggatcctacaccttacacatcataaagcgaggtgatgggactagaggagtaactggatatttcaccttcaccttatacctggagactcccaagccctccatctccagcagcaacttaaaccccagggaggccatggaaactgtgatcttaacctgtgatcctgagactccggacacaagctaccagtggtggatgaatggtcagagcctccctatgactcataggtttcagctgtccgaaaccaacaggaccctctttctatttggtgtcacaaagtatactgcaggaccctatgaatgtgaaatacggaactcagggagtgccagccgcagtgacccagtcaccctgaatctcctccatggtccagacctccccagaattcacccttcatacaccaattaccgttcaggagataacctctacttgtcttgcttcgcgaactctaacccaccggcacagtattcttggacaattaatgggaagtttcagcaatcaggacaaaatctgtttatcccccaaattactacaaagcatagcgggctctatgtttgctctgttcgtaactcagccactgggcaggaaagctccacatcgttgacagtcaaagtctctgcttctacaagaataggacttcttcctctccttaatccaacatagcagctgtgatgtcatttctgtatttcaggaagactggcaggagatttatggaaaggtctcttacaaggactcttgaatacaagctcctgataacttcaagatcataccactggactaagaactttcaaaattttaatgaacaggctgataccttcatgaaattcaagacaaagaagaaaaatactcaatgttattggactaaataatcaaaaggataatgatttcataattttctatttgaaaatgtgctgattcttggaatgtttcattctccagatttatgaacattttttcttgagcaattggtaaagtatacttttgtaaacaaaaattgaaacatttccttttgctctctatctgagtgccccagaattgggaatctattcatgagtattcatatgtttatggtaataaagctatttgcacaagttc

SEQ ID NO: 681 - protein, 335 aa, Homo sapiens
MGPLSAPPCTEHIKWKGLLVTASLLNFWNLPTTAQVTIEAQPPKVSEGKDVLLLVHNLPQNLTGYIWYKGQIRDLYHYITSYVVDGQIIIYGPAYSGRETAYSNASLLIQNVTREDAGSYTLHIIKRGDGTRGVTGYFTFTLYLETPKPSISSSNLNPREAMETVILTCDPETPDTSYQWWMNGQSLPMTHRFQLSETNRTLFLFGVTKYTAGPYECEIRNSGSASRSDPVTLNLLHGPDLPRIHPSYTNYRSGDNLYLSCFANSNPPAQYSWTINGKFQQSGQNLFIPQITTKHSGLYVCSVRNSATGQESSTSLTVKVSASTRIGLLPLLNPT

SEQ ID NO: 682 - DNA, 1908 bp, Homo sapiens
gaaagatggcgtcctcggagcaggcagagcagccgagccagccaagctctactccaggaagtgaaaatgtgctgcctcgagagccgctgattgccacggcagtgaagtttctacagaattcccgggtccgccagagcccacttgcaaccaggagagcatttctaaagaagaaagggctgacagatgaagagattgatatggccttccagcagtcgggcactgctgccgatgagccttcgtccttgggcccagccacacaggtggttcctgtccagccccctcacctcatatctcagccatacagtcccgcaggctcccgatggcgagattacggcgccctggccatcatcatggcaggcattgcatttggctttcaccagctctacaagaaatacctgctccccctcatcctgggcggccgagaggacagaaagcagctggagaggatggaggccggtctctctgagctgagtggcagcgtggcccagacagtgactcagttacagacgaccctcgcctccgtccaggagctgctgattcagcagcagcagaagatccaggagcttgcccacgagctggccgctgccaaggccaccacatccaccaactggatcctggagtcccagaatatcaacgaactcaagtccgaaattaactccttgaaagggcttcttttaaatcggaggcagttccctccatccccatcagccccgaagatcccctcctggcagatcccagtcaagtcaccgtcaccctccagccctgcggccgtgaaccaccacagcagcagcgacatctcacctgtcagcaacgagtccacgtcgtcctcgcctgggaaggagggccacagccccgagggctccacggtcacctaccacttgctgggcccccaggaggaaggcgagggggtggtggacgtcaagggccaggtgcggatggaggtgcaaggcgaggaggagaagagggaggacaaggaggacgaggaggatgaggaggatgatgatgtgagccatgtggacgaggaggactgcctgggggtgcagagggaggaccgccggggcggggatgggcagatcaacgagcaggtggagaagctgcggcggcccgagggcgccagcaacgagagtgagcgggactagggctgcgcctgctgcctccagccctgaggatggcatctagtgtgcccgtgcgtggccataccctgcctccctctctggccctgggagggcagcttggagcccaggtagggggcagagctgtcctcagctgcactgcggcctggtggcagtgtggggagtcacacttctgtccacctggcctcctctcgcctggccgccagccccagccccagccccagccccaggcccagctgcctttggctttgatctcaagtcaggctgaaggcagcgaagcctcggggcccaagcccctccccagccccctctcccggacagacgccttgcccagggtgtgtttgctgagtgtcttgactaccgtgacaccacgcatggccagagctagcgtccctactgcctcccgactcctcagtggaggaggagctgcggtccctctggtgtctgccatccccctccctccctgggcccggccctggacccgtcaggtgcctgtccccagccccaaccccactcatgccccgtcgtcctcccagacaaatgaaaccacgctgcgcttccgatgcccccgcttgccgtgtaatggttcagctaatcccatggcgagatgggggctcattccggaggaggagccaggcagcagggccttcctgaccaacagccagttttgtccttccccccaggaaaaaaatgttcatttgtgtgatcatgtatagacctcagaacggaagataggactgtatataattgtaataaataccagttgccactattt

SEQ ID NO: 683 - protein, 377 aa, Homo sapiens
MASSEQAEQPSQPSSTPGSENVLPREPLIATAVKFLQNSRVRQSPLATRRAFLKKKGLTDEEIDMAFQQSGTAADEPSSLGPATQVVPVQPPHLISQPYSPAGSRWRDYGALAIIMAGIAFGFHQLYKKYLLPLILGGREDRKQLERMEAGLSELSGSVAQTVTQLQTTLASVQELLIQQQQKIQELAHELAAAKATTSTNWILESQNINELKSEINSLKGLLLNRRQFPPSPSAPKIPSWQIPVKSPSPSSPAAVNHHSSSDISPVSNESTSSSPGKEGHSPEGSTVTYHLLGPQEEGEGVVDVKGQVRMEVQGEEEKREDKEDEEDEEDDDVSHVDEEDCLGVQREDRRGGDGQINEQVEKLRRPEGASNESERD

SEQ ID NO: 684 - DNA, 2903 bp, Homo sapiens
tgaaggctggttgttcagactgagcttcctgcctgcctgtaccccgccaacagcttcagaagaaggtgactggtggctgcctgaggaataccagtgggcaagagaattagcatttctggagcatctgctgtctgagcagcccctgggtgcgtccactttctgggcacgtgaggttgggccttggccgcctgagcccttgagttggtcacttgaaccttgggaatattgagattatattctcctgccttttaaaaagatggacttcagcagaaatctttatgatattggggaacaactggacagtgaagatctggcctccctcaagttcctgagcctggactacattccgcaaaggaagcaagaacccatcaaggatgccttgatgttattccagagactccaggaaaagagaatgttggaggaaagcaatctgtccttcctgaaggagctgctcttccgaattaatagactggatttgctgattacctacctaaacactagaaaggaggagatggaaagggaacttcagacaccaggcagggctcaaatttctgcctacaggttccacttctgccgcatgagctgggctgaagcaaacagccagtgccagacacagtctgtacctttctggcggagggtcgatcatctattaataagggtcatgctctatcagatttcagaagaagtgagcagatcagaattgaggtcttttaagtttcttttgcaagaggaaatctccaaatgcaaactggatgatgacatgaacctgctggatattttcatagagatggagaagagggtcatcctgggagaaggaaagttggacatcctgaaaagagtctgtgcccaaatcaacaagagcctgctgaagataatcaacgactatgaagaattcagcaaaggggaggagttgtgtggggtaatgacaatctcggactctccaagagaacaggatagtgaatcacagactttggacaaagtttaccaaatgaaaagcaaacctcggggatactgtctgatcatcaacaatcacaattttgcaaaagcacgggagaaagtgcccaaacttcacagcattagggacaggaatggaacacacttggatgcaggggctttgaccacgacctttgaagagcttcattttgagatcaagccccacgatgactgcacagtagagcaaatctatgagattttgaaaatctaccaactcatggaccacagtaacatggactgcttcatctgctgtatcctctcccatggagacaagggcatcatctatggcactgatggacaggaggcccccatctatgagctgacatctcagttcactggtttgaagtgcccttcccttgctggaaaacccaaagtgttttttattcaggcttgtcagggggataactaccagaaaggtatacctgttgagactgattcagaggagcaaccctatttagaaatggatttatcatcacctcaaacgagatatatcccggatgaggctgactttctgctggggatggccactgtgaataactgtgtttcctaccgaaaccctgcagagggaacctggtacatccagtcactttgccagagcctgagagagcgatgtcctcgaggcgatgatattctcaccatcctgactgaagtgaactatgaagtaagcaacaaggatgacaagaaaaacatggggaaacagatgcctcagcctactttcacactaagaaaaaaacttgtcttcccttctgattgatggtgctattttgtttgttttgttttgttttgtttttttgagacagaatctcgctctgtcgcccaggctggagtgcagtggcgtgatctcggctcaccgcaagctccgcctcccgggttcaggccattctcctgcctcagcctcccgagtagctgggactacaggggcccgccaccacacctggctaattttttaaaaatatttttagtagagacagggtttcactgtgttagccagggtggtcttgatctcctgacctcgtgatccacccacctcggcctcccaaagtgctgggattacaggcgtgagccaccgcgcctggccgatggtactatttagatataacactatgtttatttactaattttctagattttctactttattaattgttttgcacttttttataagagctaaagttaaataggatattaacaacaataacactgtctcctttctcttacgcttaaggctttgggaatgtttttagctggtggcaataaataccagacacgtacaaaatccagctatgaatatagagggcttatgattcagattgttatctatcaactataagcccactgttaatattctattaactttaattctctttcaaagctaaattccacactaccacattaaaaaaattagaaagtagccacgtatggtggctcatgtctataatcccagcactttgggaggttgaggtgggaggatttgcttgaacccaagaggtccaaggctgcagtgagccatgttcacaccgctgcactcaagcttgggtgacagagcaagaccccgtccccaaaaaaattttttttttaataaacccaaatttgtttgaaaacttttaaaaattcaaatgatttttacaagttttaaataagctctccccaaacttgctttatgccttcttattgcttttatgatatatatatgcttggctaactatatttgctttttgctaacaatgctctggggtctttttatgcatttgcatttgctctttcatctctgcttggattattttaaatcattaggaattaagttatctttaaaatttaagtatcttttttccaaaacattttttaatagaataaaatataatttgatcttaaaaaaaaaaaaaaaaaaaaaaaaaaaaaaaaaaaaaaaa

SEQ ID NO: 685 - protein, 496 aa, Homo sapiens
MDFSRNLYDIGEQLDSEDLASLKFLSLDYIPQRKQEPIKDALMLFQRLQEKRMLEESNLSFLKELLFRINRLDLLITYLNTRKEEMERELQTPGRAQISAYRFHFCRMSWAEANSQCQTQSVPFWRRVDHLLIRVMLYQISEEVSRSELRSFKFLLQEEISKCKLDDDMNLLDIFIEMEKRVILGEGKLDILKRVCAQINKSLLKIINDYEEFSKGEELCGVMTISDSPREQDSESQTLDKVYQMKSKPRGYCLIINNHNFAKAREKVPKLHSIRDRNGTHLDAGALTTTFEELHFEIKPHDDCTVEQIYEILKIYQLMDHSNMDCFICCILSHGDKGIIYGTDGQEAPIYELTSQFTGLKCPSLAGKPKVFFIQACQGDNYQKGIPVETDSEEQPYLEMDLSSPQTRYIPDEADFLLGMATVNNCVSYRNPAEGTWYIQSLCQSLRERCPRGDDILTILTEVNYEVSNKDDKKNMGKQMPQPTFTLRKKLVFPSD

SEQ ID NO: 686 - DNA, 2887 bp, Homo sapiens
gattctgcctttctgctggagggaagtgttttcacaggttctcctccttttatcttttgtgttttttttcaagccctgctgaatttgctagtcaactcaacaggaagtgaggccatggagggaggcagaagagccagggtggttattgaaagtagaagaaacttcttcctgggagcctttcccacccccttccctgctgagcacgtggagttaggcaggttaggggactcggagactgcgatggtgccaggaaagggtggagcggattatattctcctgccttttaaaaagatggacttcagcagaaatctttatgatattggggaacaactggacagtgaagatctggcctccctcaagttcctgagcctggactacattccgcaaaggaagcaagaacccatcaaggatgccttgatgttattccagagactccaggaaaagagaatgttggaggaaagcaatctgtccttcctgaaggagctgctcttccgaattaatagactggatttgctgattacctacctaaacactagaaaggaggagatggaaagggaacttcagacaccaggcagggctcaaatttctgcctacagggtcatgctctatcagatttcagaagaagtgagcagatcagaattgaggtcttttaagtttcttttgcaagaggaaatctccaaatgcaaactggatgatgacatgaacctgctggatattttcatagagatggagaagagggtcatcctgggagaaggaaagttggacatcctgaaaagagtctgtgcccaaatcaacaagagcctgctgaagataatcaacgactatgaagaattcagcaaagagagaagcagcagccttgaaggaagtcctgatgaattttcaaatggggaggagttgtgtggggtaatgacaatctcggactctccaagagaacaggatagtgaatcacagactttggacaaagtttaccaaatgaaaagcaaacctcggggatactgtctgatcatcaacaatcacaattttgcaaaagcacgggagaaagtgcccaaacttcacagcattagggacaggaatggaacacacttggatgcaggggctttgaccacgacctttgaagagcttcattttgagatcaagccccacgatgactgcacagtagagcaaatctatgagattttgaaaatctaccaactcatggaccacagtaacatggactgcttcatctgctgtatcctctcccatggagacaagggcatcatctatggcactgatggacaggaggcccccatctatgagctgacatctcagttcactggtttgaagtgcccttcccttgctggaaaacccaaagtgttttttattcaggcttgtcagggggataactaccagaaaggtatacctgttgagactgattcagaggagcaaccctatttagaaatggatttatcatcacctcaaacgagatatatcccggatgaggctgactttctgctggggatggccactgtgaataactgtgtttcctaccgaaaccctgcagagggaacctggtacatccagtcactttgccagagcctgagagagcgatgtcctcgaggcgatgatattctcaccatcctgactgaagtgaactatgaagtaagcaacaaggatgacaagaaaaacatggggaaacagatgcctcagcctactttcacactaagaaaaaaacttgtcttcccttctgattgatggtgctattttgtttgttttgttttgttttgtttttttgagacagaatctcgctctgtcgcccaggctggagtgcagtggcgtgatctcggctcaccgcaagctccgcctcccgggttcacgccattctcctgcctcagcctcccgagtagctgggactacaggggcccgccaccacacctggctaattttttaaaaatatttttagtagagacagggtttcactgtgttagccagggtggtcttgatctcctgacctcgtgatccacccacctcggcctcccaaagtgctgggattacaggcgtgagccaccgcgcctggccgatggtactatttagatataacactatgtttatttactaattttctagattttctactttattaattgttttgcacttttttataagagctaaagttaaataggatattaacaacaataacactgtctcctttctcttatgcttaaggctttgggaatgtttttagctggtggcaataaataccagacacgtacaaaatccagctatgaatatagagggcttatgattcagattgttatctatcaactataagcccactgttaatattctattaactttaattctctttcaaagctaaattccacactaccacattaaaaaaattagaaagtagccacgtatggtggctcatgtctataatcccagcactttgggaggttgaggtgggaggatttgcttgaacccaagaggtccaaggctgcagtgagccatgttcacaccgctgcactcaagcttgggtgacagagcaagaccccgtccccaaaaaaattttttttttaataaaacaaaatttgtttgaaatcttttaaaaattcaaatgatttttacaagttttaaataagctctccccaaacttgctttatgccttcttattgcttttatgatatatatatgcttggctaactatatttgctttttgctaacaatgctctggggtctttttatgcatttgcatttgctctttcatctctgcttggattattttaaatcattaggaattaagttatctttaaaatttaagtatcttttttccaaaacattttttaatagaataaaatataatttgatcttaaaaaaaaaaaaaaaaaaaaaaaaaaaaaaaaaaaaaaaa

SEQ ID NO: 687 - protein, 479 aa, Homo sapiens
MDFSRNLYDIGEQLDSEDLASLKFLSLDYIPQRKQEPIKDALMLFQRLQEKRMLEESNLSFLKELLFRINRLDLLITYLNTRKEEMERELQTPGRAQISAYRVMLYQISEEVSRSELRSFKFLLQEEISKCKLDDDMNLLDIFIEMEKRVILGEGKLDILKRVCAQINKSLLKIINDYEEFSKERSSSLEGSPDEFSNGEELCGVMTISDSPREQDSESQTLDKVYQMKSKPRGYCLIINNHNFAKAREKVPKLHSIRDRNGTHLDAGALTTTFEELHFEIKPHDDCTVEQIYEILKIYQLMDHSNMDCFICCILSHGDKGIIYGTDGQEAPIYELTSQFTGLKCPSLAGKPKVFFIQACQGDNYQKGIPVETDSEEQPYLEMDLSSPQTRYIPDEADFLLGMATVNNCVSYRNPAEGTWYIQSLCQSLRERCPRGDDILTILTEVNYEVSNKDDKKNMGKQMPQPTFTLRKKLVFPSD

SEQ ID NO: 688 - DNA, 2668 bp, Homo sapiens
cccttccgtccttcattagacgtttgctcttgtcttagatgctcagatggtagtggataggcctgtgacgaaggtgctaccatcgtgagagtaagattatattctcctgccttttaaaaagatggacttcagcagaaatctttatgatattggggaacaactggacagtgaagatctggcctccctcaagttcctgagcctggactacattccgcaaaggaagcaagaacccatcaaggatgccttgatgttattccagagactccaggaaaagagaatgttggaggaaagcaatctgtccttcctgaaggagctgctcttccgaattaatagactggatttgctgattacctacctaaacactagaaaggaggagatggaaagggaacttcagacaccaggcagggctcaaatttctgcctacagggtcatgctctatcagatttcagaagaagtgagcagatcagaattgaggtcttttaagtttcttttgcaagaggaaatctccaaatgcaaactggatgatgacatgaacctgctggatattttcatagagatggagaagagggtcatcctgggagaaggaaagttggacatcctgaaaagagtctgtgcccaaatcaacaagagcctgctgaagataatcaacgactatgaagaattcagcaaaggggaggagttgtgtggggtaatgacaatctcggactctccaagagaacaggatagtgaatcacagactttggacaaagtttaccaaatgaaaagcaaacctcggggatactgtctgatcatcaacaatcacaattttgcaaaagcacgggagaaagtgcccaaacttcacagcattagggacaggaatggaacacacttggatgcaggggctttgaccacgacctttgaagagcttcattttgagatcaagccccacgatgactgcacagtagagcaaatctatgagattttgaaaatctaccaactcatggaccacagtaacatggactgcttcatctgctgtatcctctcccatggagacaagggcatcatctatggcactgatggacaggaggcccccatctatgagctgacatctcagttcactggtttgaagtgcccttcccttgctggaaaacccaaagtgttttttattcaggcttgtcagggggataactaccagaaaggtatacctgttgagactgattcagaggagcaaccctatttagaaatggatttatcatcacctcaaacgagatatatcccggatgaggctgactttctgctggggatggccactgtgaataactgtgtttcctaccgaaaccctgcagagggaacctggtacatccagtcactttgccagagcctgagagagcgatgtcctcgaggcgatgatattctcaccatcctgactgaagtgaactatgaagtaagcaacaaggatgacaagaaaaacatggggaaacagatgcctcagcctactttcacactaagaaaaaaacttgtcttcccttctgattgatggtgctattttgtttgttttgttttgttttgtttttttgagacagaatctcgctctgtcgcccaggctggagtgcagtggcgtgatctcggctcaccgcaagctccgcctcccgggttcacgccattctcctgcctcagcctcccgagtagctgggactacaggggcccgccaccacacctggctaattttttaaaaatatttttagtagagacagggtttcactgtgttagccagggtggtcttgatctcctgacctcgtgatccacccacctcggcctcccaaagtgctgggattacaggcgtgagccaccgcgcctggccgatggtactatttagatataacactatgtttatttactaattttctagattttctactttattaattgttttgcacttttttataagagctaaagttaaataggatattaacaacaataacactgtctcctttctcttatgcttaaggctttgggaatgtttttagctggtggcaataaataccagacacgtacaaaatccagctatgaatatagagggcttatgattcagattgttatctatcaactataagcccactgttaatattctattaactttaattctctttcaaagctaaattccacactaccacattaaaaaaattagaaagtagccacgtatggtggctcatgtctataatcccagcactttgggaggttgaggtgggaggatttgcttgaacccaagaggtccaaggctgcagtgagccatgttcacaccgctgcactcaagcttgggtgacagagcaagaccccgtccccaaaaaaattttttttttaataaaacaaaatttgtttgaaatcttttaaaaattcaaatgatttttacaagttttaaataagctctccccaaacttgctttatgccttcttattgcttttatgatatatatatgcttggctaactatatttgctttttgctaacaatgctctggggtctttttatgcatttgcatttgctctttcatctctgcttggattattttaaatcattaggaattaagttatctttaaaatttaagtatcttttttccaaaacattttttaatagaataaaatataatttgatcttaaaaaaaaaaaaaaaaaaaaaaaaaaaaaaaaaaaa

SEQ ID NO: 689 - protein, 464 aa, Homo sapiens
MDFSRNLYDIGEQLDSEDLASLKFLSLDYIPQRKQEPIKDALMLFQRLQEKRMLEESNLSFLKELLFRINRLDLLITYLNTRKEEMERELQTPGRAQISAYRVMLYQISEEVSRSELRSFKFLLQEEISKCKLDDDMNLLDIFIEMEKRVILGEGKLDILKRVCAQINKSLLKIINDYEEFSKGEELCGVMTISDSPREQDSESQTLDKVYQMKSKPRGYCLIINNHNFAKAREKVPKLHSIRDRNGTHLDAGALTTTFEELHFEIKPHDDCTVEQIYEILKIYQLMDHSNMDCFICCILSHGDKGIIYGTDGQEAPIYELTSQFTGLKCPSLAGKPKVFFIQACQGDNYQKGIPVETDSEEQPYLEMDLSSPQTRYIPDEADFLLGMATVNNCVSYRNPAEGTWYIQSLCQSLRERCPRGDDILTILTEVNYEVSNKDDKKNMGKQMPQPTFTLRKKLVFPSD

SEQ ID NO: 690 - DNA, 3023 bp, Homo sapiens
gattctgcctttctgctggagggaagtgttttcacaggttctcctccttttatcttttgtgttttttttcaagccctgctgaatttgctagtcaactcaacaggaagtgaggccatggagggaggcagaagagccagggtggttattgaaagtagaagaaacttcttcctgggagcctttcccacccccttccctgctgagcacgtggagttaggcaggttaggggactcggagactgcgatggtgccaggaaagggtggagcggattatattctcctgccttttaaaaagatggacttcagcagaaatctttatgatattggggaacaactggacagtgaagatctggcctccctcaagttcctgagcctggactacattccgcaaaggaagcaagaacccatcaaggatgccttgatgttattccagagactccaggaaaagagaatgttggaggaaagcaatctgtccttcctgaaggagctgctcttccgaattaatagactggatttgctgattacctacctaaacactagaaaggaggagatggaaagggaacttcagacaccaggcagggctcaaatttctgcctacagggtcatgctctatcagatttcagaagaagtgagcagatcagaattgaggtcttttaagtttcttttgcaagaggaaatctccaaatgcaaactggatgatgacatgaacctgctggatattttcatagagatggagaagagggtcatcctgggagaaggaaagttggacatcctgaaaagagtctgtgcccaaatcaacaagagcctgctgaagataatcaacgactatgaagaattcagcaaagagagaagcagcagccttgaaggaagtcctgatgaattttcaaatggggaggagttgtgtggggtaatgacaatctcggactctccaagagaacaggatagtgaatcacagactttggacaaagtttaccaaatgaaaagcaaacctcggggatactgtctgatcatcaacaatcacaattttgcaaaagcacgggagaaagtgcccaaacttcacagcattagggacaggaatggaacacacttggatgcaggtacagtagaacccaaaagagaaaagtaaaatatttcttatgcctatttttttttaaatcaaaagggagagaacaaaagctataccaaaagggccatgtttcaagaaaatggatttaaacatatttccctgtggaggggctttgaccacgacctttgaagagcttcattttgagatcaagccccacgatgactgcacagtagagcaaatctatgagattttgaaaatctaccaactcatggaccacagtaacatggactgcttcatctgctgtatcctctcccatggagacaaaggcatcatctatggcactgatggacaggaggcccccatctatgagctgacatctcagttcactggtttgaagtgcccttcccttgctggaaaacccaaagtgttttttattcaggcttgtcagggggataactaccagaaaggtatacctgttgagactgattcagaggagcaaccctatttagaaatggatttatcatcacctcaaacgagatatatcccggatgaggctgactttctgctggggatggccactgtgaataactgtgtttcctaccgaaaccctgcagagggaacctggtacatccagtcactttgccagagcctgagagagcgatgtcctcgaggcgatgatattctcaccatcctgactgaagtgaactatgaagtaagcaacaaggatgacaagaaaaacatggggaaacagatgcctcagcctactttcacactaagaaaaaaacttgtcttcccttctgattgatggtgctattttgtttgttttgttttgttttgtttttttgagacagaatctcgctctgtcgcccaggctggagtgcagtggcgtgatctcggctcaccgcaagctccgcctcccgggttcacgccattctcctgcctcagcctcccgagtagctgggactacaggggcccgccaccacacctggctaattttttaaaaatatttttagtagagacagggtttcactgtgttagccagggtggtcttgatctcctgacctcgtgatccacccacctcggcctcccaaagtgctgggattacaggcgtgagccaccgcgcctggccgatggtactatttagatataacactatgtttatttactaattttctagattttctactttattaattgttttgcacttttttataagagctaaagttaaataggatattaacaacaataacactgtctcctttctcttacgcttaaggctttgggaatgtttttagctggtggcaataaataccagacacgtacaaaatccagctatgaatatagagggcttatgattcagattgttatctatcaactataagcccactgttaatattctattaactttaattctctttcaaagctaaattccacactaccacattaaaaaaattagaaagtagccacgtatggtggctcatgtctataatcccagcactttgggaggttgaggtgggaggatttgcttgaacccaagaggtccaaggctgcagtgagccatgttcacaccgctgcactcaagcttgggtgacagagcaagaccccgtccccaaaaaaattttttttttaataaacccaaatttgtttgaaaacttttaaaaattcaaatgatttttacaagttttaaataagctctccccaaacttgctttatgccttcttattgcttttatgatatatatatgcttggctaactatatttgctttttgctaacaatgctctggggtctttttatgcatttgcatttgctctttcatctctgcttggattattttaaatcattaggaattaagttatctttaaaatttaagtatcttttttccaaaacattttttaatagaataaaatataatttgatcttaaaaaaaaaaaaaaaaaaaaaaaaaaaaaaaaaaaaaaaa

SEQ ID NO: 691 - protein, 276 aa, Homo sapiens
MDFSRNLYDIGEQLDSEDLASLKFLSLDYIPQRKQEPIKDALMLFQRLQEKRMLEESNLSFLKELLFRINRLDLLITYLNTRKEEMERELQTPGRAQISAYRVMLYQISEEVSRSELRSFKFLLQEEISKCKLDDDMNLLDIFIEMEKRVILGEGKLDILKRVCAQINKSLLKIINDYEEFSKERSSSLEGSPDEFSNGEELCGVMTISDSPREQDSESQTLDKVYQMKSKPRGYCLIINNHNFAKAREKVPKLHSIRDRNGTHLDAGTVEPKREK

SEQ ID NO: 692 - DNA, 1088 bp, Homo sapiens
tgaaggctggttgttcagactgagcttcctgcctgcctgtaccccgccaacagcttcagaagaaggtgactggtggctgcctgaggaataccagtgggcaagagaattagcatttctggagcatctgctgtctgagcagcccctgggtgcgtccactttctgggcacgtgaggttgggccttggccgcctgagcccttgagttggtcacttgaaccttgggaatattgagattatattctcctgccttttaaaaagatggacttcagcagaaatctttatgatattggggaacaactggacagtgaagatctggcctccctcaagttcctgagcctggactacattccgcaaaggaagcaagaacccatcaaggatgccttgatgttattccagagactccaggaaaagagaatgttggaggaaagcaatctgtccttcctgaaggagctgctcttccgaattaatagactggatttgctgattacctacctaaacactagaaaggaggagatggaaagggaacttcagacaccaggcagggctcaaatttctgcctacagggtcatgctctatcagatttcagaagaagtgagcagatcagaattgaggtcttttaagtttcttttgcaagaggaaatctccaaatgcaaactggatgatgacatgaacctgctggatattttcatagagatggagaagagggtcatcctgggagaaggaaagttggacatcctgaaaagagtctgtgcccaaatcaacaagagcctgctgaagataatcaacgactatgaagaattcagcaaagagagaagcagcagccttgaaggaagtcctgatgaattttcaaatgactttggacaaagtttaccaaatgaaaagcaaacctcggggatactgtctgatcatcaacaatcacaattttgcaaaagcacgggagaaagtgcccaaacttcacagcattagggacaggaatggaacacacttggatgcagggtttgagaatgtttttagctggtggcaataaatattagaagcctgcagaatccagctacgaatatagagggttttgctcttgggccttcgtggc

SEQ ID NO: 693 - protein, 235 aa, Homo sapiens
MDFSRNLYDIGEQLDSEDLASLKFLSLDYIPQRKQEPIKDALMLFQRLQEKRMLEESNLSFLKELLFRINRLDLLITYLNTRKEEMERELQTPGRAQISAYRVMLYQISEEVSRSELRSFKFLLQEEISKCKLDDDMNLLDIFIEMEKRVILGEGKLDILKRVCAQINKSLLKIINDYEEFSKERSSSLEGSPDEFSNDFGQSLPNEKQTSGILSDHQQSQFCKSTGESAQTSQH

SEQ ID NO: 694 - DNA, 1946 bp, Homo sapiens
aaggaataaagttgctgattcattcctttacactgaaaccctttgttgtgccctcctcttccttcctctttatagggagacactctgagaaagagcacattgtgggggcccactccatgtgatgtttgcttggttgcctgttcccttttctacctgcagagcacggttcccataagggcggcgagatcagcctcctgtctcatctggaagaccaccactctggggtctcagaggaatgatggaagccttggggtttctaaaattggaagtgaatggccccatggtgacggtggccctgtcagtggctctcttggccctcctgaaatggtactccacatcagcattctcaagactggagaagttaggcctcagacatcccaagccttctcctttcattggaaacttgacatttttccgccagggtttttgggaaagccaaatggagctcagaaagctgtatggacctctgtgtgggtactatcttggtcgtcggatgtttattgttatttctgagccagacatgatcaagcaggtgttggttgagaacttcagtaactttaccaacagaatggcgtcgggtttggagttcaagtcggtagccgacagcgttctgtttttacgtgacaaaagatgggaagaggtcagaggtgccctgatgtctgctttcagtcctgaaaagctgaacgagatggttcccctcatcagccaagcctgcgaccttctcctggctcatttaaaacgctatgcggaatctggggacgcatttgacatccagaggtgctactgcaattacaccacagatgtggttgccagcgtcccgtttggcaccccggtggactcctggcaggcccctgaggatccctttgtgaaacactgcaagcgtttcttcgaattctgcatccccagacctatcctggttttactcttatcatttccatccataatggtcccactggcccggattttgcccaataagaaccgagacgaactgaatggcttttttaacaaactcattaggaatgtgattgccttgcgggaccagcaagctgccgaagagaggcggagagacttcctccaaatggtcctggatgcccgacattctgcaagtcccatgggcgtgcaagactttgacatcgtcagagacgttttctcctctactgggtgcaagccgaacccttcccggcaacaccagcccagccctatggccaggcctttgactgtggatgagattgtgggccaggccttcatcttcctcatcgctggctatgaaatcatcaccaacacactttcttttgccacctacctactggccaccaaccctgactgccaagagaagcttctgagagaggtagacgtttttaaggagaaacacatggcccctgagttctgcagcctcgaggaaggcctgccctatctggacatggtgattgcagagacgctgaggatgtacccgccagctttcagattcacacgggaggcagctcaggactgcgaggtgctggggcagcgcatccccgcaggcgctgtgctagagatggccgtgggtgccctgcaccatgaccctgagcactggccaagcccggagaccttcaaccctgaaaggttcacggctgaggcccggcagcagcaccggcccttcacgtacctgcccttcggggccggcccacggagctgcctcggggtgcgtctagggctgcttgaggtcaagttgacactgctccacgtgctgcacaagttccggttccaagcctgccctgagacccaggtaccgctgcagctagaatccaaatctgccctaggtccaaaaaatggtgtctatatcaagatcgtatcccgctgacacagaaggctgccgggtggggggagggcacccccaaattcaaagaaaaccctaagtgtggatgttcagaattttggaaaaatgtcactgaagtgattgaaagccg

SEQ ID NO: 695 - protein, 534 aa, Homo sapiens
MMEALGFLKLEVNGPMVTVALSVALLALLKWYSTSAFSRLEKLGLRHPKPSPFIGNLTFFRQGFWESQMELRKLYGPLCGYYLGRRMFIVISEPDMIKQVLVENFSNFTNRMASGLEFKSVADSVLFLRDKRWEEVRGALMSAFSPEKLNEMVPLISQACDLLLAHLKRYAESGDAFDIQRCYCNYTTDVVASVPFGTPVDSWQAPEDPFVKHCKRFFEFCIPRPILVLLLSFPSIMVPLARILPNKNRDELNGFFNKLIRNVIALRDQQAAEERRRDFLQMVLDARHSASPMGVQDFDIVRDVFSSTGCKPNPSRQHQPSPMARPLTVDEIVGQAFIFLIAGYEIITNTLSFATYLLATNPDCQEKLLREVDVFKEKHMAPEFCSLEEGLPYLDMVIAETLRMYPPAFRFTREAAQDCEVLGQRIPAGAVLEMAVGALHHDPEHWPSPETFNPERFTAEARQQHRPFTYLPFGAGPRSCLGVRLGLLEVKLTLLHVLHKFRFQACPETQVPLQLESKSALGPKNGVYIKIVSR

SEQ ID NO: 696 - DNA, 1783 bp, Homo sapiens
aaggaataaagttgctgattcattcctttacactgaaaccctttgttgtgccctcctcttccttcctctttatagggagacactctgagaaagagcacattgtgggggcccactccatgtgatgtttgcttggttgcctgttcccttttctacctgcagagcacggttcccataagggcggcgagatcagcctcctgtctcatctggaagaccaccactctggggtctcagaggaatgatggaagccttggggtttctaaaattggaagtgaatggccccatggtgacggtggccctgtcagtggctctcttggccctcctgaaatggtactccacatcagcattctcaagactggagaagttaggcctcagacatcccaagccttctcctttcattggaaacttgacatttttccgccagggtttttgggaaagccaaatggagctcagaaagctgtatggacctctgtgtgggtactatcttggtcgtcggatgtttattgttatttctgagccagacatgatcaagcaggtgttggttgagaacttcagtaactttaccaacagaatggcgtcgggtttggagttcaagtcggtagccgacagcgttctgtttttacgtgacaaaagatgggaagaggtcagaggtgccctgatgtctgctttcagtcctgaaaagctgaacgagatggttcccctcatcagccaagcctgcgaccttctcctggctcatttaaaacgctatgcggaatctggggacgcatttgacatccagaggtgctactgcaattacaccacagatgtggttgccagcgtcccgtttggcaccccggtggactcctggcaggcccctgaggatccctttgtgaaacactgcaagcgtttcttcgaattctgcatccccagacctatcctggttttactcttatcatttccatccataatggtcccactggcccggattttgcccaataagaaccgagacgaactgaatggcttttttaacaaactcattaggaatgtgattgccttgcgggaccagcaagctgccgaagagaggcggagagacttcctccaaatggtcctggatgcccgacattctgcaagtcccatgggcgtgcaagactttgacatcgtcagagacgttttctcctctactgggtgcaagccgaacccttcccggcaacaccagcccagccctatggccaggcctttgactgtggatgagattgtgggccaggccttcatcttcctcatcgctggctatgaaatcatcaccaacacactttcttttgccacctacctactggccaccaaccctgactgccaagagaagcttctgagagaggtagacgtttttaaggagaaacacatggcccctgagttctgcagcctcgaggaaggcctgccctatctggacatggtgattgcagagacgctgaggatgtacccgccagctttcagattcacacgggaggcagctcaggactgcgaggtgctggggcagcgcatccccgcaggcgctgtgctagagatggccgtgggtgccctgcaccatgaccctgagcactggccaagcccggagaccttcaaccctgaaaggtaccgctgcagctagaatccaaatctgccctaggtccaaaaaatggtgtctatatcaagatcgtatcccgctgacacagaaggctgccgggtggggggagggcacccccaaattcaaagaaaaccctaagtgtggatgttcagaattttggaaaaatgtcactgaagtgattgaaagccg

SEQ ID NO: 697 - protein, 460 aa, Homo sapiens
MMEALGFLKLEVNGPMVTVALSVALLALLKWYSTSAFSRLEKLGLRHPKPSPFIGNLTFFRQGFWESQMELRKLYGPLCGYYLGRRMFIVISEPDMIKQVLVENFSNFTNRMASGLEFKSVADSVLFLRDKRWEEVRGALMSAFSPEKLNEMVPLISQACDLLLAHLKRYAESGDAFDIQRCYCNYTTDVVASVPFGTPVDSWQAPEDPFVKHCKRFFEFCIPRPILVLLLSFPSIMVPLARILPNKNRDELNGFFNKLIRNVIALRDQQAAEERRRDFLQMVLDARHSASPMGVQDFDIVRDVFSSTGCKPNPSRQHQPSPMARPLTVDEIVGQAFIFLIAGYEIITNTLSFATYLLATNPDCQEKLLREVDVFKEKHMAPEFCSLEEGLPYLDMVIAETLRMYPPAFRFTREAAQDCEVLGQRIPAGAVLEMAVGALHHDPEHWPSPETFNPERYRCS

SEQ ID NO: 698 - DNA, 2330 bp, Homo sapiens
gcacgagccggctggccgtgatgctgcccactggtggtcccccgctcccggggtccccggccggccaagcaggagggctctaactccgtgaggaccccagcattatttctataattgtttgtgagaaggactgaatcccagagcattgccttgttgctgacctttcagtatggggaggattggcatctcctgtctttttcctgcttcttggcattttagcatatctccagtagggtgtcctcgaattctgaataccaatttacgccaaattatggtcattagtgtcctggctgctgctgtttcacttttatatttttctgttgtcataatccgaaataagtatgggcgactaaccagagacaagaaatttcaaaggtacctggcacgagttaccgacattgaagctacagacaccaataaccccaatgtgaactatgggatcgtggtggactgtggtagcagtgggtctcgagtatttgtttactgctggccaaggcataatggcaatccacatgatctgttggatatcaggcaaatgagggataaaaaccgaaagccagtggtcatgaaaataaaaccgggcatttcagaatttgctacctctccagagaaagtcagtgattacatttctccacttttgaactttgctgcagagcatgtgccacgggcaaaacacaaagagacacctctctacattctctgcacggctggaatgagaatcctccccgaaagccagcagaaagctattctggaagaccttctgaccgatatccccgtgcactttgactttctgttttctgactctcatgcagaagtaatttctgggaaacaggaaggtgtgtatgcttggattggcattaattttgtccttggacgatttgagcatattgaagatgatgatgaggccgttgtggaagttaacattcctggaagtgaaagcagcgaagccattgtccgtaaaaggacagcgggcattctcgacatgggcggcgtgtcgactcagatagcgtacgaagtccccaaaactgtaagctttgcgtcctcacagcaggaagaagtagctaaaaacttgttagctgaatttaacttgggatgtgatgttcaccaaactgagcatgtgtatcgagtctatgtggccacgtttcttgggtttggtggcaatgctgctcgacagagatacgaagacagaatatttgccaacaccattcaaaagaacaggctcctgggtaaacagactggtctgactcctgatatgccgtacttggacccctgcctacccctagacattaaagatgaaatccagcaaaatggacaaaccatatacctacgagggactggagactttgacctgtgtcgagagactatccagcctttcatgaataaaacaaacgagacccagacttccctcaatggggtctaccagcccccaattcacttccagaacagtgaattctatggcttctccgaattctactactgcaccgaggatgtgttacgaatggggggagactacaatgctgctaaatttactaaagctgcaaaggattattgtgcaacaaagtggtccattttgcgggaacgctttgaccgaggactgtacgcctctcatgctgacctccacaggcttaagtatcagtgcttcaaatcggcctggatgtttgaggtgtttcataggggcttttcgtttcctgtcaactataaaagcttaaagactgccttgcaagtttacgacaaggaggttcagtggacccttggagccatcctctacaggacccgctttctaccgttaagagacatccagcaggaggccttccgagccagtcacacccactggcggggcgtttcctttgtctacaaccactacctgttctctggctgcttcctggtggtgctgctggccatcctgctgtacctgctgcggctgcggcgcatccacaggcgcactccccggagcagctcggccgccgccctctggatggaggagggccttcccgcccagaatgccccggggaccttgtgatccagctcacagctccacgaagactcaaaaggaaaagccatttttgcctcagggtttctcctctttattttcctgtggttttgttttttctttcccttttttgttcctccaaacaaaaacaaaatgcaggccgagcgcggtggctcacgcctgtaatcccagcactttgggaggccgaggcgggcggatcatgaggtcaggagatcgagaccatcctggctaacacggtgaaaccccgtctctactaaaaatacaaaaaattagctgggtgtggtggcgggcgcccgttagtccaactactcaggaaggc

SEQ ID NO: 699 - protein, 616 aa, Homo sapiens
MGRIGISCLFPASWHFSISPVGCPRILNTNLRQIMVISVLAAAVSLLYFSVVIIRNKYGRLTRDKKFQRYLARVTDIEATDTNNPNVNYGIVVDCGSSGSRVFVYCWPRHNGNPHDLLDIRQMRDKNRKPVVMKIKPGISEFATSPEKVSDYISPLLNFAAEHVPRAKHKETPLYILCTAGMRILPESQQKAILEDLLTDIPVHFDFLFSDSHAEVISGKQEGVYAWIGINFVLGRFEHIEDDDEAVVEVNIPGSESSEAIVRKRTAGILDMGGVSTQIAYEVPKTVSFASSQQEEVAKNLLAEFNLGCDVHQTEHVYRVYVATFLGFGGNAARQRYEDRIFANTIQKNRLLGKQTGLTPDMPYLDPCLPLDIKDEIQQNGQTIYLRGTGDFDLCRETIQPFMNKTNETQTSLNGVYQPPIHFQNSEFYGFSEFYYCTEDVLRMGGDYNAAKFTKAAKDYCATKWSILRERFDRGLYASHADLHRLKYQCFKSAWMFEVFHRGFSFPVNYKSLKTALQVYDKEVQWTLGAILYRTRFLPLRDIQQEAFRASHTHWRGVSFVYNHYLFSGCFLVVLLAILLYLLRLRRIHRRTPRSSSAAALWMEEGLPAQNAPGTL

SEQ ID NO: 700 - DNA, 2126 bp, Homo sapiens
ggaccctggagcggtgtctgacggaagtcggcaaagccacgggtcggcccgagtgcttcctcacgattcaagagggattggcatcaaagttcacttctttaacaaaagtgctttatgactttaataaaatattagagaatggtaggatccatggaagccccttgcaaaaacttgtgatagaaaattttgatgatgagcagatttggcaacaactggaattgcaaaatgaaccaattttacaatactttcagaatgcagttagtgaaacaattaatgatgaagatatcagtcttctcccagagagtgaagaacaggaacgtgaagaggatggttcagagatagaggctgatgacaaggaggacctagaagatttagaggaggaggaagtgtccgacatgggtaatgatgatcctgaaatgggtgagagagctgaaaactcaagcaaatctgatctgaggaaaagccccgttttcagtgatgaggattctgaccttgactttgatatcagcaaattggaacagcagagcaaggtgcaaaacaaaggacagggaaaaccaagagaaaagtccatagtagatgataaattcttcaaactctctgaaatggaggcctatttagaaaacatagaaaaagaagaggaacgaaaagatgataatgatgaggaggaggaagatattgatttttttgaagatattgattctgatgaagatgaagggggactgtttggaagtaaaaaacttaagtcaggtaaaagttccagaaatctgaaatacaaagatttttttgatccagttgaaagtgatgaagacataacaaatgttcatgatgatgagctggattcaaacaaagaagatgatgaaattgctgaagaagaagcagaagaactaagtatttcggaaacggatgaagatgatgaccttcaagaaaatgaagacaataaacaacataaagaaagcttgaaaagagtgacctttgctttaccagatgatgcggaaactgaagatacaggtgttttaaatgtaaagaaaaattctgatgaagttaaatcctcctttgaaaaaagacaggaaaagatgaatgaaaaaattgcatctttagaaaaagagttgttagaaaaaaagccgtggcagcttcagggggaagtgacagcacagaagaggccagagaacagcctcctggaggagaccctacactttgaccatgctgtccggatggcacctgtgattacagaggaaaccacccttcaactggaagatatcattaaacagaggataagagatcaggcttgggatgatgtagtacgtaaagaaaaacctaaagaggatgcatatgaatataaaaagcgtttaaccttagaccatgagaagagtaaattgagccttgctgaaatttatgaacaggagtacatcaaactcaaccagcaaaaaacagcagaagaagaaaatccagaacatgtagaaattcagaagatgatggattccctcttcttaaaattggatgccctctcaaacttccactttatccctaaaccgcctgtaccagagattaaagttgtgtcaaatctgccagccataaccatggaggaagtagccccagtgagtgttagtgatgcagctctcctggccccagaggagatcaaggagaaaaataaagctggagatataaaaacagctgctgaaaaaacagctacagacaagaaacgagagcgaaggaaaaagaaatatcaaaagcgtatgaaaataaaagagaaggagaagcggagaaaactgcttgaaaagagcagtgtagatcaagcagggaaatacagcaaaacagtagcttcggagaagttaaaacagctgaccaaaactggcaaagcttccttcataaaggatgaaggtaaagacaaggccttaaagtcctctcaagcattcttttctaaattacaagatcaagtaaaaatgcaaatcaatgatgcaaagaaaacagaaaagaaaaagaagaaaagacaggatatttctgttcataaattaaagctgtaatatattttgaatataatgtaaatattaatgtgtaagcttatattgtgtcattgttctgttttataataaaattcttgagaaccttaaaaaaaaaaaaaaaaaaaa

SEQ ID NO: 701 - protein, 672 aa, Homo sapiens
TLERCLTEVGKATGRPECFLTIQEGLASKFTSLTKVLYDFNKILENGRIHGSPLQKLVIENFDDEQIWQQLELQNEPILQYFQNAVSETINDEDISLLPESEEQEREEDGSEIEADDKEDLEDLEEEEVSDMGNDDPEMGERAENSSKSDLRKSPVFSDEDSDLDFDISKLEQQSKVQNKGQGKPREKSIVDDKFFKLSEMEAYLENIEKEEERKDDNDEEEEDIDFFEDIDSDEDEGGLFGSKKLKSGKSSRNLKYKDFFDPVESDEDITNVHDDELDSNKEDDEIAEEEAEELSISETDEDDDLQENEDNKQHKESLKRVTFALPDDAETEDTGVLNVKKNSDEVKSSFEKRQEKMNEKIASLEKELLEKKPWQLQGEVTAQKRPENSLLEETLHFDHAVRMAPVITEETTLQLEDIIKQRIRDQAWDDVVRKEKPKEDAYEYKKRLTLDHEKSKLSLAEIYEQEYIKLNQQKTAEEENPEHVEIQKMMDSLFLKLDALSNFHFIPKPPVPEIKVVSNLPAITMEEVAPVSVSDAALLAPEEIKEKNKAGDIKTAAEKTATDKKRERRKKKYQKRMKIKEKEKRRKLLEKSSVDQAGKYSKTVASEKLKQLTKTGKASFIKDEGKDKALKSSQAFFSKLQDQVKMQINDAKKTEKKKKKRQDISVHKLKL

SEQ ID NO: 702 - DNA, 5915 bp, Homo sapiens
cgaagatggcggaagggctggagcgtgtgcggatctccgcgtcggagctgcgcgggatcctggctactctggccccgcaggccgggagcagagaaaacatgaaggaattaaaggaggccaggccgcgcaaagataacaggcgtcctgatctggaaatctataagcctggcctttctcggctaaggaacaagcccaaaatcaaggaaccccctgggagtgaggagttcaaagatgaaattgttaatgaccgagattgctctgctgttgaaaatggtacacagcccgttaaagatgtctgcaaggaactgaacaaccaagagcagaatggtcctatagacccggaaaataatcggggacaagaatcctttcctaggactgctggacaagaggatcgtagtctaaaaattatcaaaagaacaaagaaacccgacctgcagatctatcagcctggacgacgtttgcagactgttagcaaagaatccgccagtcgggtggaggaggaagaagtcctcaaccaggtagaacaactgagagtagaggaagatgagtgtaggggaaatgttgcgaaggaggaagttgcgaataaaccagacagggccgagatagaaaagagcccaggtggtgggagagtaggggctgcaaaaggagaaaaaggaaagaggatgggaaaaggggagggggtgagggaaacccacgacgacccggcccgcgggaggccgggctccgcaaagcgctactcccgctcagacaaacgaaggaatcgctaccgcacgcgcagcaccagctcagctggcagcaacaacagcgctgagggagctggcctgacggataatggatgtcgccgccgccgacaggataggaccaaggagaggccacgactgaagaagcaagtgtctgtgtcctcaaccgattccttagacgaggacagaattgatgagcctgatggattaggacccaggagaagttcagaaaggaagagacatttagaaagaaactggtctggccgtggggagggtgagcagaaaaccagtgctaaagaatatcgaggcactcttcgtgtcactttcgatgcagaagccatgaacaaagagtctcccatggtgaggtcagccagggatgatatggatagaggaaagcctgacaaaggcttgagcagtgggggcaaaggctctgagaagcaggagtccaaaaacccgaaacaagaacttcggggtcgtggtcgtggcattctgattttgcctgcccataccaccctatctgtcaattcagcaggttctccagagtccgcgcctttgggacctcggcttttgtttggatctggtagtaaggggtctcggagttggggccgtggaggcaccacacgccgattgtgggacccaaacaatcctgatcagaaacctgctctaaagactcagacgccccagctacatttcttggacactgatgatgaagtcagccctacatcttggggtgactcacgccaggctcaggcatcttactataagtttcaaaactctgacaacccctattattacccccggacaccaggccctgcctcccagtatccctatacgggctataaccctctacagtacccagtgggccctacgaatggtgtgtacccagggccttactacccaggctacccgactccgtcaggacagtatgtgtgtagccctctgcctaccagcaccatgagtcccgaggaggtagagcagcacatgaggaacctgcagcaacaggagctgcacaggcttctccgggtggctgacaaccaggaactgcagctcagcaacctgctctccagggaccgcatcagtccggagggcctggagaagatggcgcaactcagagctgaactgctgcagctatatgagcgctgtattctattagatattgagttctctgataatcagaatgtggatcagatcctgtggaagaatgctttctatcaggtgattgagaagttcaggcaacttgtcaaggatccgaatgttgagaacccagaacagattcggaacagacttttggagctcttggatgagggtagtgacttctttgatagtttgcttcagaagctgcaggttacttacaagttcaaactggaagactacatggatggtcttgccattcgcagcaagccattacgcaagacagtaaaatatgccttgatcagtgcccagcgatgcatgatatgccaaggagatattgctaggtaccgggagcaagccagtgatacagcgaattatgggaaagcacgcagttggtacctgaaggcccagcacattgctcccaagaatgggcgcccctataaccagttggctttgctggcagtgtatacgaggaggaagcttgacgctgtctattactatatgcgcagtttagctgccagcaaccctatcctgactgccaaggagagtctcatgagcttgtttgaagagaccaagcggaaggcagaacagatggaaaagaagcaacatgaggaatttgacctgagccctgaccagtggcggaaaggaaagaagtctactttccggcatgttggagatgacaccactcgcctggagatctggattcatccatcccatccacggtcttcccagggcactgagtctgggaaggattctgagcaagagaatgggctgggcagcctgagtcccagtgatctgaacaaaaggttcatcctcagttttctccatgcccatgggaagctgtttacccggattgggatggagacattccctgcagtggctgagaaggtcctcaaggagttccaggtgttactgcagcacagcccctctcccattggaagtacccgcatgctgcagcttatgaccatcaatatgtttgcagtacacaactcccagctgaaagactgcttctcggaggagtgccgctctgtgatccaggaacaagccgcagctctgggcttggccatgttttctctactggtccgccgctgcacctgcttacttaaggagtccgccaaagctcagctgtcctctcctgaggaccaggatgaccaagacgacatcaaggtgtcttcctttgtcccggacctgaaggagctgctccccagtgtcaaagtctggtcagattggatgctcggctacccggacacctggaatcctcctcccacatccctggatctgccctcgcatgttgctgtggatgtatggtcgacgctggctgatttctgtaacatactgactgcagtgaatcagtctgaggtgccactgtacaaggacccggatgatgacctcacccttcttatcctggaagaggatcggcttctctcgggctttgtccccttgctggctgcccctcaggacccctgctacgtggagaaaacctcggataaggttattgcagctgactgcaaaagggtcacagtgctgaagtattttctggaagccctttgtggacaagaagagcctctgctggcattcaagggtggaaagtatgtgtcagtggcacccgtcccagacaccatgggaaaggaaatgggaagccaagagggaacacgactggaagatgaggaggaggatgtggtgattgaagactttgaggaagattcagaggctgaaggcagcggaggcgaggatgacatcagggagcttcgggccaagaagctggctctggccaggaagatagctgagcagcagcgtcgccaggaaaagatccaggctgtcctggaggaccacagtcagatgaggcagatggagctcgaaatcagacctttgttcctcgtaccagacaccaacggcttcattgaccacctggccagtctggcgcggctgctggagagcaggaagtacatcctggtggtgcccctcatcgtgatcaatgagctggacggcctggccaaggggcaggagacagaccaccgggctgggggctacgcccgtgtggtacaagagaaggcccgcaagtccatcgagttcctcgagcagcgattcgagagtcgggactcttgcctgcgagccctgaccagccgtggcaatgaactcgaatccatcgccttccgcagtgaggacatcactggccagctgggtaacaacgatgatctcatcctgtcctgctgcctccactactgcaaagacaaggctaaggacttcatgcccgccagcaaagaggagccaatccggctactgcgggaggtggtgctgttgacggatgaccggaacctgcgtgtgaaggcgctcacaaggaatgttcctgtacgggacatcccagccttcctcacgtgggcccaggtgggctgagggagccacactggggccccccccccccgtggaaccgttcctgaaaggccaccaggcgcccagtgtagcacggaagatgcccacgtgcctgagccaccaatccacccagacaataaaccatcctcttccaacccacgccacggccatgctgtgggggacctgctcctcacagagcccctcccaaggatcgggcggaagctgctgggaccctcctgggctgccaggatttagcagggaggtggctggctacagcaacagcagctgggcaagccagataggccgcccatgctctcagcctttctccctcccccgtctcattccaaggctgagggagggccttctcgcctggggacgcagccactttctccagtggagacagggcaggggttcagagtttccgtcagatgcagtgaaatcacagttccctttcatcttcagaacctctgtcgtgaatgtgttcaagaggctttggttaagtcaggaagaagtgcccagggtgtgtgtccccagtctccctgaggcctggactcgcccatgaacccaagtcggcttctagacagcatgtccctaacagcagccctgggcccccacctcttctaccatccaccccagacttaccacacacccttcctgctgctcctcttcctgcccttatcaacctgggtccctcacacttcgccagttgcgtccccgtggacagtcatgagtctagaggaaaggggcatctggtctcaggcccgtgctctcgggtggcctccacctgctccctttctcctcactggcctttctttccgtctagcctcctcttcaggaaatgtcctgactctcctcagctcccccttcacccctccttgcccgcctaccctccctccagaatagcccctcacccttcttccccttctagttgatccttttcacctccctgatccccttcatttcttcaccgcggttcctcgtcataggggttctcactctgaactttccctctctactacccatggcaggaacctagtacaggtctcccacccagggccttccaccctcggctcctgtgctgggagaaacttccaggcgtggacagcccagcctgaggcattccagtgctggggcaccgtcgcctaacctggtttctagctttgccctcactccccggaaaaactgacactgacacaggggccctttccttgcccctttagctggtacctcagtggggaggcttccttaccaagaatgagttcctgaaacccagggccagagacaaggacaacttaggggaagacggggttttcggtggagccaggggcaaatcttaatgggaccagtgggggataccccagagcccatggcctgactgcacagcctgcctggaggatgggtgcgcagctctgccctccctgaggcccaggactatgccagaagcgatggggtaccgtgtaggggagccaaggccagtagtttgggggtaggagtcccctagagtctcagaagactgggctctttggagtacagggtccccggcctctcctttaagattctctccccagctggaaggccgatgactgggtggtcgggagggagacccagctctcctttctgtcccgtttgcagcactggttttgtttccttaataaatttttagttatgaaacat

SEQ ID NO: 703 - protein, 1419 aa, Homo sapiens
MAEGLERVRISASELRGILATLAPQAGSRENMKELKEARPRKDNRRPDLEIYKPGLSRLRNKPKIKEPPGSEEFKDEIVNDRDCSAVENGTQPVKDVCKELNNQEQNGPIDPENNRGQESFPRTAGQEDRSLKIIKRTKKPDLQIYQPGRRLQTVSKESASRVEEEEVLNQVEQLRVEEDECRGNVAKEEVANKPDRAEIEKSPGGGRVGAAKGEKGKRMGKGEGVRETHDDPARGRPGSAKRYSRSDKRRNRYRTRSTSSAGSNNSAEGAGLTDNGCRRRRQDRTKERPRLKKQVSVSSTDSLDEDRIDEPDGLGPRRSSERKRHLERNWSGRGEGEQKTSAKEYRGTLRVTFDAEAMNKESPMVRSARDDMDRGKPDKGLSSGGKGSEKQESKNPKQELRGRGRGILILPAHTTLSVNSAGSPESAPLGPRLLFGSGSKGSRSWGRGGTTRRLWDPNNPDQKPALKTQTPQLHFLDTDDEVSPTSWGDSRQAQASYYKFQNSDNPYYYPRTPGPASQYPYTGYNPLQYPVGPTNGVYPGPYYPGYPTPSGQYVCSPLPTSTMSPEEVEQHMRNLQQQELHRLLRVADNQELQLSNLLSRDRISPEGLEKMAQLRAELLQLYERCILLDIEFSDNQNVDQILWKNAFYQVIEKFRQLVKDPNVENPEQIRNRLLELLDEGSDFFDSLLQKLQVTYKFKLEDYMDGLAIRSKPLRKTVKYALISAQRCMICQGDIARYREQASDTANYGKARSWYLKAQHIAPKNGRPYNQLALLAVYTRRKLDAVYYYMRSLAASNPILTAKESLMSLFEETKRKAEQMEKKQHEEFDLSPDQWRKGKKSTFRHVGDDTTRLEIWIHPSHPRSSQGTESGKDSEQENGLGSLSPSDLNKRFILSFLHAHGKLFTRIGMETFPAVAEKVLKEFQVLLQHSPSPIGSTRMLQLMTINMFAVHNSQLKDCFSEECRSVIQEQAAALGLAMFSLLVRRCTCLLKESAKAQLSSPEDQDDQDDIKVSSFVPDLKELLPSVKVWSDWMLGYPDTWNPPPTSLDLPSHVAVDVWSTLADFCNILTAVNQSEVPLYKDPDDDLTLLILEEDRLLSGFVPLLAAPQDPCYVEKTSDKVIAADCKRVTVLKYFLEALCGQEEPLLAFKGGKYVSVAPVPDTMGKEMGSQEGTRLEDEEEDVVIEDFEEDSEAEGSGGEDDIRELRAKKLALARKIAEQQRRQEKIQAVLEDHSQMRQMELEIRPLFLVPDTNGFIDHLASLARLLESRKYILVVPLIVINELDGLAKGQETDHRAGGYARVVQEKARKSIEFLEQRFESRDSCLRALTSRGNELESIAFRSEDITGQLGNNDDLILSCCLHYCKDKAKDFMPASKEEPIRLLREVVLLTDDRNLRVKALTRNVPVRDIPAFLTWAQVG

SEQ ID NO: 704 - DNA, 4985 bp, Homo sapiens
cccgggactcgacaacatggcttccccgccccaccagcagctgctgcatcaccacagcaccgaggtgagctgcgactccagcggggacagcaacagcgtgcgcgtcaagatcaaccccaagcagctgtcctccaacagccaccccaagcactgcaaatacagcatctcctctagctgcagcagctctggggactccgggggcgtcccccggcgagtgggcggcggaggccggctgcgcaggcagaagaagctgccccagctgttcgagagggcctccagccgctggtgggaccccaagttcgactcggtgaacctggaggaggcctgcctggagcgctgcttcccgcagacccagcgccggttccggtatgcgctcttctacatcggcttcgcctgccttctgtggagcatctattttgcggtccacatgagatccagactgatcgtcatggtcgcccccgcgctgtgcttcctcctggtgtgtgtgggcttctttctgtttaccttcaccaagctgtacgcccggcattacgcgtggacctcgctggctctcaccctgctggtgttcgccctgaccctggctgcgcagttccaggtcttgacgcctgtctcaggacgcggcgacagctccaaccttacggccacagcccggcccacagatacttgcttatctcaagtggggagcttctccatgtgcatcgaagtgctctttttgctctataccgtcatgcacttacctttgtacctgagtttgtgtctgggggtggcctactctgtccttttcgagacctttggctaccatttccgggatgaagcctgcttcccctcgcccggagccggggccctgcactgggagctgctgagcagggggctgctccacggctgcatccacgccatcggggtccacctgttcgtcatgtcccaggtgaggtccaggagcaccttcctcaaggtggggcaatccattatgcacgggaaggacctggaagtggaaaaagccctcaaagagaggatgattcattccgtgatgccaagaatcatagccgatgacttaatgaagcagggagatgaggagagtgagaattctgtcaagaggcatgccacctcgagccccaagaacaggaagaaaaagtcttccatccaaaaagctcctatagccttccgcccttttaagatgcagcagatcgaagaagtcagtattttatttgcagatatcgtgggcttcaccaagatgagtgccaacaagtctgcccacgccctggtgggtctcctgaacgatctgttcggtcgcttcgaccgcctgtgtgaggagaccaagtgtgagaaaatcagcaccctgggagactgttactactgcgtggcgggctgtcccgagccccgggccgaccatgcctactgctgcatcgagatgggcctgggcatgatcaaggccatcgagcagttctgccaggagaagaaggagatggtgaacatgagagtcggggtgcacacgggcaccgtcctttgcggcatcctgggcatgaggaggtttaaatttgacgtgtggtccaacgatgtgaacctggccaatctcatggagcagctgggagtggccggcaaagttcacatttctgaggccaccgcaaaatacttagatgaccggtacgaaatggaagatgggaaagttattgaacggctgggccagagcgtggttgctgaccagttgaaaggtttgaagacatacctgatatcgggtcagagagccaaggagtctcgctgcagctgtgcagaggccttgctttctggctttgaggtcattgacggctcacaggtgtcctcaggccctaggggacaggggacagcgtcatcagggaatgtcagtgacttggcgcagactgtcaaaacctttgataaccttaagacctgcccttcgtgcggaatcacatttgctcccaaatctgaagccggcgccgagggaggagcacctcaaaacggctgccaagacgagcataaaaacagcaccaaggcttctggaggacctaatcccaaaactcagaacgggctcctcagccctccccaagaggagaagctcaccaacagtcagacttctctgtgtgagatcttgcaggagaagggaaggtgggcaggggtgagcctggaccagtcggctctccttccgctgaggttcaagaacatccgggagaaaacggacgcccactttgtggacgttatcaaagaagacagcctgatgaaagattacttttttaagccgcccattaatcagttcagcctgaacttcctggatcaggagctggagcgatcctacaggaccagctatcaggaagaggtcataaagaactcccccgtgaagacgtttgctagtcccaccttcagctccctcctggatgtgtttctgtcgaccacagtgtttctgacgctgtccaccacctgcttcctgaagtacgaggcggccaccgtgcctcccccgcccgccgccctggcggtcttcagtgcagccctgctgctggaggtgctgtccctcgcggtgtccatcaggatggtgttcttcctggaggacgtcatggcctgcaccaagcgcctgctggagtggatcgccggctggctaccacgtcactgcatcggggccatcctggtgtcgcttcccgcactggccgtctactcccatgtcacctccgaatatgagaccaacatacacttcccagtgttcacaggctcggccgcactgattgccgtcgtgcactactgtaacttctgccagctcagctcctggatgaggtcctccctcgccaccgtcgtgggggccgggccgctgctcctgctctacgtctccctgtgcccagacagttctgtattaacttcgccccttgacgcagtacagaatttcagttccgagaggaacccgtgcaatagttcggtgccgcgtgacctccggcggcccgccagcctcatcggccaggaggtggttctcgtcttctttctcctgctcttgttggtctggttcctgaatcgcgaatttgaagtcagctaccgcctccactaccacggagacgtggaagcggatcttcaccgcaccaagatccagagcatgcgggaccaggcagactggctgctgaggaacatcatcccctaccacgtggctgagcagctgaaggtgtcccagacctactccaagaaccacgacagcggaggggtgatcttcgccagcatcgtcaacttcagcgagttctacgaggagaactacgagggcggcaaggagtgctaccgggtcctcaacgagctcatcggggactttgacgagctcctaagcaagccggactacagcagcatcgagaagatcaagaccatcggagccacgtacatggcggcgtcagggctgaacaccgcgcaggcccaggacggcagccacccgcaggagcacctgcagatcctgttcgagttcgccaaggagatgatgcgcgtggtggacgacttcaacaacaacatgctgtggttcaacttcaagctccgcgtcggcttcaaccatgggcccctcacggccggggtcatcggcaccaccaagctgctgtacgacatctggggagacaccgtcaacatcgccagcaggatggacaccaccggcgtggagtgccgcatccaggtgagcgaagagagctaccgcgtcttgagcaagatgggctatgacttcgactacagagggaccgtgaatgtcaaggggaaaggccagatgaagacctacctgtacccaaagtgcacggatcacagggtcatcccagcaccagctgtccatctccccagacatccgcgtccaggtggatggcagcatcggacggtctcccacagacgagattgccaacctggtgccttctgtccagtatgtggacaagacatctctgggttctgacagcagcacgcaggccaaggatgcccacctgtcccccaagagaccgtggaaggagcccgtcaaagccgaagaaaggggtcgatttggcaaagccatagagaaagacgactgtgacgaaacaggaatagaagaagccaacgaactcaccaagctcaacgtttcaaagagtgtgtgaggcggcgcccacccgctgcccgaggtgctctgtttgtcgaaacacagtaatatttgtatttggctgttgtgctttccaagcgccacagttgccctccccggacgtggtgttatgtggtcatttcagccctaacttctgtgtggatcacagttattcagggttcattttcatccattcttccctttcgctcccttccctggaaaccccgctgcctctgggtcatccgttcagcacgtggtggagaacaagtgccttcagggctggcctcggcctcgagtctcgggacagaggccgccagtggagatcatggctttgggtattatttgacttttagaacaaaagctgtggttaagatctcatttttattgctttttcccacgtcccacgagacactattttcggttctctggctaataccctgtttttgagtttattttgtttctgtctatgtcacagtgtccccctacgacccgacctctctatgtaagcacacatgcgcacacacacttgcattcatgaatctgatataaagtgccagtaatccgccaagagggggtgcgaagggggcatgtcacgacagctccgccaccccccattgcccacccgcactttcccgagcaccgcgccccgtgggctgtgggtgagccgcgctccctgcactgagcgggtttaggggctcgcccacatgcatgcaggccaagacagcaaatgccagccgggcacgacgcctgtgtgcccaggcctcgggggtctcagagccgcctctcacccccgaccctccacccaggggtctccccgtcgggagtggaggcgttggtcctggaagctgactcatcggagagggaaataccaaataaacatccgaggttgcaaaaaaaaaaaaaaaaaaaaaaaaaaaaaaaaaaaaaa

SEQ ID NO: 705 - protein, 1294 aa, Homo sapiens
MASPPHQQLLHHHSTEVSCDSSGDSNSVRVKINPKQLSSNSHPKHCKYSISSSCSSSGDSGGVPRRVGGGGRLRRQKKLPQLFERASSRWWDPKFDSVNLEEACLERCFPQTQRRFRYALFYIGFACLLWSIYFAVHMRSRLIVMVAPALCFLLVCVGFFLFTFTKLYARHYAWTSLALTLLVFALTLAAQFQVLTPVSGRGDSSNLTATARPTDTCLSQVGSFSMCIEVLFLLYTVMHLPLYLSLCLGVAYSVLFETFGYHFRDEACFPSPGAGALHWELLSRGLLHGCIHAIGVHLFVMSQVRSRSTFLKVGQSIMHGKDLEVEKALKERMIHSVMPRIIADDLMKQGDEESENSVKRHATSSPKNRKKKSSIQKAPIAFRPFKMQQIEEVSILFADIVGFTKMSANKSAHALVGLLNDLFGRFDRLCEETKCEKISTLGDCYYCVAGCPEPRADHAYCCIEMGLGMIKAIEQFCQEKKEMVNMRVGVHTGTVLCGILGMRRFKFDVWSNDVNLANLMEQLGVAGKVHISEATAKYLDDRYEMEDGKVIERLGQSVVADQLKGLKTYLISGQRAKESRCSCAEALLSGFEVIDGSQVSSGPRGQGTASSGNVSDLAQTVKTFDNLKTCPSCGITFAPKSEAGAEGGAPQNGCQDEHKNSTKASGGPNPKTQNGLLSPPQEEKLTNSQTSLCEILQEKGRWAGVSLDQSALLPLRFKNIREKTDAHFVDVIKEDSLMKDYFFKPPINQFSLNFLDQELERSYRTSYQEEVIKNSPVKTFASPTFSSLLDVFLSTTVFLTLSTTCFLKYEAATVPPPPAALAVFSAALLLEVLSLAVSIRMVFFLEDVMACTKRLLEWIAGWLPRHCIGAILVSLPALAVYSHVTSEYETNIHFPVFTGSAALIAVVHYCNFCQLSSWMRSSLATVVGAGPLLLLYVSLCPDSSVLTSPLDAVQNFSSERNPCNSSVPRDLRRPASLIGQEVVLVFFLLLLLVWFLNREFEVSYRLHYHGDVEADLHRTKIQSMRDQADWLLRNIIPYHVAEQLKVSQTYSKNHDSGGVIFASIVNFSEFYEENYEGGKECYRVLNELIGDFDELLSKPDYSSIEKIKTIGATYMAASGLNTAQAQDGSHPQEHLQILFEFAKEMMRVVDDFNNNMLWFNFKLRVGFNHGPLTAGVIGTTKLLYDIWGDTVNIASRMDTTGVECRIQVSEESYRVLSKMGYDFDYRGTVNVKGKGQMKTYLYPKCTDHRVIPAPAVHLPRHPRPGGWQHRTVSHRRDCQPGAFCPVCGQDISGF

SEQ ID NO: 706 - DNA, 11740 bp, Homo sapiens
cccggagccggtgcgaggagggcacccggtgcgtccccggagcggggaggccaggccgggcaaccctggggccggtcggggcggcgtcactgcaccctccgccaggctccgcgggatgcaccgtggtagccgagggcggaggcgacactctcaggtaaattggcaggatgaggagcagcaaatcaaaagaggtgcctttaccaaatccaaggaactctcaaagcaaggatactgttcaagcagatataaccacatcgtgggatgcactttctcaaaccaaggctgctctgagacacattgaaaataaattagaagtagcccctacaagtacagctgtgtgtgattctgtcatggataccaagaagtcttctacaagtgctactcgaaaaataagtagaaaagatggtagatacctggatgattcttgggttaatgctccaatctccaaatccactaaatcacgaaaagagaaatctcgtagtcctctcagggccaccaccctggagggtaatgtgaagaaaaataatcgtgtggaatttcgtgaacctttggtttcttatagggaaatccatggtgcaccttccaatttcagttccagccatctggaatcaaagcacgtatactgtgtagatgttaatgaagaaaagactgagagcggtaactggatgataggcagtcgagaagaacggaatatacggagctgtgattttgagagctcccaatcatctgtcatcaatgatacagttgttaggtttttaaatgatcgaccagcaattgatgcattgcaaaattctgaatgtttgattaggatgggagcttctatgagaactgaggaagaaatgcctaacagaacaaaaggaagtgagaataatttgaagctttctgtgaataacatggcccatgatactgatccaaaagcgttacgactaactgactcttctccatcctctactagtacttctaattcccaaagattagatattctaaagcggcgacaacatgatgtcaaactggaaaaacttaaggaacggattagaaaacagtgggaacactcagaagaaacaaatggccggggccagaagctgggtcatattgaccatccagtaatggttgttaatgttgataactcagtaacagcaaaagtcagaaaagtggcaacagcaccacctgctccagcatataaaggtttcaacccttcagagaccaagattcgaacacctgatgggaaagtgtggcaggaggctgagtttcaaaacatgagtagagaactgtatcgagatttagcacttcactttgcagatgatatttctataaaggagaaacctgctgaaaaaagtaaagagaagaaagtagtcaagccagtacgaaaagtccaaaaagtagcacagttatcaagtacagaatgcagaacaggtagtagtcatcttataagtacatcttcttggcgagatggacaaaaattagtaaagaagattctgggacctgctcccagaatggagccaaaagagcaaagaacagcatcaagtgacagaggtggaagaagaagaactgctaaatctgggggtcacattggaagagcagaatctgatcccaggttggacgttttacatagacatcttcaaagaaactcagaacgttcgagaagtaaatctcggtctgaaaataatataaagaaactagcttcatctcttccagataataagcaggaggaaaatactgccttaaataaggactttttacctattgaaattcgtggcattcttgatgacctacagctggattctacagctcacactgcaaagcaagatactgtagagttacagaaccagaagtcatcagcaccagtacatgctcctaggagtcacagcccagtaaaaagaaaacctgacaaaataacagctaatgaagatccccctgttatttccaaaaggcgccactatgacacagatgaggtacgacagtacattgttaggcagcaggaggaaaggaagagaaagcaaaatgaagagaagaaggctcaaaaggaggctacagaacagaaaaacaaacgattacaagagctctaccggaagcagaaggaagcctttactaaagtaaaaaatgtccctccttctgagccatcagcaactaggcgactacaggaaacttactccaaattgctactagaaaagaccttgcttgaagagccatctcatcaacatgttacgcaggaaacacaggccaaaccagggtatcagccatctggagaatctgacaaagaaaacaaagtacaggaacgtcccccaagtgcatcttccagtagtgacatgtctctctcagaacctccacagcctcttgcaagaaaagacttgatggaatctacatggatgcagcctgaaagattgagcccacaagttcaccattctcaaccacagccttttgctggaacagctggaagtttactctcccatctcttgagtttagagcatgtaggaattttgcataaggattttgaatctattttaccaaccaggaagaatcataatatggcttcaaggccattaacttttacacctcaaccatatgtgacctcaccagctgcttatacagatgccttgttaaaacctagtgccagccaatataagagtaaactggatcgtattgaagccttgaaagcaacagctgcttctttgtccagcagaattgaaagtgaagccaagaaattagctggggccagcattaactatgggtcagcatggaacactgagtatgatgtgcagcaggcacctcaagaagatggaccttggaccaaggctgtaactccacctgtgaaagatgataatgaagatgttttctctgccagaattcagaagatgctgggaagctgtgtatctcatgcaacttttgatgatgatcttcctggtgtaggcaatcttagtgaatttaaaaagcttcctgagatgataagaccacagagtgccatatcaagctttagagtgagatcccctggtcccaaaccacaagggctactggcacagttatgtaaaaggcagactgactcttctagctctgatatgcaagcctgttctcaagacaaagccaaaatatctcttggttccagcatagattcagtcagtgaagggcctcttcttagtgaggggagtctctctgaagaagagggagaccaggatggacagccccttttgaaagtagcagaaattttaaaagaaaaggaattttgtcctggagaaagaaatagttatgaacccatcaaagagtttcagaaagaagctgaaaaattcttgccactttttgggcacataggtggtacacaaagcaaaggaccatgggaagaattggcaaagggaagtccacatagcgtcattaatatttttacaaaatcctatcagttatatggaaaagggtttgaagacaagttggacagaggaacatcaacatcacggcctttgaatgccaccgcaactcctctaagtggtgtttcatatgaagatgattttgtctcctctccagggactgggacttcgacagaaaaaaaatcaactcttgaacctcatagcactttaagccctcaggaggaccattctaacagaaagtctgcctatgatccttcctctgtggatgttacctcccagcattcatcaggagcccagtctgctgcatcgtctcgttcatctacttcttctaaaggaaagaaaggaaaaaaggaaaagacagaatggttggattcattcactggaaatgttcagaactcacttcttgatgaggaaaaagcagaacgtggctcccatcaaggaaagaaatctgggaccagcagcaaactttctgttaaagattttgagcagactcttgatacagatagcactttggaggatctttctggacattctgtgagtgtctcatcagataagggaagatctcagaaaactccaacttctcccctgtcaccaagttcccagaaatcattgcagtttgacgttgcaggaacttcttcagaaagatctaagtcgtcagtaatgcctccaactataacaggatttaagcctaatgcacctctcactgatctgaacccggcagccagcagaacaacgacagagaacatggctccaataccaggttctaagcgcttttctcctgctggcctccatcatcgtatggcagcagaactcagttatctgaacgccattgaggagtcggtgcgccaactgtcagatgtagaaagagttagaggcatttcacttgctcagcaggagagtgtgtctctagctcagataataaaggcacaacagcaacgccatgaaagagacttggccctcttgaaactaaaggctgaacaagaggctctggagagtcagagacaattagaagaaacccgaaacaaagcagctcaggtccatgcagaatcattacagcaggtggttcaatcacaacgggaagtaactgaagtcctgcaggaagcaacgtgtaaaatagcagctcagcagtcagaaactgctcgcctcaccacagacgcagcacgtcaaatctgtgagatggcagagttgactagaactcatatctcagatgctgtcgtggcttcaggagctccccttgcaatactgtatgaccaccaacggcagcaccttccagactttgtgaaacagctgaggaccagaactgaaacagataggaaaagtccatctgtttcactctctcagagtaaagaagggacccttgactcaaagcatcagaagtattctgcttcatatgatagttattctgagtcttcaggatacaagaatcatgatagaagaagtagcagtggtagcagccgccaagaaagtccttcagttccatcttgtaaggaaaatgagaagaaacttaatggtgaaaagatagagagttccattgatgaacaggttcagactgctgcagatgattctctacgaagtgatagtgttccatctcttcctgatgaaaaagactcaacgtctattgcaacagaatattctctgaaatttgatgaatccatgacagaagatgaaatagaagaacaatcatttcgatcattactaccttcagagagtcaccgcagatttaacatggaaaagagaagaggtcatcatgatgactctgatgaagaagcttctccagaaaaaactacactgtctactgccaaggaactgaacatgccattctcaggaggacaagatagcttttctaaatttactatggagatggttcgacagtatatgaaagaggaagaaatgagggcagctcaccagtcttcactcctgcgtctccgtgaaaaggccttgaaggagaagactaaggctgaattggcctggttagagcatcaaaaaaaacatctacgagacaaaggagaggatgataaaatgcccccgctccggaagaaacagcgtggtttgcttttaaggttgcagcaagaaaaggcagaaataaaacgtcttcaagaagccaataaggcagctcggaaggaaagacagctgattcttaaacagcaggaggagatagaaaagatccgacagaccaccataaaactacaggagaaattgaagtctgcaggggagagtaaattggactctcatagtgatgatgatacaaaggataataaggcaaccagtcctggtccaactgacttggagacccgcagtccttctcccatttcaatctccagcagtgaaactagcagcattatgcagaaactgaagaaaatgagaagccgcatggatgaaaagtttctgacaaagcgggagcaaaaattaatgcaacggcgacaacatgcagaggagctcctagagtggaagcgacgtttagatgcagaagaagcagaaattcgtcaaatggaaaaacaagctttggctgcctgggacaaagaattaataaaacccaaaactcctaagaaagaactggaggaccagagaacagaacagaaagaaatagcaagtgaagaggaatctccagtacctctgtactctcatctaaacagtgaaagctccattccagaagaattaggcagccctgctgttgaatatgtaccatccgagtctataggacaggagcagccagggagtccagatcacagtatacttactgaagaaatgatttgttcacaggaactagaatcttctacctctcctagtaaacattcacttcccaaaagctgcacatctgtgtcaaagcaggagtctagcaaaggaagtcataggactggaggacaatgtcacctgcctatcaagtcccatcagcactgttatagttggtcagatgagtcattatctatgacacagtcagaaactacatctgaccagagtgatattgaaggtaggatcagagctctgaaggatgagttgcggaaaagaaaatcagttgtgaaccagctgaagaaggaacagaaaaaaaggcaaaaggaaagactgaaagcccaagaagccagtctgatcaagcagttagagtcatatgatgaatttattaagaaaactgaagccgagcttagccaagatttggaaacatcaccaacagccaagcctcagattaaaacgctctcctcagcttctgaaaaacccaagatcaaacccctcacaccactacacagatctgaaacggcaaagaattggaaatcactaacagagtcagaacgttccagaggatccctggagcctattgctgaacatgttgatgcttcactgtctggttctgagagatcagtatcagaaaggtctttatctgcatatgcaaagagagtaaatgaatgggacagtcgaacagaagattttcagaccccatctccagttctcagatcatcaaggaaaatcagagaagaatctggagattctctagaaaatgtacctgcattacatcttctcaaagaattaaatgccactagtagaattcttgatatgtcagatggcaaggttggagaatctagtaaaaaatcagaaataaaagaaatagagtatacaaaattgaagaagagtaagattgaagatgccttttctaaagaaggtaaatctgatgtcttactgaaattagtcctagaacagggagattcatctgaaattctttcaaagaaagatcttcctttagattctgaaaatgttcagaaagacctagttggattagctattgaaaatctccataaaagtgaggaaatgttgaaagagagacagtcagatcaagatatgaatcatagtccaaacatccaatcaggaaaagacattcacgaacaaaagaacacaaaggaaaaagatttgtcttggtcagaacatctttttgctcctaaagagataccatactctgaagattttgaagtgtcttctttcaagaaagaaatttcagctgaattgtacaaagatgattttgaggtgtcatctttgctgtcactcaggaaagactctcagtcttgcagagataagccacagccaatgaggagctctacaagtggagccactagctttggtagtaatgaggaaatcagtgagtgcctaagtgagaaaagcctttctatccatagcaatgttcattctgacaggctgttggaactcaagtcccctactgagctgatgaaaagtaaggagcgcagtgatgtggagcatgaacagcaagttactgaatccccttccttggcttcagttcctactgcagacgagttatttgatttccacattggtgatagggtgttgattggaaatgttcagccaggaattcttcgattcaaaggtgagactagttttgctaaaggattttgggccggagtggagttagataaacctgaaggaaataacaatggaacatatgatggtattgcatattttgagtgcaaagaaaagcatggtatttttgctcctcctcaaaaaatatctcacattccagaaaactttgatgactatgtagacattaatgaagatgaagactgttactcagatgaacgatatcagtgctataatcaagagcaaaatgatacagagggtccaaaagacagagaaaaggatgtcagtgaatatttttatgagaaatccctacctagtgtgaatgatatagaagcctcagttaatagaagtagaagccttaaaatagaaacagacaatgtacaggacatttctggggtacttgaagcccatgttcaccagcagtcttcagtggattcacagatttcttcaaaggaaaacaaagacctcatttctgatgccacagaaaaggtttccatcgctgcagaagatgacactttagacaataccttttccgaagaattggagaagcaacagcagtttacagaagaggaagacaacctatatgctgaagcttcagaaaagctttgtacaccacttctggatcttttaacaagagaaaaaaaccaactggaagcccagctgaagtcatcactaaatgaggaaaaaaagtcaaaacaacaactggaaaaaatcagcttactgacagacagtttactaaaagtctttgtaaaggacacagtcaatcaactacaacaaatcaaaaaaaccagggatgagaaaatccagcttagcaatcaggagcttcttggtgatgaccaaaagaaagtaacaccccaagacctatcccaaaatgttgaggaacagtcgccaagtatttcaggttgcttcttaagttctgaattggaagatgaaaaagaagagatttcctctccagatatgtgtcccagaccggagagcccagtatttggtgccagtgggcaggaagaacttgctaagagacttgctgaacttgaactcagccgggagttcctgagcgcgttaggagatgatcaagactggtttgatgaagactttggtttgagctcttctcacaagatccaaaaaaataaggcagaagaaaccattgtacctctaatggcagaacctaaaagagtaacccaacaaccatgtgaaacattattggcagtcccccatactgcagaagaagtagagattcttgtacataatgcagcagaagaactttggaaatggaaagaattaggccacgatcttcatagcatcagtattcctacaaaactgcttggctgtgccagtaaaggtctagatatagaaagcactagtaaaagggtctacaaacaggcggtttttgatttaacaaaagagatttttgaggaaatatttgctgaggatcccaacttaaatcaacctgtctggatgaagccatgtagaatcaactctagttatttccgacgagtgaaaaatccaaataaccttgatgaaatcaagagcttcatagcaagtgaagtactcaagttgttcagtcttaaaaaggagccaaaccacaaaacagattggcagaaaatgatgaaatttggaagaaagaaaagagaccgagtggatcatatcctggttcaggagctccatgaggaggaggcacagtgggtgaactatgatgaggatgagttgtgtgtgaaaatgcagctagccgacgggatctttgagaccctgatcaaagatactattgatgttctgaatcagatcagtgaaaagcaggggagaatgctactagtgtgacatcttgcaaataaatcgaacgctgagtgctaatgtgagtcctgggcctttctgcctcctgatgtacacccatcgccatcatagcaagagtgcttctggaccttgtacttattcttaaagactaccagtatggagttcataggacaatgtggtacacctggtattacagcctttgcctttcgagactatccactggattaatgggttattttcagtgggcagggttgcacagtgtaatcctacaccttttgctaacacccctactaggtcccagagggccagaaacacctgacttacctctgagtttagactagggtatcacttctttgagtctgaagtcaagtgagagaggtatagataaatgcatcacatcacttttgaaatgtaattctggtctataccatggaagtcataaatggacattatagtctctaaacagtattaaacccttaaccacttctaaaataggcaagctcaataatgtctgccaacttcacattctggagtttatttcatttctttttgaagaccattttcttccattattgtagttgagcagcaccaagtggactgtcaggctaacaggaataagtggtagccttgctttctgagcaccatctaaagaattttaaacctctgcattatgtttagtgttctctgtgtgggcatgaaaacaaagaaatgcccctactgaagactgggctcaaaggaccaatgcagggctggttcttttaccccttggtttactcctgcacttgtcttactcattctgaatctctaccagctgctcccagaatcacagatactcaggaccatctcaggcatccaggcatggcaaagtggaaataattcattttggcctgcaaaccttcaactcccatctttccccaagaagtcagagatgctgttacttgaatgatttaggaaatgagtgtgtgcaccaaagacaaaaagatattgtctattgtttgtgtgcttgttttgcgctatggaacattttttaatttattttaagataaattattaagttgaaaatgtgtgtccctattcagaagtgaaagattcatcttgtaatagttaaacctccatcttgaagcttctatggttcatagtctttgcacaggaacctgtggttttaacaaaccaatacacatattgaagaagtcattttaattcagtgaaacgaagatgggcttttccagatcacctgcaatagcagcagtgggataaaatgatttaaaaacactgtacaatttaactctgcctctcttgcagcattgcttctcacaactattacctgcatctgaaaaaaaatctatagactccagctgctacattagagcataagagatgctctcctgggacctcagtaccctgccttcttgactggtttccgttcatcagtcctgtccctcttcaagtaatctagaagaatgtggatactcttaggcgtgaatgtaaatgccttaatattgaaggtcctggttagaagcatgatacaagacatctactggattcatatttacaaatatcctggaatgttatagcttcaaagtatattagaaaaaccccaaagatggtataatctttaagtgtgcacgttcgtttatttctgcatcttccctccaaacttgcctttgcatcttaaatatttcactatgcacactcccattcctcttgggtttcatcttgtcgtttaagaaatgtactgaaataatcattggaatatttgcattttgcacaatgactggtatgatagctcttgacaaataaggaaagcactgaaatgttgtgattgggtctcgggaaatgctcagattgatgtcttaccagcatttcttctgggcttgtgatgttgagctgtagtcttgtagccataatgagcaaattgactaagagaagcaaaggtttcttggggttattaaccagtagtgtggaaatactagttttatgtggccaaggaaaagcaaagccttttcttttcagtttgtgttatttggaagacagaaaaacatcttgtctacatcctttggctgtttgtaggatcacgttgtccttacgatactgaaactttacagctgctgtaaattttttataaatgaatttcaaaatgttataatgggactgtaggttgtttttctacatcttcattatttggacctaaaaccagtttttaataagaaagtttatctttactctttctgaaattatgactccag

SEQ ID NO: 707 - protein, 3117 aa, Homo sapiens
MRSSKSKEVPLPNPRNSQSKDTVQADITTSWDALSQTKAALRHIENKLEVAPTSTAVCDSVMDTKKSSTSATRKISRKDGRYLDDSWVNAPISKSTKSRKEKSRSPLRATTLEGNVKKNNRVEFREPLVSYREIHGAPSNFSSSHLESKHVYCVDVNEEKTESGNWMIGSREERNIRSCDFESSQSSVINDTVVRFLNDRPAIDALQNSECLIRMGASMRTEEEMPNRTKGSENNLKLSVNNMAHDTDPKALRLTDSSPSSTSTSNSQRLDILKRRQHDVKLEKLKERIRKQWEHSEETNGRGQKLGHIDHPVMVVNVDNSVTAKVRKVATAPPAPAYKGFNPSETKIRTPDGKVWQEAEFQNMSRELYRDLALHFADDISIKEKPAEKSKEKKVVKPVRKVQKVAQLSSTECRTGSSHLISTSSWRDGQKLVKKILGPAPRMEPKEQRTASSDRGGRRRTAKSGGHIGRAESDPRLDVLHRHLQRNSERSRSKSRSENNIKKLASSLPDNKQEENTALNKDFLPIEIRGILDDLQLDSTAHTAKQDTVELQNQKSSAPVHAPRSHSPVKRKPDKITANEDPPVISKRRHYDTDEVRQYIVRQQEERKRKQNEEKKAQKEATEQKNKRLQELYRKQKEAFTKVKNVPPSEPSATRRLQETYSKLLLEKTLLEEPSHQHVTQETQAKPGYQPSGESDKENKVQERPPSASSSSDMSLSEPPQPLARKDLMESTWMQPERLSPQVHHSQPQPFAGTAGSLLSHLLSLEHVGILHKDFESILPTRKNHNMASRPLTFTPQPYVTSPAAYTDALLKPSASQYKSKLDRIEALKATAASLSSRIESEAKKLAGASINYGSAWNTEYDVQQAPQEDGPWTKAVTPPVKDDNEDVFSARIQKMLGSCVSHATFDDDLPGVGNLSEFKKLPEMIRPQSAISSFRVRSPGPKPQGLLAQLCKRQTDSSSSDMQACSQDKAKISLGSSIDSVSEGPLLSEGSLSEEEGDQDGQPLLKVAEILKEKEFCPGERNSYEPIKEFQKEAEKFLPLFGHIGGTQSKGPWEELAKGSPHSVINIFTKSYQLYGKGFEDKLDRGTSTSRPLNATATPLSGVSYEDDFVSSPGTGTSTEKKSTLEPHSTLSPQEDHSNRKSAYDPSSVDVTSQHSSGAQSAASSRSSTSSKGKKGKKEKTEWLDSFTGNVQNSLLDEEKAERGSHQGKKSGTSSKLSVKDFEQTLDTDSTLEDLSGHSVSVSSDKGRSQKTPTSPLSPSSQKSLQFDVAGTSSERSKSSVMPPTITGFKPNAPLTDLNPAASRTTTENMAPIPGSKRFSPAGLHHRMAAELSYLNAIEESVRQLSDVERVRGISLAQQESVSLAQIIKAQQQRHERDLALLKLKAEQEALESQRQLEETRNKAAQVHAESLQQVVQSQREVTEVLQEATCKIAAQQSETARLTTDAARQICEMAELTRTHISDAVVASGAPLAILYDHQRQHLPDFVKQLRTRTETDRKSPSVSLSQSKEGTLDSKHQKYSASYDSYSESSGYKNHDRRSSSGSSRQESPSVPSCKENEKKLNGEKIESSIDEQVQTAADDSLRSDSVPSLPDEKDSTSIATEYSLKFDESMTEDEIEEQSFRSLLPSESHRRFNMEKRRGHHDDSDEEASPEKTTLSTAKELNMPFSGGQDSFSKFTMEMVRQYMKEEEMRAAHQSSLLRLREKALKEKTKAELAWLEHQKKHLRDKGEDDKMPPLRKKQRGLLLRLQQEKAEIKRLQEANKAARKERQLILKQQEEIEKIRQTTIKLQEKLKSAGESKLDSHSDDDTKDNKATSPGPTDLETRSPSPISISSSETSSIMQKLKKMRSRMDEKFLTKREQKLMQRRQHAEELLEWKRRLDAEEAEIRQMEKQALAAWDKELIKPKTPKKELEDQRTEQKEIASEEESPVPLYSHLNSESSIPEELGSPAVEYVPSESIGQEQPGSPDHSILTEEMICSQELESSTSPSKHSLPKSCTSVSKQESSKGSHRTGGQCHLPIKSHQHCYSWSDESLSMTQSETTSDQSDIEGRIRALKDELRKRKSVVNQLKKEQKKRQKERLKAQEASLIKQLESYDEFIKKTEAELSQDLETSPTAKPQIKTLSSASEKPKIKPLTPLHRSETAKNWKSLTESERSRGSLEPIAEHVDASLSGSERSVSERSLSAYAKRVNEWDSRTEDFQTPSPVLRSSRKIREESGDSLENVPALHLLKELNATSRILDMSDGKVGESSKKSEIKEIEYTKLKKSKIEDAFSKEGKSDVLLKLVLEQGDSSEILSKKDLPLDSENVQKDLVGLAIENLHKSEEMLKERQSDQDMNHSPNIQSGKDIHEQKNTKEKDLSWSEHLFAPKEIPYSEDFEVSSFKKEISAELYKDDFEVSSLLSLRKDSQSCRDKPQPMRSSTSGATSFGSNEEISECLSEKSLSIHSNVHSDRLLELKSPTELMKSKERSDVEHEQQVTESPSLASVPTADELFDFHIGDRVLIGNVQPGILRFKGETSFAKGFWAGVELDKPEGNNNGTYDGIAYFECKEKHGIFAPPQKISHIPENFDDYVDINEDEDCYSDERYQCYNQEQNDTEGPKDREKDVSEYFYEKSLPSVNDIEASVNRSRSLKIETDNVQDISGVLEAHVHQQSSVDSQISSKENKDLISDATEKVSIAAEDDTLDNTFSEELEKQQQFTEEEDNLYAEASEKLCTPLLDLLTREKNQLEAQLKSSLNEEKKSKQQLEKISLLTDSLLKVFVKDTVNQLQQIKKTRDEKIQLSNQELLGDDQKKVTPQDLSQNVEEQSPSISGCFLSSELEDEKEEISSPDMCPRPESPVFGASGQEELAKRLAELELSREFLSALGDDQDWFDEDFGLSSSHKIQKNKAEETIVPLMAEPKRVTQQPCETLLAVPHTAEEVEILVHNAAEELWKWKELGHDLHSISIPTKLLGCASKGLDIESTSKRVYKQAVFDLTKEIFEEIFAEDPNLNQPVWMKPCRINSSYFRRVKNPNNLDEIKSFIASEVLKLFSLKKEPNHKTDWQKMMKFGRKKRDRVDHILVQELHEEEAQWVNYDEDELCVKMQLADGIFETLIKDTIDVLNQISEKQGRMLLV

SEQ ID NO: 708 - DNA, 2838 bp, Homo sapiens
ccagtgtggtggaattcgtccgcggtggtggcggtgcaagagagctgagggaggcgcgagggcgcggagttccaggtcgagcagttaggccgcgagcgactgcggcgccgagccgatgagtaacccgaagcccctagaggagtggtcacctgcctgagggcacttctgtcccaccagcatcagaccaggccgcaccgagtccccggcaccatgtttgggaagaggaagaagcgggtggagatctccgcgccgtccaacttcgagcaccgcgtgcacacgggcttcgaccagcacgagcagaagttcacggggctgccccgccagtggcagagcctgatcgaggagtcggctcgccggcccaagcccctcgtcgaccccgcctgcatcacctccatccagcccggggcccccaagaccatcgtgcggggcagcaaaggtgccaaagatggggccctcacgctgctgctggacgagtttgagaacatgtcggtgacacgctccaactccctgcggagagacagcccgccgccgcccgcccgtgcccgccaggaaaatgggatgccagaggagccggccaccacggccagagggggcccagggaaggcaggcagccgaggccggttcgccggtcacagcgaggcgggtggcggcagtggtgacaggcgacgggcggggccagagaagaggcccaagtcttccagggagggctcagggggtccccaggagtcctcccgggacaaacgccccctctccgggcctgatgtcggcaccccccagcctgctggtctggccagtggggcgaaactggcagctggccggccctttaacacctacccgagggctgacacggaccacccatcccggggtgcccagggggagcctcatgacgtggcccctaacgggccatcagcggggggcctggccatcccccagtcctcctcctcctcctcccggcctcccacccgagcccgaggtgcccccagccctggagtgctgggaccccacgcctcagagccccagctggcccctccagcctgcacccccgccgcccctgctgttcctgggccccctggcccccgctcaccacagcgggagccacagcgagtatcccatgagcagttccgggctgccctgcagctggtggtggacccaggcgacccccgctcctacctggacaacttcatcaagattggcgagggctccacgggcatcgtgtgcatcgccaccgtgcgcagctcgggcaagctggtggccgtcaagaagatggacctgcgcaagcagcagaggcgcgagctgctcttcaacgaggtggtaatcatgagggactaccagcacgagaatgtggtggagatgtacaacagctacctggtgggggacgagctctgggtggtcatggagttcctggaaggaggcgccctcaccgacatcgtcacccacaccaggatgaacgaggagcagatcgcggccgtgtgccttgcagtgctgcaggccctgtcggtgctccacgcccagggcgtcatccaccgggacatcaagagcgactcgatcctgctgacccatgatggcagggtgaagctgtcagactttgggttctgcgcccaggtgagcaaggaagtgccccgaaggaagtcgctggtcggcacgccctactggatggccccagagctcatctcccgccttccctacgggccagaggtagacatctggtcgctggggataatggtgattgagatggtggacggagagcccccctacttcaacgagccacccctcaaagccatgaagatgattcgggacaacctgccaccccgactgaagaacctgcacaaggtgtcgccatccctgaagggcttcctggaccgcctgctggtgcgagaccctgcccagcgggccacggcagccgagctgctgaagcacccattcctggccaaggcagggccgcctgccagcatcgtgcccctcatgcgccagaaccgcaccagatgaggcccagcgcccttcccctcaaccaaagagccccccgggtcacccccgccccactgaggccagtagggggccaggcctcccactcctcccagcccgggagatgctccgcgtggcaccaccctccttgctgggggtagatgagaccctactactgaactccagttttgatctcgtgacttttagaaaaacacagggactcgtgggagcaagcgaggctcccaggacccccaccctctgggacaggccctcccccatgttcttctgtctccaggaagggcagcggccctcccatcactggaagtctgcagtgggggtcgctgggggtggagagaacactaagaggtgaacatgtatgagtgtgtgcacgcgtgtgagtgtgcatgtgtgtgtgtgtgcaaaggtccagccaccccgtcctccagcccgcaaggggtgtctggcgccttgcctgacacccagccccctctccccctgagccattgtgggggtcgatcatgaatgtccgaagagtggccttttcccgtagccctgcgccccctttctgtggctggatggggagacaggtcagggccccccaccctctccagcccctgcagcaaatgactactgcacctggacagcctcctcttttctagaagtctatttatattgtcattttataacactctagcccctgcccttattgggggacagatggtccctgtcctgcggggtggccctggcagaaccactgcctgaagaaccaggttcctgcccggtcagcgcagccccagcccgcccacccctgcctcgagttagttttacaattaaaacattgtcttgtttaaaaaaaaaaaaaaaaaaaaaaaaaaa

SEQ ID NO: 709 - protein, 591 aa, Homo sapiens
MFGKRKKRVEISAPSNFEHRVHTGFDQHEQKFTGLPRQWQSLIEESARRPKPLVDPACITSIQPGAPKTIVRGSKGAKDGALTLLLDEFENMSVTRSNSLRRDSPPPPARARQENGMPEEPATTARGGPGKAGSRGRFAGHSEAGGGSGDRRRAGPEKRPKSSREGSGGPQESSRDKRPLSGPDVGTPQPAGLASGAKLAAGRPFNTYPRADTDHPSRGAQGEPHDVAPNGPSAGGLAIPQSSSSSSRPPTRARGAPSPGVLGPHASEPQLAPPACTPAAPAVPGPPGPRSPQREPQRVSHEQFRAALQLVVDPGDPRSYLDNFIKIGEGSTGIVCIATVRSSGKLVAVKKMDLRKQQRRELLFNEVVIMRDYQHENVVEMYNSYLVGDELWVVMEFLEGGALTDIVTHTRMNEEQIAAVCLAVLQALSVLHAQGVIHRDIKSDSILLTHDGRVKLSDFGFCAQVSKEVPRRKSLVGTPYWMAPELISRLPYGPEVDIWSLGIMVIEMVDGEPPYFNEPPLKAMKMIRDNLPPRLKNLHKVSPSLKGFLDRLLVRDPAQRATAAELLKHPFLAKAGPPASIVPLMRQNRTR

SEQ ID NO: 710 - DNA, 2244 bp, Homo sapiens
ctgcagacgaggcagggagaggcgggacttcgcgggcgagacgtcatcggggcgccggacgccggggcgcctgggagtttgaagcaaacaggcagcgcgcgacaatggcggtcgctcgtgcagctttggggccattggtgacgggtctgtacgacgtgcaggctttcaagtttggggacttcgtgctgaagagcgggctttcctcccccatctacatcgatctgcggggcatcgtgtctcgaccgcgtcttctgagtcaggttgcagatattttattccaaactgcccaaaatgcaggcatcagttttgacaccgtgtgtggagtgccttatacagctttgccattggctacagttatctgttcaaccaatcaaattccaatgcttattagaaggaaagaaacaaaggattatggaactaagcgtcttgtagaaggaactattaatccaggagaaacctgtttaatcattgaagatgttgtcaccagtggatctagtgttttggaaactgttgaggttcttcagaaggagggcttgaaggtcactgatgccatagtgctgttggacagagagcagggaggcaaggacaagttgcaggcgcacgggatccgcctccactcagtgtgtacattgtccaaaatgctggagattctcgagcagcagaaaaaagttgatgctgagacagttgggagagtgaagaggtttattcaggagaatgtctttgtggcagcgaatcataatggttctcccctttctataaaggaagcacccaaagaactcagcttcggtgcacgtgcagagctgcccaggatccacccagttgcatcgaagcttctcaggcttatgcaaaagaaggagaccaatctgtgtctatctgctgatgtttcactggccagagagctgttgcagctagcagatgctttaggacctagtatctgcatgctgaagactcatgtagatattttgaatgattttactctggatgtgatgaaggagttgataactctggcaaaatgccatgagttcttgatatttgaagaccggaagtttgcagatataggaaacacagtgaaaaagcagtatgaaggaggtatctttaaaatagcttcctgggcagatctagtaaatgctcacgtggtgccaggctcaggagttgtgaaaggcctgcaagaagtgggcctgcctttgcatcgggggtgcctccttattgcggaaatgagctccaccggctccctggccactggggactacactagagcagcggttagaatggctgaggagcactctgaatttgttgttggttttatttctggctcccgagtaagcatgaaaccagaatttcttcacttgactccaggagttcagttggaagcaggaggagataatcttggccaacagtacaatagcccacaagaagttattggcaaacgaggttccgatatcatcattgtaggtcgtggcataatctcagcagctgatcgtctggaagcagcagagatgtacagaaaagctgcttgggaagcgtatttgagtagacttggtgtttgagtgcttcagatacatttttcagatacaatgtgaagacattgaagatatgtggtcctcctgaaagtcactggctggaaataatccaattattcctgcttggattcttccacagggcctgtgtaagaatgggttctggagttctcatggtctttaggaaatattgagtaatttgtaatcaccgcattgatactataataagttcattcttaagcttgctttttttgagactggtgtttgttagacagccacagtcctgtctgggttagggtcttccacatttgaggatccttcctatctctccatgggactagactgctttgttattctatttattttttaatttttttcgagacaggatctcactctgttgcccaggatggagtgcagtggtgagatcacggctcattgcagcctcgacctcccaggtgatcctcccacctcagcttccagattagctggtgctataggcatgcaccaccacgtccatctaaatttctttattatttgtagagatgaggtcttgccatgttacccaggctggtctcaactcctgggctcaagcgatcctcctgcctcagtctctcaaagtgctgggattacaggtgtgagccactgtgcccagcctaattgcagtaagacaaaaattctagggcaccaagaggctaaagtcagcacagcttttcttgtgtcctgtatt

SEQ ID NO: 711 - protein, 480 aa, Homo sapiens
MAVARAALGPLVTGLYDVQAFKFGDFVLKSGLSSPIYIDLRGIVSRPRLLSQVADILFQTAQNAGISFDTVCGVPYTALPLATVICSTNQIPMLIRRKETKDYGTKRLVEGTINPGETCLIIEDVVTSGSSVLETVEVLQKEGLKVTDAIVLLDREQGGKDKLQAHGIRLHSVCTLSKMLEILEQQKKVDAETVGRVKRFIQENVFVAANHNGSPLSIKEAPKELSFGARAELPRIHPVASKLLRLMQKKETNLCLSADVSLARELLQLADALGPSICMLKTHVDILNDFTLDVMKELITLAKCHEFLIFEDRKFADIGNTVKKQYEGGIFKIASWADLVNAHVVPGSGVVKGLQEVGLPLHRGCLLIAEMSSTGSLATGDYTRAAVRMAEEHSEFVVGFISGSRVSMKPEFLHLTPGVQLEAGGDNLGQQYNSPQEVIGKRGSDIIIVGRGIISAADRLEAAEMYRKAAWEAYLSRLGV

SEQ ID NO: 712 - DNA, 1752 bp, Homo sapiens
ctgctccttctaggatctccgcctggttcggcccgcctgcctccactcctgcctccaccatgtccatcagggtgacccagaagtcctacaaggtgtccacctctggcccccgggccttcagcagccgctcctacacgagtgggcccggttcccgcatcagctcctcgagcttctcccgagtgggcagcagcaactttcgcggtggcctgggcggcggctatggtggggccagcggcatgggaggcatcaccgcagttacggtcaaccagagcctgctgagcccccttgtcctggaggtggaccccaacatccaggccgtgcgcacccaggagaaggagcagatcaagaccctcaacaacaagtttgcctccttcatagacaaggtacggttcctggagcagcagaacaagatgctggagaccaagtggagcctcctgcagcagcagaagacggctcgaagcaacatggacaacatgttcgagagctacatcaacaaccttaggcggcagctggagactctgggccaggagaagctgaagctggaggcggagcttggcaacatgcaggggctggtggaggacttcaagaacaagtatgaggatgagatcaataagcgtacagagatggagaacgaatttgtcctcatcaagaaggatgtggatgaagcttacatgaacaaggtagagctggagtctcgcctggaagggctgaccgacgagatcaacttcctcaggcagctatatgaagaggagatccgggagctgcagtcccagatctcggacacatctgtggtgctgtccatggacaacagccgctccctggacatggacagcatcattgctgaggtcaaggcacagtacgaggatattgccaaccgcagccgggctgaggctgagagcatgtaccagatcaagtatgaggagctgcagagcctggctgggaagcacggggatgacctgcggcgcacaaagactgagatctctgagatgaaccggaacatcagccggctccaggctgagattgagggcctcaaaggccagagggcttccctggaggccgccattgcagatgccgagcagcgtggagagctggccattaaggatgccaacgccaagttgtccgagctggaggccgccctgcagcgggccaagcaggacatggcgcggcagctgcgtgagtaccaggagctgatgaacgtcaagctggccctggacatcgagatcgccacctacaggaagctgctggagggcgaggagagccggctggagtctgggatgcagaacatgagtattcatacgaagaccaccagcggctatgcaggtggtctgagctcggcctatgggggcctcacaagccccggcctcagctacagcctgggctccagctttggctctggcgcgggctccagctccttcagccgcaccagctcctccagggccgtggttgtgaagaagatcgagacacgtgatgggaagctggtgtctgagtcctctgacgtcctgcccaagtgaacagctgcggcagcccctcccagcctacccctcctgcgctgccccagagcctgggaaggaggccgctatgcagggtagcactgggaacaggagacccacctgaggctcagccctagccctcagcccacctggggagtttactacctggggaccccccttgcccatgcctccagctacaaaacaattcaattgctttttttttttggtccaaaataaaacctcagctagctctgccaaaccc

SEQ ID NO: 713 - protein, 483 aa, Homo sapiens
MSIRVTQKSYKVSTSGPRAFSSRSYTSGPGSRISSSSFSRVGSSNFRGGLGGGYGGASGMGGITAVTVNQSLLSPLVLEVDPNIQAVRTQEKEQIKTLNNKFASFIDKVRFLEQQNKMLETKWSLLQQQKTARSNMDNMFESYINNLRRQLETLGQEKLKLEAELGNMQGLVEDFKNKYEDEINKRTEMENEFVLIKKDVDEAYMNKVELESRLEGLTDEINFLRQLYEEEIRELQSQISDTSVVLSMDNSRSLDMDSIIAEVKAQYEDIANRSRAEAESMYQIKYEELQSLAGKHGDDLRRTKTEISEMNRNISRLQAEIEGLKGQRASLEAAIADAEQRGELAIKDANAKLSELEAALQRAKQDMARQLREYQELMNVKLALDIEIATYRKLLEGEESRLESGMQNMSIHTKTTSGYAGGLSSAYGGLTSPGLSYSLGSSFGSGAGSSSFSRTSSSRAVVVKKIETRDGKLVSESSDVLPK

SEQ ID NO: 714 - DNA, 1070 bp, Homo sapiens
atgttttgttgcttaggatatgaatggctgagcggaggctgtaaaacctggcactctgcttgggttatcaatactctggctgaccatcgtcatcgtgggactgactttggtggaagtccttggttacttatcattactgtgtttctgagaagttataaatttgccatctccctctgcacaacttacctttgtgtgtctttcctgaagactatcttcccgtctcaaaatggacatgatggatccacggatgtacagcagagagccaggaggtccaaccgccgtagacaggaaggaattaaaattgtcctggaagacatctttactttatggagacaggtggaaaccaaagttcgagctaaaatccgtaagatgaaggtgacaacaaaagtcaaccgtcatgacaaaatcaatggaaagaggaagaccgccaaagaacatctgaggaaactaagcatgaaagaacgtgagcacggagaaaaggagaggcaggtgtcagaggcagaggaaaatgggaaattggatatgaaagaaatacacacctacatggaaatgtttcaacgtgcgcaagcgttgcggcggcgggcagaggactactacagatgcaaaatcaccccttctgcaagaaagcctctttgcaaccgggtcagaatggcggcagtggagcatcgtcattcttcaggattgccctactggccctacctcacagctgaaactttaaaaaacaggatgggccaccagccacctcctccaactcaacaacattctataattgataactccctgagcctcaagacaccttccgagtgtctgctcactccccttccaccctcagctctaccctcagcggatgataatctcaagacacctgcggagtgtctgctctatccccttccaccctcagcggatgataatctcaagacacctcccgagtgtctgctcactccccttccaccctcagctccaccctcagcggatgataatctcaagacacctcccgagtgtgtctgctcactccccttccaccctcagcggatgataatctcaagaaactaaggaagaataaataaata

SEQ ID NO: 715 - protein, 350 aa, Homo sapiens
MFCCLGYEWLSGGCKTWHSAWVINTLADHRHRGTDFGGSPWLLIITVFLRSYKFAISLCTTYLCVSFLKTIFPSQNGHDGSTDVQQRARRSNRRRQEGIKIVLEDIFTLWRQVETKVRAKIRKMKVTTKVNRHDKINGKRKTAKEHLRKLSMKEREHGEKERQVSEAEENGKLDMKEIHTYMEMFQRAQALRRRAEDYYRCKITPSARKPLCNRVRMAAVEHRHSSGLPYWPYLTAETLKNRMGHQPPPPTQQHSIIDNSLSLKTPSECLLTPLPPSALPSADDNLKTPAECLLYPLPPSADDNLKTPPECLLTPLPPSAPPSADDNLKTPPECVCSLPFHPQRMIISRN

SEQ ID NO: 716 - DNA, 2422 bp, Homo sapiens
gtcagcctcccttccaccgccatattgggccactaaaaaaagggggctcgtcttttcggggtgtttttctccccctcccctgtccccgcttgctcacggctctgcgactccgacgccggcaaggtttggagagcggctgggttcgcgggacccgcgggcttgcacccgcccagactcggacgggctttgccaccctctccgcttgcctggtcccctctcctctccgccctcccgctcgccagtccatttgatcagcggagactcggcggccgggccggggcttccccgcagcccctgcgcgctcctagagctcgggccgtggctcgtcggggtctgtgtcttttggctccgagggcagtcgctgggcttccgagaggggttcgggccgcgtaggggcgctttgttttgttcggttttgtttttttgagagtgcgagagaggcggtcgtgcagacccgggagaaagatgtcaaacgtgcgagtgtctaacgggagccctagcctggagcggatggacgccaggcaggcggagcaccccaagccctcggcctgcaggaacctcttcggcccggtggaccacgaagagttaacccgggacttggagaagcactgcagagacatggaagaggcgagccagcgcaagtggaatttcgattttcagaatcacaaacccctagagggcaagtacgagtggcaagaggtggagaagggcagcttgcccgagttctactacagacccccgcggccccccaaaggtgcctgcaaggtgccggcgcaggagagccaggatgtcagcgggagccgcccggcggcgcctttaattggggctccggctaactctgaggacacgcatttggtggacccaaagactgatccgtcggacagccagacggggttagcggagcaatgcgcaggaataaggaagcgacctgcaaccgacgattcttctactcaaaacaaaagagccaacagaacagaagaaaatgtttcagacggttccccaaatgccggttctgtggagcagacgcccaagaagcctggcctcagaagacgtcaaacgtaaacagctcgaattaagaatatgtttccttgtttatcagatacatcactgcttgatgaagcaaggaagatatacatgaaaattttaaaaatacatatcgctgacttcatggaatggacatcctgtataagcactgaaaaacaacaacacaataacactaaaattttaggcactcttaaatgatctgcctctaaaagcgttggatgtagcattatgcaattaggtttttccttatttgcttcattgtactacctgtgtatatagtttttaccttttatgtagcacataaactttggggaagggagggcagggtggggctgaggaactgacgtggagcggggtatgaagagcttgctttgatttacagcaagtagataaatatttgacttgcatgaagagaagcaattttggggaagggtttgaattgttttctttaaagatgtaatgtccctttcagagacagctgatacttcatttaaaaaaatcacaaaaatttgaacactggctaaagataattgctatttatttttacaagaagtttattctcatttgggagatctggtgatctcccaagctatctaaagtttgttagatagctgcatgtggcttttttaaaaaagcaacagaaacctatcctcactgccctccccagtctctcttaaagttggaatttaccagttaattactcagcagaatggtgatcactccaggtagtttggggcaaaaatccgaggtgcttgggagttttgaatgttaagaattgaccatctgcttttattaaatttgttgacaaaattttctcattttcttttcacttcgggctgtgtaaacacagtcaaaataattctaaatccctcgatatttttaaagatctgtaagtaacttcacattaaaaaatgaaatattttttaatttaaagcttactctgtccatttatccacaggaaagtgttatttttaaaggaaggttcatgtagagaaaagcacacttgtaggataagtgaaatggatactacatctttaaacagtatttcattgcctgtgtatggaaaaaccatttgaagtgtacctgtgtacataactctgtaaaaacactgaaaaattatactaacttatttatgttaaaagattttttttaatctagacaatatacaagccaaagtggcatgttttgtgcatttgtaaatgctgtgttgggtagaataggttttcccctcttttgttaaataatatggctatgcttaaaaggttgcatactgagccaagtataattttttgtaatgtgtgaaaaagatgccaattattgttacacattaagtaatcaataaagaaaacttccatagctaaaaaaaaaaaaaaaaaaa

SEQ ID NO: 717 - protein, 198 aa, Homo sapiens
MSNVRVSNGSPSLERMDARQAEHPKPSACRNLFGPVDHEELTRDLEKHCRDMEEASQRKWNFDFQNHKPLEGKYEWQEVEKGSLPEFYYRPPRPPKGACKVPAQESQDVSGSRPAAPLIGAPANSEDTHLVDPKTDPSDSQTGLAEQCAGIRKRPATDDSSTQNKRANRTEENVSDGSPNAGSVEQTPKKPGLRRRQT

SEQ ID NO: 718 - DNA, 15552 bp, Homo sapiens
atggcgacgagcggcggcgaagaggcggcggcagcggctccggcgccggggaccccggcaacgggggcggacacgaccccgggctgggaggtggctgtgcggcccctgctgtccgcgtcctactccgccttcgagatgaaggagttgccgcagctggtggcctcagtcatcgagagtgaatcagaaatcctgcaccatgagaagcagtacgagccattctactcatcttttgttgcactttccacacactatattacaacagtttgcagtctcattccccggaaccaacttcagtcagtggcagcagcctgtaaagttctaattgagttttctctcctgcgtctggagaatccagatgaggcttgtgctgtgtcccagaaacacttgattctcctaatcaagggcctgtgcactggctgtagccgactagatagaactgaaattatcacatttacagcaatgatgaaatccgccaagctgccccaaacagtgaagacactttcagacgtggaagatcagaaagagctggcctcaccagtaagccctgagttgaggcaaaaggaggtacagatgaattttttgaaccagctgacctcagtttttaaccctagaactgtagcatcacaacctatcagtacacagactctggtggaaggagaaaatgatgagcagtcatctacagatcaagcctcagctatcaaaaccaagaatgtgttcatagctcagaacgtggctagtcttcaagagcttggtggctcggagaagctactgcgtgtatgtttgaacctgccatatttcctacgctatatcaatcggttccaagatgcagttttagctaattccttcttcataatgcctgcaacagtagcagatgccactgctgttcgtaatggctttcattcattggtgattgatgtaactatggcattggataccctttctctacctgtgttggaacctctcaatccttctcgtctacaagatgtgacagtcctcagcctaagttgtctgtatgcaggtgtgagtgtggcaacgtgcatggccatcctccatgtgggtagtgcccagcaagtgcggacagggtccacgagctccaaagaagatgactatgaaagtgacgcagctacaattgtccagaaatgtctcgaaatctatgacatgattggacaagcaatcagcagttctcgccgggctggtggtgagcactatcagaatttccaattgctgggtgcttggtgcttgttaaacagccttttcctcatactgaacctcagtcctactgcgttggctgataaggggaaagagaaggacccactggctgccctccgagtcagagacatcctttctcgtactaaagagggagtgggctcccctaaactggggcctggaaaagggcatcagggatttggggtactctcagtaatattggcaaaccatgccatcaaactgctaacgtctctctttcaagacctacaagtggaggcccttcacaagggttgggagacagatggcccccctgcagccttgagcattatggcccagagcacctccatacagaggattcaacggctgattgactctgtcccactgatgaacctgctcttgacgttactttcaacttcctacagaaaggcatgtgtcctgcagcggcagaggaagggctccatgagcagcgatgccagcgcctccaccgactccaatacttactatgaggacgatttcagtagcacggaggaggacagcagccaagacgatgacagtgagcctattttggggcaatggtttgaggagactatttctcccagtaaagagaaagcagcacctccgcctcctcccccacctcctccactggaaagctctcctcgggttaaaagccccagtaagcaggcccctggtgagaagggcaacattctggcgagtcgcaaagatcctgagttgttcttaggtctggcttccaacattttgaacttcatcacctcttccatgctgaactctcggaacaattttatccgaaactatctgagtgtatctctttcagaacaccatatggccaccctagccagtatcatcaaggaggtggacaaagatggactcaagggttcatcagatgaagagtttgctgcagctctctatcacttcaaccactcactggtaacctctgaccttcagtcacctaacctgcagaacacactgttgcagcagctaggagtggctcctttttctgagggcccttggcccttgtacattcaccctcaaagcctctctgtgctttcacgcctcctgctcatctggcaacataaagccagtgctcaaggtgaccctgacgtcccagaatgccttaaagtttgggacaggtttttgtctacaatgaagcagaatgccctgcaaggtgtggtgcccagtgagacagaggatctgaatgtagaacacctgcagatgctcctcctcattttccacaatttcaccgagacaggccggcgggccatattgtcgctttttgtccagatcatccaggagttgagcgtcaacatggatgctcagatgcgcttcgtgccgcttatcttggctcgcctccttctcatctttgattatctgcttcatcagtactccaaagcccctgtgtatctatttgagcaggtacagcataacctgctaagtcctccctttgggtgggcaagtggatcccaggacagcaacagccgccgggcaaccactcctctctatcatggattcaaagaagtagaagaaaactggtctaagcatttctcatcagatgctgtcccacaccccagattctactgtgtcctgtccccagaagcctcagaggatgatttgaaccgacttgattctgtggcatgtgacgtccttttctccaagcttgtcaagtatgatgagctttatgctgcactgacagccctgcttgcagctgggtcccagcttgatacagttaggagaaaggaaaacaagaatgtaacagccttggaggcctgtgcccttcaatattacttcttgatactgtggaggatcctaggaattttaccaccatcaaagacttacattaaccagctatccatgaactcacctgagatgagcgaatgtgacatcttgcacactctgcgatggtcttctcggctccggatcagctcctatgtcaactggataaaggatcaccttatcaaacagggaatgaaggctgagcatgctagctcgcttctagaactggcatccaccactaagtgtagctcagtgaaatatgatgttgaaatagtagaggaatacttcgctcgacagatctcatccttctgtagtatcgactgtaccaccatcttgcagctgcatgaaattcccagtctgcagtccatctacacccttgatgccgcgatctcaaaggtccaggtctctttggatgagcatttttctaagatggctgctgagactgatcctcataagtcgtctgagattaccaagaacctacttccagccacgctgcaactcattgacacctatgcatcgttcaccagagcctatttgctgcaaaactttaatgaagagggaacaactgagaaaccttccaaggagaaactgcaaggctttgctgctgttttggctattggctctagcaggtgcaaggcaaatactctgggtccgacactggttcagaatttgccatcgtcagtgcagactgtgtgtgagtcctggaacaacatcaataccaatgaatttcccaatattggatcctggcgcaatgcctttgccaatgacaccatcccttcagagagttatattagtgcagtgcaggctgcacacctggggactctctgtagccaaagtctgcccctggctgcttccctgaagcataccctcctctcactggtcaggttgactggagatcttattgtttggtcagatgagatgaacccaccacaggtaattcggacactgctacctcttcttttggaatcaagcactgagagtgttgccgagatcagtagcaactccctggaacgcatcttgggccctgctgagtctgatgagttcttggctcgtgtttatgagaagctgatcactggttgttacaacattctggccaatcatgcagatcctaacagtggactggatgaatccatcctggaggaatgtctccagtacttggaaaagcagctggaaagtagccaggctcgtaaagctatggaggagtttttctctgacagtggagaacttgtacagatcatgatggcaacagccaatgagaacctctctgctaaattctgtaaccgagttttgaaattcttcaccaaactcttccagctgactgagaagagccctaacccgagcctgttgcatctctgtggctccctggcacaactggcctgtgtggaacctgtgcgcctgcaggcctggctcacccgcatgactacatcgcccccaaaagattctgatcagctggatgtaattcaggagaaccggcagctgctgcagttactgaccacatacattgttcgggaaaacagccaagttggggaaggtgtgtgtgctgttcttctgggcaccctgactcccatggcaacagagatgctggccaacggtgatgggactggcttccctgaacttatggttgtgatggccactctggccagtgcaggtcaaggtgctggtcaccttcagcttcataatgctgctgtggattggctgagcagatgcaagaaatacctgtcacagaagaatgtagttgaaaaactgaatgccaatgtaatgcatggaaagcatgtgatgatcttggagtgcacatgccatatcatgtcttacttggctgatgtcacgaatgccctgagccagagtaatggtcaaggcccaagtcatctctcagtggatggggaagagcgggccattgaagtagactcagactgggtggaggagttggcggtggaagaggaagattcccaggctgaggattcagatgaagattctctttgcaataaactctgcacttttacgatcacacagaaagaattcatgaaccagcattggtaccactgtcacacctgtaaaatggtggatggcgtgggtgtctgcacagtgtgtgctaaggtgtgccacaaggatcatgagatttcctatgccaagtatggatccttcttctgtgactgtggagccaaggaagatggcagctgtttggctctggtgaagagaactcctagcagtggcatgagctctaccatgaaggagtcggcatttcagagtgaacccaggatttcagagagtctagtgcgtcatgccagcacctcctcgccagctgacaaagccaaggttaccatcagtgatggaaaggttgctgacgaagagaagcccaagaagagcagcctctgccgcacagtagagggctgccgggaggaattacagaaccaggccaatttctccttcgctcctctcgtgttagacatgcttaatttccttatggatgccattcagaccaacttccagcaagcttcagccgtcgggagcagcagccgtgctcagcaagccctcagtgagctacacactgtggagaaggcagtggagatgacagaccagctgatggttcccaccttagggtcccaggaaggtgcctttgagaatgtgcggatgaattacagtggagaccagggccagaccatccggcagctgatcagtgctcatgtgctcaggcgggtggctatgtgtgtgctctcctctccccatgggcgccgccaacatttggctgtcagccatgagaagggcaagatcaccgttctgcagctctctgcactcctgaagcaagcagattccagcaaaaggaagttaactctgacccgcttggcttctgccccagttccttttactgtgttgagcctcacaggaaatccctgcaaggaagactacttggcggtttgtgggctaaaggactgtcatgtgctcacctttagtagctcaggctctgtttcggatcacttggttttgcaccctcagttggcaacggggaacttcatcatcaaagccgtgtggttacctggttcacagaccgagttatcaattgtcaccgcagactttgttaagatttatgacctgtgtgttgatgccttgagtccaaccttctattttctcctgccaagctcaaagataagagatgttaccttccttttcaatgaggagggaaagaacatcattgttataatgtcttcggctgggtacatctatactcagcttatggaagaggccagcagtgcccagcagggacccttctatgtcactaatgtgttggaaatcaatcatgaggacctgaaggacagtaacagccaggtggcgggcggtggtgtgtccgtgtactactcccacgtgttgcagatgttgttcttcagctattgtcaaggcaaatcattcgcagccaccatcagcaggacaaccctggaggtgttgcaactcttccccatcaacatcaaaagttccaatggtggcagtaagacttctcctgctctttgccagtggtctgaggtgatgaaccaccctggcttggtgtgctgtgtccagcaaactacaggggtgccgctggtagttatggtgaaaccagacacttttcttatccaggagattaagactcttcctgctaaagcgaagatccaagacatggttgctattaggcacacggcctgcaatgagcagcagcggacaacaatgattctgctgtgtgaggatggcagcctgcgcatttacatggccaacgtggagaacacctcctactggctgcagccatccctgcagcccagcagtgtcatcagcatcatgaagcctgttcgaaagcgcaaaacagctacaatcacaacccgcacgtctagccaggtgactttccccattgacttttttgaacacaaccagcagctgacagatgtggagtttggtggtaacgacctcctacaggtctataatgcacaacagataaaacaccggctgaattccactggcatgtatgtggccaacaccaagcccggaggcttcaccattgagattagtaacaacaatagcactatggtgatgacaggcatgcggatccagattgggactcaagcaatagaacgggccccgtcatatatcgagatcttcggcagaactatgcagctcaacctgagtcgctcacgctggtttgacttccccttcaccagagaagaagccctgcaggctgataagaagctgaacctcttcattggggcctcggtggaaccagcaggtgtcaccatgatagatgctgtaaaaatttatggcaagactaaggagcagtttggctggcctgatgagcccccagaagaattcccttctgcctctgtcagcaacatctgcccttcaaatctgaaccagagcaacggcactggagatagcgactcagctgcccccactacgaccagtggaactgtcctggagaggctggttgtgagttctttagaagccctggaaagctgctttgccgttggcccaatcatcgagaaggagagaaacaagaatgctgctcaggagctggccactttgctgttgtccctgccagcacctgccagtgtccagcagcagtccaagagccttctggccagcctgcacaccagccgctcggcctaccacagccacaaggatcaggccttgctgagcaaagctgtgcagtgtctcaacacatctagcaaagagggcaaggatttggaccctgaggtgttccagaggctagtgatcacagctcgctccattgccatcatgcgccccaacaaccttgtccactttacggagtcaaagctgccccagatggaaacagaaggaatggatgaagggaaggaaccgcagaagcagttggaaggagattgctgtagtttcatcacccagcttgtgaaccacttctggaaactccatgcatccaaacccaagaatgccttcttggcacctgcctgccttccaggactaactcatattgaagctactgtcaatgctctggtggacatcatccatggctactgtacctgtgagctggattgtattaacacagcatccaagatctacatgcagatgctcttgtgtcctgatcctgctgtgagcttctcttgtaaacaagctctaattcgagtcctaaggcccaggaacaaacggagacatgtgactttaccctcttcccctcgaagcaacactccaatgggagacaaggatgatgatgacgatgatgatgcagatgagaaaatgcagtcatcagggatcccgaatggtggtcacatccgtcaggaaagccaggaacagagtgaggtggaccatggagattttgagatggtgtctgagtcgatggtcctggagacagctgaaaatgtcaacaatggcaacccctctcccctggaggccctgctggcaggcgcagagggcttcccccccatgctggacatcccacctgatgcagatgacgagaccatggttgaactagccattgccctgagcctgcagcaggaccaacaaggcagcagcagcagtgccctgggcctgcagagcctgggactgtccggccaggcacccagctcttcctctctggacgcaggaaccctctctgacaccacagcatcagctccagcctcagacgacgagggcagtacagcagcgacagatggttctacccttcggacctctcctgctgaccacggtggtagtgtgggctcggagagcgggggcagtgcagtggactcagtggctggcgagcacagtgtatctggccggagcagtgcttatggcgatgctacagctgaggggcatccggctggaccaggaagtgtcagctcaagcactggagccatcagcaccaccactgggcaccaggagggagatggctccgagggagaaggagaaggagaaactgaaggagatgtccacactagcaacaggctgcacatggtccgtctaatgctgttggagagattactgcagaccctgcctcaattacgaaacgttggcggtgtccgggccatcccatacatgcaggtcattctaatgctcactacagatctggatggagaagatgagaaagacaagggggccctagacaacctgctctcccagcttattgctgagttgggtatggataaaaaggatgtctccaagaagaatgagcgcagcgccctgaatgaagtccatctggtagtaatgagactcctgagtgtcttcatgtcccgcaccaaatctggatccaagtcttccatatgtgagtcatcttccctcatctccagtgccacagcagcagctctactgagctctggggctgtggactactgcctgcacgtgctcaaatcactgctggaatattggaagagccaacagaatgacgaggagcctgtggctaccagccagttgctgaaaccacatactacctcctccccacctgacatgagcccattctttctccgccagtatgtgaagggtcatgctgctgatgtgtttgaggcctatactcagcttctaacagaaatggtactgaggcttccttaccaaatcaaaaagattactgacaccaattctcgaatcccacctcctgtctttgaccactcgtggttttactttctctccgagtacctcatgatccagcagactccatttgtgcgccgtcaagtccgcaaacttctgctcttcatctgtggatccaaagagaagtaccgccagctccgggatttgcacaccctggactctcacgtgcgtgggatcaagaagctgctagaagagcaggggatattcctccgggcaagtgtggttacagccagctcaggctccgccttgcaatatgacacactcatcagcctgatggagcacctgaaagcctgtgcagagattgccgcccagcgaaccatcaactggcagaaattctgcatcaaagatgactccgtcctgtacttcctcctccaagtcagtttccttgtggatgagggcgtgtccccagtgctgctgcaactgctctcctgtgctctgtgcggcagcaaggtgctcgctgcactggcagcctcttcgggatcctccagtgcttcttcctcctcagcccctgtggctgccagttctggacaagccacaacacagtccaagtcttccactaaaaagagcaagaaagaagaaaaagaaaaggagaaagatggtgagacctctggcagccaggaggaccagctgtgcacagctctggtgaaccagctgaacaaatttgccgataaggaaaccctgatccagttcctgcgttgtttcctgttagagtccaattcttcctcggtgcgctggcaggcccactgtctgacactgcacatctacagaaattccagcaaatctcaacaggagctcctgctagatctgatgtggtccatctggccagaactcccagcctatggtcgtaaggctgcccagtttgtggacctactaggatatttctccctgaaaactccacaaacagagaagaagttgaaggagtattcacagaaggctgtggagattctgcggactcaaaaccatattcttaccaaccaccccaactcgaacatttataacactttgtctggcttagtggagtttgatggctattacctggagagcgatccctgcctggtgtgtaataacccggaagtaccgttctgttatatcaagctgtcttccattaaagtggacacgcggtacaccaccacccagcaggttgtgaagctcattggcagtcacaccatcagcaaagtgacagtgaaaatcggggatctgaaacggaccaagatggtgcggaccatcaacctgtattataacaaccgaaccgtgcaggccatcgtggagttgaaaaacaagccagctcgctggcacaaagccaagaaggttcagctgacccctggacagacagaggtgaagattgacctgccgttgcccattgtggcctccaatctgatgattgagtttgcagacttctatgaaaactaccaggcctccacagagaccctgcagtgccctcgctgtagtgcctcggtccctgccaacccaggagtctgtggcaactgtggagagaatgtgtaccagtgtcacaaatgcagatccatcaactacgatgaaaaggatcccttcctctgcaatgcctgtggcttctgtaaatatgcccgcttcgacttcatgctctatgccaagccttgctgtgcagtggatcccattgagaatgaagaagaccggaagaaggctgtatccaacatcaatacacttttggacaaagctgatcgagtgtatcatcagctgatgggacaccggccacagctggagaacctgctctgcaaagtgaatgaggcagctccagaaaagccacaggatgactcaggaacagcagggggcatcagctccacttctgccagtgtgaatcgttacatcctgcagttggctcaggagtattgtggagactgcaagaactcttttgatgaactctccaaaatcatccagaaagtctttgcttcgcgcaaagagttgttggaatatgacctacagcagagggaagcagccactaaatcatcccggacctccgtgcagcccacattcactgccagccagtaccgtgccttatccgtcctgggctgtggccacacatcctccaccaagtgctatggctgcgcctcggctgtcacagaacattgtatcacactacttcgggccctggccaccaacccagccttgaggcacatccttgtctcccagggccttatccgggagctctttgattataatcttcgccgaggggctgcggccatgcgggaggaggtccgccagctcatgtgcctcctaactcgagacaacccagaagccacccaacagatgaatgacctgattattggcaaggtctccacagccctgaagagccactgggccaaccccgatctggcaagtagcctgcagtatgaaatgctgctgctgacggattctatctccaaggaggacagctgctgggagctccggttacgctgtgctctcagccttttcctcatggctgtgaacattaagactcctgtggtggttgaaaacattaccctcatgtgcctgaggatcttgcagaagctgataaaaccacctgctcccactagcaagaagaacaaggatgtccccgtcgaggccctcaccacggtgaagccatactgcaatgagatccatgcccaggctcaactgtggctcaagagagaccccaaggcatcctatgatgcctggaagaagtgtcttcctatcagagggatagatggcaatgggaaagcccccagcaaatcagagctccgccatctctatttgactgagaagtatgtgtggaggtggaaacagttcctgagtcgtcgggggaagaggacctcccccttggatctcaaactggggcataacaactggctgcgacaagtgcttttcactccagcaacgcaggccgcacggcaggcagcctgtaccattgtggaagctctagccaccattcccagccgcaagcagcaggtcctggacctgcttaccagttacctggatgagctgagcatagctggggagtgtgcagctgagtacctggctctctaccagaagctcatcacttctgcgcactggaaagtctacttggcagctcggggagtcctaccctatgtgggcaacctcatcaccaaggaaatagctcgtctgctggccctggaggaggctaccctgagtaccgatctgcagcagggttatgcccttaaaagtctcacaggccttctctcctcctttgttgaggtggaatccatcaaaagacattttaaaagtcgcttggtgggtactgtgctgaatggatacctgtgcttgcggaagctggtggtgcagaggaccaagctgatcgatgagacgcaggacatgctgctggagatgctggaggacatgaccacaggtacagaatcagaaaccaaggccttcatggctgtgtgcattgagacagccaagcgctacaatctggatgactaccggaccccggtgttcatcttcgagaggctctgcagcatcatttatcctgaggagaatgaagtcactgagttctttgtgaccctggagaaggatccccaacaagaagacttcttacagggcaggatgcctgggaacccgtatagcagcaatgagccaggcatcgggccgctgatgagggatataaagaacaagatttgccaggactgtgacttagtggccctcctggaagatgacagtggcatggagcttctagtgaacaataaaatcattagtttggaccttcctgtggctgaagtttacaagaaagtctggtgtaccacgaatgagggagagcccatgaggattgtttatcgtatgcgggggctgctgggcgatgccacagaggagttcattgagtccctggactctactacagatgaagaagaagatgaagaagaagtgtataaaatggctggtgtgatggcccagtgtgggggcctggaatgcatgcttaacagactcgcagggatcagagatttcaagcagggacgccaccttctaacagtgctactgaaattgttcagttactgcgtgaaggtgaaagtcaaccggcagcaactggtcaaactggaaatgaacaccttgaacgtcatgctggggaccctaaacctggcccttgtagctgaacaagaaagcaaggacagtgggggtgcagctgtggctgagcaggtgcttagcatcatggagatcattctagatgagtccaatgctgagcccctgagtgaggacaagggcaacctcctcctgacaggtgacaaggatcaactggtgatgctcttggaccagatcaacagcacctttgttcgctccaaccccagtgtgctccagggcctgcttcgcatcatcccgtacctttcctttggagaggtggagaaaatgcagatcttggtggagcgattcaaaccatactgcaactttgataaatatgatgaagatcacagtggtgatgataaagtcttcctggactgcttctgtaaaatagctgctggcatcaagaacaacagcaatgggcaccagctgaaggatctgattctccagaaggggatcacccagaatgcacttgactacatgaaaaagcacatccctagcgccaagaatttggatgccgacatctggaaaaagtttttgtctcgcccagccttgccatttatcctaaggctgcttcggggcctggccatccagcaccctggcacccaggttctgattggaactgattccatcccgaacctgcataagctggagcaggtgtccagtgatgagggcattgggaccttggcagagaacctgctggaagccctgcgggaacaccctgacgtaaacaagaagattgacgcagcccgcagggagacccgggcagagaagaaacgcatggccatggcaatgaggcagaaggccctgggcaccctgggcatgacgacaaatgaaaagggccaggtcgtgaccaagacagcactcctgaagcagatggaagagctgatcgaggagcctggcctcacgtgctgcatctgcagggagggatacaagttccagcccacaaaggtcctgggcatttataccttcacgaagcgggtagccttggaggagatggagaataagccccggaaacagcagggctacagcaccgtgtcccacttcaacattgtgcactacgactgccatctggctgccgtcaggttggctcgaggccgggaagagtgggagagtgccgccctgcagaatgccaacaccaagtgcaacgggctccttccggtctggggacctcatgtccctgaatcagcttttgccacttgcttggcaagacacaacacttacctccaggaatgtacaggccagcgggagcccacgtatcagctcaacatccatgacatcaaactgctcttcctgcgcttcgccatggagcagtcgttcagcgcagacactggcgggggcggccgggagagcaacatccacctgatcccgtacatcattcacactgtgctttacgtcctgaacacaacccgagcaacttcccgagaagagaagaacctccaaggctttctggaacagcccaaggagaagtgggtggagagtgcctttgaagtggacgggccctactatttcacagtcttggcccttcacatcctgccccctgagcagtggagagccacacgtgtggaaatcttgcggaggctgttggtgacctcgcaggctcgggcagtggctccaggtggagccaccaggctgacagataaggcagtgaaggactattccgcttaccgttcttcccttctcttttgggccctcgtcgatctcatttacaacatgtttaagaaggtgcctaccagtaacacagagggaggctggtcctgctctctcgctgagtacatccgccacaacgacatgcccatctacgaagctgccgacaaagccctgaaaaccttccaggaggagttcatgccagtggagaccttctcagagttcctcgatgtggccggtcttttatcagaaatcaccgatccagagagcttcctgaaggacctgttgaactcagtcccctga

SEQ ID NO: 719 - protein, 5183 aa, Homo sapiens
MATSGGEEAAAAAPAPGTPATGADTTPGWEVAVRPLLSASYSAFEMKELPQLVASVIESESEILHHEKQYEPFYSSFVALSTHYITTVCSLIPRNQLQSVAAACKVLIEFSLLRLENPDEACAVSQKHLILLIKGLCTGCSRLDRTEIITFTAMMKSAKLPQTVKTLSDVEDQKELASPVSPELRQKEVQMNFLNQLTSVFNPRTVASQPISTQTLVEGENDEQSSTDQASAIKTKNVFIAQNVASLQELGGSEKLLRVCLNLPYFLRYINRFQDAVLANSFFIMPATVADATAVRNGFHSLVIDVTMALDTLSLPVLEPLNPSRLQDVTVLSLSCLYAGVSVATCMAILHVGSAQQVRTGSTSSKEDDYESDAATIVQKCLEIYDMIGQAISSSRRAGGEHYQNFQLLGAWCLLNSLFLILNLSPTALADKGKEKDPLAALRVRDILSRTKEGVGSPKLGPGKGHQGFGVLSVILANHAIKLLTSLFQDLQVEALHKGWETDGPPAALSIMAQSTSIQRIQRLIDSVPLMNLLLTLLSTSYRKACVLQRQRKGSMSSDASASTDSNTYYEDDFSSTEEDSSQDDDSEPILGQWFEETISPSKEKAAPPPPPPPPPLESSPRVKSPSKQAPGEKGNILASRKDPELFLGLASNILNFITSSMLNSRNNFIRNYLSVSLSEHHMATLASIIKEVDKDGLKGSSDEEFAAALYHFNHSLVTSDLQSPNLQNTLLQQLGVAPFSEGPWPLYIHPQSLSVLSRLLLIWQHKASAQGDPDVPECLKVWDRFLSTMKQNALQGVVPSETEDLNVEHLQMLLLIFHNFTETGRRAILSLFVQIIQELSVNMDAQMRFVPLILARLLLIFDYLLHQYSKAPVYLFEQVQHNLLSPPFGWASGSQDSNSRRATTPLYHGFKEVEENWSKHFSSDAVPHPRFYCVLSPEASEDDLNRLDSVACDVLFSKLVKYDELYAALTALLAAGSQLDTVRRKENKNVTALEACALQYYFLILWRILGILPPSKTYINQLSMNSPEMSECDILHTLRWSSRLRISSYVNWIKDHLIKQGMKAEHASSLLELASTTKCSSVKYDVEIVEEYFARQISSFCSIDCTTILQLHEIPSLQSIYTLDAAISKVQVSLDEHFSKMAAETDPHKSSEITKNLLPATLQLIDTYASFTRAYLLQNFNEEGTTEKPSKEKLQGFAAVLAIGSSRCKANTLGPTLVQNLPSSVQTVCESWNNINTNEFPNIGSWRNAFANDTIPSESYISAVQAAHLGTLCSQSLPLAASLKHTLLSLVRLTGDLIVWSDEMNPPQVIRTLLPLLLESSTESVAEISSNSLERILGPAESDEFLARVYEKLITGCYNILANHADPNSGLDESILEECLQYLEKQLESSQARKAMEEFFSDSGELVQIMMATANENLSAKFCNRVLKFFTKLFQLTEKSPNPSLLHLCGSLAQLACVEPVRLQAWLTRMTTSPPKDSDQLDVIQENRQLLQLLTTYIVRENSQVGEGVCAVLLGTLTPMATEMLANGDGTGFPELMVVMATLASAGQGAGHLQLHNAAVDWLSRCKKYLSQKNVVEKLNANVMHGKHVMILECTCHIMSYLADVTNALSQSNGQGPSHLSVDGEERAIEVDSDWVEELAVEEEDSQAEDSDEDSLCNKLCTFTITQKEFMNQHWYHCHTCKMVDGVGVCTVCAKVCHKDHEISYAKYGSFFCDCGAKEDGSCLALVKRTPSSGMSSTMKESAFQSEPRISESLVRHASTSSPADKAKVTISDGKVADEEKPKKSSLCRTVEGCREELQNQANFSFAPLVLDMLNFLMDAIQTNFQQASAVGSSSRAQQALSELHTVEKAVEMTDQLMVPTLGSQEGAFENVRMNYSGDQGQTIRQLISAHVLRRVAMCVLSSPHGRRQHLAVSHEKGKITVLQLSALLKQADSSKRKLTLTRLASAPVPFTVLSLTGNPCKEDYLAVCGLKDCHVLTFSSSGSVSDHLVLHPQLATGNFIIKAVWLPGSQTELSIVTADFVKIYDLCVDALSPTFYFLLPSSKIRDVTFLFNEEGKNIIVIMSSAGYIYTQLMEEASSAQQGPFYVTNVLEINHEDLKDSNSQVAGGGVSVYYSHVLQMLFFSYCQGKSFAATISRTTLEVLQLFPINIKSSNGGSKTSPALCQWSEVMNHPGLVCCVQQTTGVPLVVMVKPDTFLIQEIKTLPAKAKIQDMVAIRHTACNEQQRTTMILLCEDGSLRIYMANVENTSYWLQPSLQPSSVISIMKPVRKRKTATITTRTSSQVTFPIDFFEHNQQLTDVEFGGNDLLQVYNAQQIKHRLNSTGMYVANTKPGGFTIEISNNNSTMVMTGMRIQIGTQAIERAPSYIEIFGRTMQLNLSRSRWFDFPFTREEALQADKKLNLFIGASVEPAGVTMIDAVKIYGKTKEQFGWPDEPPEEFPSASVSNICPSNLNQSNGTGDSDSAAPTTTSGTVLERLVVSSLEALESCFAVGPIIEKERNKNAAQELATLLLSLPAPASVQQQSKSLLASLHTSRSAYHSHKDQALLSKAVQCLNTSSKEGKDLDPEVFQRLVITARSIAIMRPNNLVHFTESKLPQMETEGMDEGKEPQKQLEGDCCSFITQLVNHFWKLHASKPKNAFLAPACLPGLTHIEATVNALVDIIHGYCTCELDCINTASKIYMQMLLCPDPAVSFSCKQALIRVLRPRNKRRHVTLPSSPRSNTPMGDKDDDDDDDADEKMQSSGIPNGGHIRQESQEQSEVDHGDFEMVSESMVLETAENVNNGNPSPLEALLAGAEGFPPMLDIPPDADDETMVELAIALSLQQDQQGSSSSALGLQSLGLSGQAPSSSSLDAGTLSDTTASAPASDDEGSTAATDGSTLRTSPADHGGSVGSESGGSAVDSVAGEHSVSGRSSAYGDATAEGHPAGPGSVSSSTGAISTTTGHQEGDGSEGEGEGETEGDVHTSNRLHMVRLMLLERLLQTLPQLRNVGGVRAIPYMQVILMLTTDLDGEDEKDKGALDNLLSQLIAELGMDKKDVSKKNERSALNEVHLVVMRLLSVFMSRTKSGSKSSICESSSLISSATAAALLSSGAVDYCLHVLKSLLEYWKSQQNDEEPVATSQLLKPHTTSSPPDMSPFFLRQYVKGHAADVFEAYTQLLTEMVLRLPYQIKKITDTNSRIPPPVFDHSWFYFLSEYLMIQQTPFVRRQVRKLLLFICGSKEKYRQLRDLHTLDSHVRGIKKLLEEQGIFLRASVVTASSGSALQYDTLISLMEHLKACAEIAAQRTINWQKFCIKDDSVLYFLLQVSFLVDEGVSPVLLQLLSCALCGSKVLAALAASSGSSSASSSSAPVAASSGQATTQSKSSTKKSKKEEKEKEKDGETSGSQEDQLCTALVNQLNKFADKETLIQFLRCFLLESNSSSVRWQAHCLTLHIYRNSSKSQQELLLDLMWSIWPELPAYGRKAAQFVDLLGYFSLKTPQTEKKLKEYSQKAVEILRTQNHILTNHPNSNIYNTLSGLVEFDGYYLESDPCLVCNNPEVPFCYIKLSSIKVDTRYTTTQQVVKLIGSHTISKVTVKIGDLKRTKMVRTINLYYNNRTVQAIVELKNKPARWHKAKKVQLTPGQTEVKIDLPLPIVASNLMIEFADFYENYQASTETLQCPRCSASVPANPGVCGNCGENVYQCHKCRSINYDEKDPFLCNACGFCKYARFDFMLYAKPCCAVDPIENEEDRKKAVSNINTLLDKADRVYHQLMGHRPQLENLLCKVNEAAPEKPQDDSGTAGGISSTSASVNRYILQLAQEYCGDCKNSFDELSKIIQKVFASRKELLEYDLQQREAATKSSRTSVQPTFTASQYRALSVLGCGHTSSTKCYGCASAVTEHCITLLRALATNPALRHILVSQGLIRELFDYNLRRGAAAMREEVRQLMCLLTRDNPEATQQMNDLIIGKVSTALKSHWANPDLASSLQYEMLLLTDSISKEDSCWELRLRCALSLFLMAVNIKTPVVVENITLMCLRILQKLIKPPAPTSKKNKDVPVEALTTVKPYCNEIHAQAQLWLKRDPKASYDAWKKCLPIRGIDGNGKAPSKSELRHLYLTEKYVWRWKQFLSRRGKRTSPLDLKLGHNNWLRQVLFTPATQAARQAACTIVEALATIPSRKQQVLDLLTSYLDELSIAGECAAEYLALYQKLITSAHWKVYLAARGVLPYVGNLITKEIARLLALEEATLSTDLQQGYALKSLTGLLSSFVEVESIKRHFKSRLVGTVLNGYLCLRKLVVQRTKLIDETQDMLLEMLEDMTTGTESETKAFMAVCIETAKRYNLDDYRTPVFIFERLCSIIYPEENEVTEFFVTLEKDPQQEDFLQGRMPGNPYSSNEPGIGPLMRDIKNKICQDCDLVALLEDDSGMELLVNNKIISLDLPVAEVYKKVWCTTNEGEPMRIVYRMRGLLGDATEEFIESLDSTTDEEEDEEEVYKMAGVMAQCGGLECMLNRLAGIRDFKQGRHLLTVLLKLFSYCVKVKVNRQQLVKLEMNTLNVMLGTLNLALVAEQESKDSGGAAVAEQVLSIMEIILDESNAEPLSEDKGNLLLTGDKDQLVMLLDQINSTFVRSNPSVLQGLLRIIPYLSFGEVEKMQILVERFKPYCNFDKYDEDHSGDDKVFLDCFCKIAAGIKNNSNGHQLKDLILQKGITQNALDYMKKHIPSAKNLDADIWKKFLSRPALPFILRLLRGLAIQHPGTQVLIGTDSIPNLHKLEQVSSDEGIGTLAENLLEALREHPDVNKKIDAARRETRAEKKRMAMAMRQKALGTLGMTTNEKGQVVTKTALLKQMEELIEEPGLTCCICREGYKFQPTKVLGIYTFTKRVALEEMENKPRKQQGYSTVSHFNIVHYDCHLAAVRLARGREEWESAALQNANTKCNGLLPVWGPHVPESAFATCLARHNTYLQECTGQREPTYQLNIHDIKLLFLRFAMEQSFSADTGGGGRESNIHLIPYIIHTVLYVLNTTRATSREEKNLQGFLEQPKEKWVESAFEVDGPYYFTVLALHILPPEQWRATRVEILRRLLVTSQARAVAPGGATRLTDKAVKDYSAYRSSLLFWALVDLIYNMFKKVPTSNTEGGWSCSLAEYIRHNDMPIYEAADKALKTFQEEFMPVETFSEFLDVAGLLSEITDPESFLKDLLNSVP

SEQ ID NO: 720 - DNA, 613 bp, Homo sapiens
tttttttttttgaggagagctttgctactttattacaaagagaagaagcctttatgtggtcagaaaatacaagattgatctttttttctcttcctatgaaacgctgctgttcaaacagccagagtgaattgtctcagttcacttcttttaagtcccatcacattcacttgggtatggatgtccttggctgctgaaaatctggcccttttagtgcacagggcgacaaagtcccctgaccagcagttccagaatgtcccattttcatatattgcatccatgcacacctcctaaaaatgaggtacagcagggcaaacattttccaaaatagatgtcatatatataatatatacacattcgtacatacatacctttattcatgtgatgtccaaaaatttaaaaaaaatgtacacatttattacaaaatcgtaacaaagactggacagtgttttgctcattctggaaagatgaagctcagtaataacacaaccctggaaaaccatccagagattgtggcaatatctttcttctaaacagtcagatattcttgcattaagcttggcgaaactgcctttcaaaaacagaaggggaagtaaaatgaaggaagcagacctct

SEQ ID NO: 721 - DNA, 1324 bp, Homo sapiens
ctggtgaggggctgcaggtggcggcgcagtctcggtaggcggtatgagtttggctgggggccgggcaccccggaagaccgctgggaaccggctttctgggcttttggaggcagaggaggaagatgagttctaccagacgacttatgggggtttcacagaggaatccggagatgatgagtatcaaggggaccagtcagacacagaggacgaagtggactctgactttgacattgatgaaggggatgaaccatccagtgatggagaagcagaagagccaagaaggaagcgccgagtagtcaccaaggcctataaggaacctctcaagagcttaaggcctcgaaaggtcaacaccccggctggtagctctcagaaggcgcgagaagagaaggcactactgccattagaactacaagatgacggctctgacagtcggaagtctatgcgtcagtctacagctgagcatacacgacaaacgttccttcgggtacaggagaggcagggccagtcaagacggcgaaaggggccccactgtgagcggccactaacccaggaggaactgctccgggaggccaagatcacagaagagcttaatttacggtcactggagacatatgagcggctcgaggctgataaaaagaagcaggttcataagaagcggaagtgccccgggcccataatcacctatcattcagtgacagtgccacttgttggggagccaggccccaaggaagagaacgttgacatagaaggacttgatcctgctccctcggtgtctgcattgactcctcatgctgggactggacccgtcaacccccctgctcgctgctcacgtaccttcatcacttttagtgatgatgcaactttcgaggaatggttcccccaagggcggcccccaaaagtccctgttcgtgaggtctgtccagtgacccatcgtccagccctataccgggaccctgttacagacataccctatgccactgctcgagccttcaagatcattcgtgaggcttacaagaagtacattactgcccatggactgccgcccactgcctcagccctgggccccggcccgccacctcctgagcccctccctggctctgggccccgagccttgcgccagaaaattgtcattaaatgaagagatgtctagtcctcagaaacttctttcctgccctgattggggctcttgctgttccgtttcttctccctgcttctcccctttgtcatctctgatctttgcctaatctgtttctttttccttttcccctagttcttacaggtttcgttgtgttttttaatctaataaaatagaaagatccctttt

SEQ ID NO: 722 - protein, 364 aa, Homo sapiens
MSLAGGRAPRKTAGNRLSGLLEAEEEDEFYQTTYGGFTEESGDDEYQGDQSDTEDEVDSDFDIDEGDEPSSDGEAEEPRRKRRVVTKAYKEPLKSLRPRKVNTPAGSSQKAREEKALLPLELQDDGSDSRKSMRQSTAEHTRQTFLRVQERQGQSRRRKGPHCERPLTQEELLREAKITEELNLRSLETYERLEADKKKQVHKKRKCPGPIITYHSVTVPLVGEPGPKEENVDIEGLDPAPSVSALTPHAGTGPVNPPARCSRTFITFSDDATFEEWFPQGRPPKVPVREVCPVTHRPALYRDPVTDIPYATARAFKIIREAYKKYITAHGLPPTASALGPGPPPPEPLPGSGPRALRQKIVIK

SEQ ID NO: 723 - DNA, 1655 bp, Homo sapiens
ctccgaggccgtgagcgcaaagcctcaggccccggctccctcctgagctgcgccgtgccaggccgcccgccgggatgcagtgggccgtgggccggcggtgggcgtgggccgcgctgctcctggctgtcgcagcggtgctgacccaggtcgtctggctctggctgggtacgcagagcttcgtcttccagcgcgaagagatagcgcagttggcgcggcagtacgctgggctggaccacgagctggccttctctcgtctgatcgtggagctgcggcggctgcacccaggccacgtgctgcccgacgaggagctgcagtgggtgttcgtgaatgcgggtggctggatgggcgccatgtgccttctgcacgcctcgctgtccgagtatgtgctgctcttcggcaccgccttgggctcccgcggccactcggggcgctactgggctgagatctcggataccatcatctctggcaccttccaccagtggagagagggcaccaccaaaagtgaggtcttctacccaggggagacggtagtacacgggcctggtgaggcaacagctgtggagtgggggccaaacacatggatggtggagtacggccggggcgtcatcccatccaccctggccttcgcgctggccgacactgtcttcagcacccaggacttcctcaccctcttctatactcttcgctcctatgctcggggcctccggcttgagctcaccacctacctctttggccaggacccttgaccagccaggcctgaaggaagacctgcggatggacaggagcgggcaggcccgcacatatccacttgctggagcccatgtttacagacagggacatacaccatgcagatcctgagttcctgctgtatgagcagggatatccatgcttatgtatccaaacacagagacccatgggaacaaatgagacacatatagatactgagacctgtgtgtacagtaggaccatgcactcacacccatctggagagggagcccccggtataccaagggagccagttgtgttcagacacacacatcacagcttgactcactaactgaggcctttccatagctccacagcttcccacctcctccccaccaaaccggggttctagagttaaggatgggggagggtattatactgcctcagtctgactcctcaacccagcagcaatttgaggggatgagggggaagaggagctgccttttggaggcccccttcacctgcagctatgatgcccttccccttctcccctgtcctcaccatatgccttatccccattctactcccctgctatgcaagtgcccctgtggcttgtccccaaccccctcagcaacaaagctcagctggggaacgagagtaatttgaagaatgcttgaagtcagcgtcttccattccagaaagacccccattcttcctttgggggtatgatgtggaagctggtttcagcccaggacccaccactgaggagaggatctagacaggtgggcctaattccaaggggcccttcctggcctggagaaggccttttacacacacacaacacatacacacacacacacacacacacatatcacagttttcacacagcccctgctgcattctctgtccatctgtctgtttctattaataaagatttgttgatctgttcc

SEQ ID NO: 724 - protein, 223 aa, Homo sapiens
MQWAVGRRWAWAALLLAVAAVLTQVVWLWLGTQSFVFQREEIAQLARQYAGLDHELAFSRLIVELRRLHPGHVLPDEELQWVFVNAGGWMGAMCLLHASLSEYVLLFGTALGSRGHSGRYWAEISDTIISGTFHQWREGTTKSEVFYPGETVVHGPGEATAVEWGPNTWMVEYGRGVIPSTLAFALADTVFSTQDFLTLFYTLRSYARGLRLELTTYLFGQDP

SEQ ID NO: 725 - DNA, 1580 bp, Homo sapiens
ctccgaggccgtgagcgcaaagcctcaggccccggctccctcctgagctgcgccgtgccaggccgcccgccgggatgcagtgggccgtgggccggcggtgggcgtgggccgcgctgctcctggctgtcgcagcggtgctgacccaggtcgtctggctctggctgggtacgcagagcttcgtcttccagcgcgaagagatagcgcagttggcgcggcagtacgctgggctggaccacgagctggccttctctcgtctgatcgtggagctgcggcggctgcacccaggccacgtgctgcccgacgaggagctgcagtgggtgttcgtgaatgcgggtggctggatgggcgccatgtgccttctgcacgcctcgctgtccgagtatgtgctgctcttcggcaccgccttgggctcccgcggccactcgggggagacggtagtacacgggcctggtgaggcaacagctgtggagtgggggccaaacacatggatggtggagtacggccggggcgtcatcccatccaccctggccttcgcgctggccgacactgtcttcagcacccaggacttcctcaccctcttctatactcttcgctcctatgctcggggcctccggcttgagctcaccacctacctctttggccaggacccttgaccagccaggcctgaaggaagacctgcggatggacaggagcgggcaggcccgcacatatccacttgctggagcccatgtttacagacagggacatacaccatgcagatcctgagttcctgctgtatgagcagggatatccatgcttatgtatccaaacacagagacccatgggaacaaatgagacacatatagatactgagacctgtgtgtacagtaggaccatgcactcacacccatctggagagggagcccccggtataccaagggagccagttgtgttcagacacacacatcacagcttgactcactaactgaggcctttccatagctccacagcttcccacctcctccccaccaaaccggggttctagagttaaggatgggggagggtattatactgcctcagtctgactcctcaacccagcagcaatttgaggggatgagggggaagaggagctgccttttggaggcccccttcacctgcagctatgatgcccttccccttctcccctgtcctcaccatatgccttatccccattctactcccctgctatgcaagtgcccctgtggcttgtccccaaccccctcagcaacaaagctcagctggggaacgagagtaatttgaagaatgcttgaagtcagcgtcttccattccagaaagacccccattcttcctttgggggtatgatgtggaagctggtttcagcccaggacccaccactgaggagaggatctagacaggtgggcctaattccaaggggcccttcctggcctggagaaggccttttacacacacacaacacatacacacacacacacacacacacatatcacagttttcacacagcccctgctgcattctctgtccatctgtctgtttctattaataaagatttgttgatctgttccaaaaaaaaaaaaaaaaaa

SEQ ID NO: 726 - protein, 192 aa, Homo sapiens
MQWAVGRRWAWAALLLAVAAVLTQVVWLWLGTQSFVFQREEIAQLARQYAGLDHELAFSRLIVELRRLHPGHVLPDEELQWVFVNAGGWMGAMCLLHASLSEYVLLFGTALGSRGHSGETVVHGPGEATAVEWGPNTWMVEYGRGVIPSTLAFALADTVFSTQDFLTLFYTLRSYARGLRLELTTYLFGQDP

SEQ ID NO: 727 - DNA, 1547 bp, Homo sapiens
ctccgaggccgtgagcgcaaagcctcaggccccggctccctcctgagctgcgccgtgccaggccgcccgccgggatgcagtgggccgtgggccggcggtgggcgtgggccgcgctgctcctggctgtcgcagcggtgctgacccaggtcgtctggctctggctggaccacgagctggccttctctcgtctgatcgaggagctgcagtgggtgttcgtgaatgcgggtggctggatgggcgccatgtgccttctgcacgcctcgctgtccgagtatgtgctgctcttcggcaccgccttgggctcccgcggccactcggggcgctactgggctgagatctcggataccatcatctctggcaccttccaccagtggagagagggcaccaccaaaagtgaggtcttctacccaggggagacggtagtacacgggcctggtgaggcaacagctgtggagtgggggccaaacacatggatggtggagtacggccggggcgtcatcccatccaccctggccttcgcgctggccgacactgtcttcagcacccaggacttcctcaccctcttctatactcttcgctcctatgctcggggcctccggcttgagctcaccacctacctctttggccaggacccttgaccagccaggcctgaaggaagacctgcggatggacaggagcgggcaggcccgcacatatccacttgctggagcccatgtttacagacagggacatacaccatgcagatcctgagttcctgctgtatgagcagggatatccatgcttatgtatccaaacacagagacccatgggaacaaatgagacacatatagatactgagacctgtgtgtacagtaggaccatgcactcacacccatctggagagggagcccccggtataccaagggagccagttgtgttcagacacacacatcacagcttgactcactaactgaggcctttccatagctccacagcttcccacctcctccccaccaaaccggggttctagagttaaggatgggggagggtattatactgcctcagtctgactcctcaacccagcagcaatttgaggggatgagggggaagaggagctgccttttggaggcccccttcacctgcagctatgatgcccttccccttctcccctgtcctcaccatatgccttatccccattctactcccctgctatgcaagtgcccctgtggcttgtccccaaccccctcagcaacaaagctcagctggggaacgagagtaatttgaagaatgcttgaagtcagcgtcttccattccagaaagacccccattcttcctttgggggtatgatgtggaagctggtttcagcccaggacccaccactgaggagaggatctagacaggtgggcctaattccaaggggcccttcctggcctggagaaggccttttacacacacacaacacatacacacacacacacacacacacatatcacagttttcacacagcccctgctgcattctctgtccatctgtctgtttctattaataaagatttgttgatctgttcc

SEQ ID NO: 728 - protein, 187 aa, Homo sapiens
MQWAVGRRWAWAALLLAVAAVLTQVVWLWLDHELAFSRLIEELQWVFVNAGGWMGAMCLLHASLSEYVLLFGTALGSRGHSGRYWAEISDTIISGTFHQWREGTTKSEVFYPGETVVHGPGEATAVEWGPNTWMVEYGRGVIPSTLAFALADTVFSTQDFLTLFYTLRSYARGLRLELTTYLFGQDP

SEQ ID NO: 729 - DNA, 1626 bp, Homo sapiens
ctccgaggccgtgagcgcaaagcctcaggccccggctccctcctgagctgcgccgtgccaggccgcccgccgggatgcagtgggccgtgggccggcggtgggcgtgggccgcgctgctcctggctgtcgcagcggtgctgacccaggtcgtctggctctggctgggtacgcagagcttcgtcttccagcgcgaagagatagcgcagttggcgcggcagtacgctgggctggaccacgagctggccttctctcgtctgatcgtggagctgcggcggctgcacccaggccacgtgctgcccgacgaggagctgcagtgggtgttcgtgaatgcgggtggctggatgggcgccatgtgccttctgcacgcctcgctgtccgaggcgctactgggctgagatctcggataccatcatctctggcaccttccaccagtggagagagggcaccaccaaaagtgaggtcttctacccaggggagacggtagtacacgggcctggtgaggcaacagctgtggagtgggggccaaacacatggatggtggagtacggccggggcgtcatcccatccaccctggccttcgcgctggccgacactgtcttcagcacccaggacttcctcaccctcttctatactcttcgctcctatgctcggggcctccggcttgagctcaccacctacctctttggccaggacccttgaccagccaggcctgaaggaagacctgcggatggacaggagcgggcaggcccgcacatatccacttgctggagcccatgtttacagacagggacatacaccatgcagatcctgagttcctgctgtatgagcagggatatccatgcttatgtatccaaacacagagacccatgggaacaaatgagacacatatagatactgagacctgtgtgtacagtaggaccatgcactcacacccatctggagagggagcccccggtataccaagggagccagttgtgttcagacacacacatcacagcttgactcactaactgaggcctttccatagctccacagcttcccacctcctccccaccaaaccggggttctagagttaaggatgggggagggtattatactgcctcagtctgactcctcaacccagcagcaatttgaggggatgagggggaagaggagctgccttttggaggcccccttcacctgcagctatgatgcccttccccttctcccctgtcctcaccatatgccttatccccattctactcccctgctatgcaagtgcccctgtggcttgtccccaaccccctcagcaacaaagctcagctggggaacgagagtaatttgaagaatgcttgaagtcagcgtcttccattccagaaagacccccattcttcctttgggggtatgatgtggaagctggtttcagcccaggacccaccactgaggagaggatctagacaggtgggcctaattccaaggggcccttcctggcctggagaaggccttttacacacacacaacacatacacacacacacacacacacacatatcacagttttcacacagcccctgctgcattctctgtccatctgtctgtttctattaataaagatttgttgatctgttccaaaaaaaaaaaaaaaaaa

SEQ ID NO: 730 - protein, 106 aa, Homo sapiens
MQWAVGRRWAWAALLLAVAAVLTQVVWLWLGTQSFVFQREEIAQLARQYAGLDHELAFSRLIVELRRLHPGHVLPDEELQWVFVNAGGWMGAMCLLHASLSEALLG

SEQ ID NO: 731 - DNA, 1706 bp, Homo sapiens
ctccgaggccgtgagcgcaaagcctcaggccccggctccctcctgagctgcgccgtgccaggccgcccgccgggatgcagtgggccgtgggccggcggtgggcgtgggccgcgctgctcctggctgtcgcagcggtgctgacccaggtcgtctggctctggctgggtacgcagagcttcgtcttccagcgcgaagagatagcgcagttggcgcggcagtacgctggtgagcgggcagagggcagggaggggagcggccggcctgggagcggagcctagggttccgaaggcgccatccccggacctaggaccggtgccagccctgactccgccgcccctctgcctccgccagggctggaccacgagctggccttctctcgtctgatcgtggagctgcggcggctgcacccaggccacgtgctgcccgacgaggagctgcagtgggtgttcgtgaatgcgggtggctggatgggcgccatgtgccttctgcacgcctcgctgtccgagtatgtgctgctcttcggcaccgccttgggctcccgcggccactcgggggagacggtagtacacgggcctggtgaggcaacagctgtggagtgggggccaaacacatggatggtggagtacggccggggcgtcatcccatccaccctggccttcgcgctggccgacactgtcttcagcacccaggacttcctcaccctcttctatactcttcgctcctatgctcggggcctccggcttgagctcaccacctacctctttggccaggacccttgaccagccaggcctgaaggaagacctgcggatggacaggagcgggcaggcccgcacatatccacttgctggagcccatgtttacagacagggacatacaccatgcagatcctgagttcctgctgtatgagcagggatatccatgcttatgtatccaaacacagagacccatgggaacaaatgagacacatatagatactgagacctgtgtgtacagtaggaccatgcactcacacccatctggagagggagcccccggtataccaagggagccagttgtgttcagacacacacatcacagcttgactcactaactgaggcctttccatagctccacagcttcccacctcctccccaccaaaccggggttctagagttaaggatgggggagggtattatactgcctcagtctgactcctcaacccagcagcaatttgaggggatgagggggaagaggagctgccttttggaggcccccttcacctgcagctatgatgcccttccccttctcccctgtcctcaccatatgccttatccccattctactcccctgctatgcaagtgcccctgtggcttgtccccaaccccctcagcaacaaagctcagctggggaacgagagtaatttgaagaatgcttgaagtcagcgtcttccattccagaaagacccccattcttcctttgggggtatgatgtggaagctggtttcagcccaggacccaccactgaggagaggatctagacaggtgggcctaattccaaggggcccttcctggcctggagaaggccttttacacacacacaacacatacacacacacacacacacacacatatcacagttttcacacagcccctgctgcattctctgtccatctgtctgtttctattaataaagatttgttgatctgttccaaaaaaaaaaaaaaaaaa

SEQ ID NO: 732 - protein, 67 aa, Homo sapiens
MQWAVGRRWAWAALLLAVAAVLTQVVWLWLGTQSFVFQREEIAQLARQYAGERAEGREGSGRPGSGA

SEQ ID NO: 733 - DNA, 3741 bp, Homo sapiens
gaattcgttgttgggaaggactggggaaacagctgtaacatttgccaccctcagaagctgctggtcctgtgtcacaccaccttagcctcttgatcgaggaagattctcgctgaagtctgttaattctactttttgagtacttatgaataaccacgtgtcttcaaaaccatctaccatgaagctaaaacataccatcaaccctattcttttatattttatacattttctaatatcactttatactattttaacatacattccgttttattttttctccgagtcaagacaagaaaaatcaaaccgaattaaagcaaagcctgtaaattcaaaacctgattctgcatacagatctgttaatagtttggatggtttggcttcagtattataccctggatgtgatactttagataaagtttttacatatgcaaaaaacaaatttaagaacaaaagactcttgggaacacgtgaagttttaaatgaggaagatgaagtacaaccaaatggaaaaatttttaaaaaggttattcttggacagtataattggctttcctatgaagatgtctttgttcgagcctttaattttggaaatggattacagatgttgggtcagaaaccaaagaccaacatcgccatcttctgtgagaccagggccgagtggatgatagctgcacaggcgtgttttatgtataattttcagcttgttacattatatgccactctaggaggtccagccattgttcatgcattaaatgaaacagaggtgaccaacatcattactagtaaagaactcttacaaacaaagttgaaggatatagtttctttggtcccacgcctgcggcacatcatcactgttgatggaaagccaccgacctggtccgacttccccaagggcatcattgtgcataccatggctgcagtggaggccctgggagccaaggccagcatggaaaaccaacctcatagcaaaccattgccctcagatattgcagtaatcatgtacacaagtggatccacaggacttccaaagggagtcatgatctcacatagtaacattattgctggtataactgggatggcagaaaggattccagaactaggagaggaagatgtctacattggatatttgcctctggcccatgttctagaattaagtgctgagcttgtctgtctttctcacggatgccgcattggttactcttcaccacagactttagcagatcagtcttcaaaaattaaaaaaggaagcaaaggggatacatccatgttgaaaccaacactgatggcagcagttccggaaatcatggatcggatctacaaaaatgtcatgaataaagtcagtgaaatgagtagttttcaacgtaatctgtttattctggcctataattacaaaatggaacagatttcaaaaggacgtaatactccactgtgcgacagctttgttttccggaaagttcgaagcttgctagggggaaatattcgtctcctgttgtgtggtggcgctccactttctgcaaccacgcagcgattcatgaacatctgtttctgctgtcctgttggtcagggatacgggctcactgaatctgctggggctggaacaatttccgaagtgtgggactacaatactggcagagtgggagcaccattagtttgctgtgaaatcaaattaaaaaactgggaggaaggtggatactttaatactgataagccacaccccaggggtgaaattcttattgggggccaaagtgtgacaatggggtactacaaaaatgaagcaaaaacaaaagctgatttctctgaagatgaaaatggacaaaggtggctctgtactggggatattggagagtttgaacccgatggatgcttaaagattattgatcgtaaaaaggaccttgtaaaactacaggcaggggaatatgtttctcttgggaaagtagaggcagctttgaagaatcttccactagtagataacatttgtgcatatgcaaacagttatcattcttatgtcattggatttgttgtgccaaatcaaaaggaactaactgaactagctcgaaagaaaggacttaaagggacttgggaggagctgtgtaacagttgtgaaatggaaaatgaggtacttaaagtgctttccgaagctgctatttcagcaagtctggaaaagtttgaaattccagtaaaaattcgtttgagtcctgaaccgtggacccctgaaactggtctggtgacagatgccttcaagctgaaacgcaaagagcttaaaacacattaccaggcggacattgagcgaatgtatggaagaaaataattattctcttctggcatcagtttgctacagtgagctcacatcaaataggaaaatacttgaaatgcatgtctcaagctgcaaggcaaactccattcctcatattaaactattacttctcatgacgtcaccatttttaactgacaggattagtaaaacattaagacagcaaacttgtgtctgtctcttctttcattttccccgccaccaacttactttaccacctatgactgtacttgtcagtatgagaatttttctgaatcatattggggaagcagtgattttaaaacctcaagtttttaaacatgatttatatgttctgtataatgttcagtttgtaactttttaaaagtttggatgtatagagggataaataggaaatataagaattggttatttgggggcttttttacttactgtatttaaaaatacaagggtattgatatgaaattatgtaaatttcaaatgcttatgaatcaaatcattgttgaacaaaagatttgttgctgtgtaattattgtcttgtatgcatttgagagaaataaatatacccatacttatgttttaagaagttgagatcttgtgaatatatgcctgtcagtgtcttctttatatatttattttttattagaaaaaatgaagtttggttggtgatgcatgaaacaaaatagcaagagagggttatagtttaatagtaagggagataacacagcatgtgtagcaccagttgataattggtctctagtagcttactgtcaaaatgttcaatgaagtcttctgttcatctgttgaaactaggaaaatacccaaacttaaatggaagaattctgaaagagaggatagaatttaaagaacaagagtatataaagttattctttgaatatttcgttgactatatgtacattgagttatctatatttgtaaacaaattagtcatggaaaattattctattccaaagtctccttttagtctagataatcattatttcattttaaaattagtgtttttcatagtttgcactgatgcgtgtatggatgtgtgtgagtcagtggtagcttatttaaaaagcaccttatcctttctcccataacctttgtacactaaaaaatgaaagaatttagaatgtatttgatgatagcattctcactaagacacatgagaatttaactttataaccgcgtgagttaagatttaattcataggttttgatgtcattgttgaagttatttgtaattcagaaaccttgcttgtgtgatacatagtaagtctcttcatttattactgcttgcctgttgttatatctggattatcaaaagcaatagtgcaccaattaagatgtgctcaaatcaggacttaaatcataggcaccacatttttcatgtcagactagttactttgttgattctcagttactgtaggcatcaaaaggcaaaaatca

SEQ ID NO: 734 - protein, 720 aa, Homo sapiens
MNNHVSSKPSTMKLKHTINPILLYFIHFLISLYTILTYIPFYFFSESRQEKSNRIKAKPVNSKPDSAYRSVNSLDGLASVLYPGCDTLDKVFTYAKNKFKNKRLLGTREVLNEEDEVQPNGKIFKKVILGQYNWLSYEDVFVRAFNFGNGLQMLGQKPKTNIAIFCETRAEWMIAAQACFMYNFQLVTLYATLGGPAIVHALNETEVTNIITSKELLQTKLKDIVSLVPRLRHIITVDGKPPTWSDFPKGIIVHTMAAVEALGAKASMENQPHSKPLPSDIAVIMYTSGSTGLPKGVMISHSNIIAGITGMAERIPELGEEDVYIGYLPLAHVLELSAELVCLSHGCRIGYSSPQTLADQSSKIKKGSKGDTSMLKPTLMAAVPEIMDRIYKNVMNKVSEMSSFQRNLFILAYNYKMEQISKGRNTPLCDSFVFRKVRSLLGGNIRLLLCGGAPLSATTQRFMNICFCCPVGQGYGLTESAGAGTISEVWDYNTGRVGAPLVCCEIKLKNWEEGGYFNTDKPHPRGEILIGGQSVTMGYYKNEAKTKADFSEDENGQRWLCTGDIGEFEPDGCLKIIDRKKDLVKLQAGEYVSLGKVEAALKNLPLVDNICAYANSYHSYVIGFVVPNQKELTELARKKGLKGTWEELCNSCEMENEVLKVLSEAAISASLEKFEIPVKIRLSPEPWTPETGLVTDAFKLKRKELKTHYQADIERMYGRK

SEQ ID NO: 735 - DNA, 4436 bp, Homo sapiens
ggtgcctgaggttgcagccgagagtgtgcgccagcccgcggcccagccgaagctctttcccgccgcctctccgcgcctcgcccaggttcagccccgcctgaccctccgcttggcacggtcccctgaccctcagtccggcccggtccggcctcccagccgccccggggacgatgaacggaggataaatggtgcccaaggcagacagcggcgccttcctgctgctcttcctgctcgtgctcactgtcaccgagccgctgcggccagagctgcggtgcaaccctgggcagtttgcgtgtcgcagcggcaccatccagtgcatccccctcccctggcagtgtgacggctgggcgacttgcgaggatgagagcgacgaagccaactgtccagaagtgaccggggaggtgcgtcctcatcatgggaaggaggctgtggatccgcggcaggggcgggccagaggaggcgacccttcgcacttccacgcggtgaacgtggcgcagcccgttcgcttcagcagtttcctagggaagtgcccgacagggtggcaccactacgaaggcacggccagctgctaccgggtctacctgagcggggagaactactgggatgccgcgcagacctgccagcgcctgaatggctctctcgccaccttctccactgaccaggagctgcgctttgtcctggcccaggaatgggaccagcccgagcggagctttggttggaaggaccagcgcaagttgtgggttggctatcagtatgttatcactggccggaaccgctccttggaaggtcgctgggaggtggcattcaaaggctcttcagaggtgttcctgcccccagaccccatctttgcctcggccatgtctgagaacgacaacgtgttctgtgcccagcttcagtgcttccatttccccaccctgcggcaccacgacctccacagctggcacgccgagagctgctacgagaagtcttcatttctgtgtaaaagaagtcaaacatgtgttgacatcaaggacaacgtggtggatgaagggttctacttcacccctaagggggacgacccatgcctgagctgcacctgccatggaggggagcctgagatgtgtgtggctgctctctgtgagaggccccagggctgccaacagtaccgcaaggaccccaaagagtgctgcaagttcatgtgtctggacccagatggcaacagtctgtttgactccatggccagcgggatgcgcctggtcgtcagctgcatctcctccttcctcatcctgtcactgctgctcttcatggtccaccggctgcgccagcggcgccgggagcgcatcgagtccctgattggagcaaacttgcaccacttcaacctcggccgcaggatccctggctttgattacggcccagacgggtttggcacgggcctcacgccgctgcatctttctgacgacggagagggtgggactttccatttccacgaccctccacctccctacacggcatacaagtacccggacatcggccagcccgacgaccctccgccgccctacgaggcctccatccacccggacagtgtgttctatgaccctgcagacgatgatgcttttgagcctgtggaggtcagcctgccagcccctggggatggtgggagtgaaggtgcattactccggcgcctggagcagcctctgcccactgcgggggcctctctggcagacctggaagactctgccgacagcagcagcgccctgctcgtgccccctgaccctgcccagagcgggagcaccccagctgcagaggcactgccagggggtggccgccacagccgcagctccctcaatactgtggtgtagacggcctggcctgtaccccaacggtctgggagcacctgtctgttgcagaaaacaccggtccctggggagacttgaaaggcccctgtcccagcctggacgccacgcactgccgcacgtcactggcgggctcgcgtgtgtacatagagaccacagcccgccttctgccaaaagaagtgatggcctgcaccgagcttccttgagggcttcagaaacatgcatagctttggatcactgtcttctcctttataaatggcagaagagtgacaaaattcattcagaccgcacatgttagaggcagggaatgaagaaggtactgtgggccatggccacacctgatgcgtttttggtgggcctacttggtgcagtgtgctgtccagagagacctgctgacccagtctgggacaggcacagtgggagctgccacagtgccccttgctggccgccctcaggagggggcctctggaccgtcagtgtggcgtaggcagtgggtctgcttcagggaggcagcctcttgactttgtcacaacggttgcactgaagatggcccccacaagcccagttgtgaatatcaaggtgaccctgcccctggctgggagctcccctggggctctggaacctgaagccctgagaaggagagcttggaaggaggttgagctcttcactgtgtctttccatctgggctctgcagcccagctctgtggcaggaggcctgaccccaccccatcagtccctctcccagcattgctgtgcatggctccctcaggaagaagctctggagtggggccgaggccccagatgctctgctggggtctggggactgagctgcctcctgtctctccactctggagccctgggctcttgcctcctgttgaattgcccctgggcctgcccccggccccatttgtgccataaagggttgcttcattgcaggaggggtggctgaaaccaccatcctgggctgcatctatctccttaaagtccactccttacatcaccgccactactgcagctcagtgcccagtggccgcatgcacacctcccggcccctcctcagcagcgcaggggctgggggcccttcctggcacccttttgcctgacggaccctgttgcctgctcctgggcagtggttttgttgcctgacacagggcctttaacatttctgaggtttggagattaagcgggttctgtgcgatttttagcacatccatatcttttctacgttgaatgtctggatctttcctttgtatgtttgtgtctctgtgtgtgtatgtggccaagcgtctgcaggtgagggtggcacatggaacttcacgggtcactgggggcccactcttccagggtcatcgatgcatcctgggctgtgctgaggcagtgctgtctcgctcagtctttccagaccagcggggcagcacctgggaggcctgtctgaagcatgcagttctgtggtgctgctcggggatggactccatgcacagtccacttcttgacacattctcacactgtggctggagacccattttttccatcccatgtggaatgagaatcttgagttgcccacagacagacttgacctttgtgccagaactgtccagagctgtgagttttgttactgaattgcctgtccctgagcttggcctgctggagcatgatgctggaggctgtgtgcgggcaggcttgtgctccccttggagaagggctgctacttaacaaggaagtcctggccacaagagtcccctactggctgcagaggacgaagcaggaagcatgccgtggatcccacatgcactggggcagggcagccaggttccagagcagcaggcatgtgcattatgggtgccaggtggccagtgagggcccgaggaccacgcagcagagtcccccacgggcctgagcctgagagctcagaggattcctgccaggcctcagaactgtgtgtgcgggacagggtggctggcacgagatgtgtgggactgggacgcttcctttggggaccagaggaacattaggggccggtcagacacgtagggggcagtgaggaaacggggtaaagtggaccatgcaggctgcagagggtgggccttgggctggccggggttgctgggtggccccttccccatgggcctccacaagcactcgggcctccacaagcactcaggccactggcacgttgggccaggcagaaggtccacatggcagggctgcctggaacaccgctgccactgtggctccaggaggcccttgggagcatgaggagagctggactcgctcatctgttcttgcaccaccatccagaatgccccctttgcaaggcctgctgcagtccccagtctgaccagcaagtcccggggtcacccttgctgaaccttgtgctccaggggtcctcctcctctaggaccagcttgccacggtttctcagagcccaggtgccctctgacctgccatgcggaggtgggatttgatactgtacattgtcttgatgcctgtttttttatgttttcattaagggtttttagtttttggttgggttgacactaacttttcttaagatgctgtgagaatcatttcatccaaatgccaaataaacttgtgttccgggag

SEQ ID NO: 736 - protein, 550 aa, Homo sapiens
MVPKADSGAFLLLFLLVLTVTEPLRPELRCNPGQFACRSGTIQCIPLPWQCDGWATCEDESDEANCPEVTGEVRPHHGKEAVDPRQGRARGGDPSHFHAVNVAQPVRFSSFLGKCPTGWHHYEGTASCYRVYLSGENYWDAAQTCQRLNGSLATFSTDQELRFVLAQEWDQPERSFGWKDQRKLWVGYQYVITGRNRSLEGRWEVAFKGSSEVFLPPDPIFASAMSENDNVFCAQLQCFHFPTLRHHDLHSWHAESCYEKSSFLCKRSQTCVDIKDNVVDEGFYFTPKGDDPCLSCTCHGGEPEMCVAALCERPQGCQQYRKDPKECCKFMCLDPDGNSLFDSMASGMRLVVSCISSFLILSLLLFMVHRLRQRRRERIESLIGANLHHFNLGRRIPGFDYGPDGFGTGLTPLHLSDDGEGGTFHFHDPPPPYTAYKYPDIGQPDDPPPPYEASIHPDSVFYDPADDDAFEPVEVSLPAPGDGGSEGALLRRLEQPLPTAGASLADLEDSADSSSALLVPPDPAQSGSTPAAEALPGGGRHSRSSLNTVV

SEQ ID NO: 737 - DNA, 6830 bp, Homo sapiens
ccacggtaaggggatgacgtagctttgccaaagacttagaagctaagcagaaaatgagcttaacatcctggtttttggtgagcagtggaggcactcgccacaggctgccacgagaaatgatttttgttggaagagatgactgtgagctcatgttgcagtctcgtagtgtggataagcaacacgctgtcatcaactatgatgcgtctacggatgagcatttagtgaaggatttgggcagcctcaatgggacttttgtgaatgatgtaaggattccggaacagacttatatcaccttgaaacttgaagataagctgagatttggatatgatacaaatcttttcactgtagtacaaggagaaatgagggtccctgaagaagctcttaagcatgagaagtttaccattcagcttcagttgtcccaaaaatcttcagaatcagaattatccaaatctgcaagtgccaaaagcatagattcaaaggtagcagacgctgctactgaagtgcagcacaaaactactgaagcactgaaatccgaggaaaaagccatggatatttctgctatgccccgtggtactccattatatgggcagccgtcatggtggggggatgatgaggtggatgaaaaaagagctttcaagacaaatggcaaacctgaagaaaaaaaccatgaagctggaacatcagggtgcagcatagatgccaagcaagttgaggaacaatctgcagctgcaaatgaagaagtactttttcctttctgtagggaaccaagttattttgaaatccctacaaaagaattccagcaaccatcacaaataacagaaagcactattcatgaaatcccaacaaaagacacgccaagttcccatataacaggtgcagggcatgcttcatttaccattgaatttgatgacagtaccccagggaaggtaactattagagaccatgtgacaaagtttacttctgatcagcgccacaagtccaagaagtcttctcctggaactcaagacttgctggggattcaaacaggaatgatggcacccgaaaacaaagttgctgactggctagcacaaaacaaccctcctcaaatgctatgggaaagaacagaagaggattctaaaagcattaaaagtgatgttccagtgtacttgaaaaggttgaaaggaaataaacatgatgatggtacgcaaagtgattcagagaacgctggggctcacaggcgctgtagcaaacgtgcaactcttgaggaacacttaagacgccaccattcagaacacaaaaagctacagaaggtccaggctactgaaaagcatcaagaccaagctgttactagctctgcgcatcacagaggggggcatggtgttccacatgggaaattgttaaaacagaaatcagaggagccatcggtgtcaatacccttcctacaaactgcattattaagaagttcagggagtcttgggcacagaccaagccaggagatggataaaatgttaaaaaatcaagcaacttctgctacttctgaaaaggataatgatgatgaccaaagtgacaagggtacttataccattgagttagagaatcccaacagtgaggaagtggaagcaagaaaaatgattgacaaggtgtttggagtagatgacaatcaggattataataggcctgttatcaacgaaaaacataaagatctaataaaagattgggctctcagttctgctgcagcagtaatggaagaaagaaaaccactgactacatctggatttcaccactcagaggaaggcacatcttcatctggaagcaaacgttgggtttcacagtgggctagtttggctgccaatcatacaaggcatgatcaagaagaaaggataatggaattttctgcacctcttcctttagagaatgagacagagatcagtgagtctggcatgacagtgagaagtactggctctgcaacttccttggctagccagggagagagaaggagacgaactcttccccagcttccaaatgaagaaaagtctcttgagagccacagagcaaaggttgtaacacagaggtcagagataggagaaaaacaagacacagaacttcaggagaaagaaacacctacacaggtataccagaaagataaacaagatgctgacagacccttgagtaaaatgaacagggcagtaaatggagagactctcaaaactggtggagataataaaaccctacttcacttaggcagctctgctcctggaaaagagaaaagtgaaactgataaggaaacttctttggtaaagcaaacattagcaaaacttcaacaacaagaacaaagggaggaggctcagtggacacctactaaattgtcttccaaaaatgtttcaggtcagacagataaatgtagggaggaaacttttaaacaagaatcacaacctccagaaaaaaattcaggacattctacaagcaaaggagacagagtggcacaaagtgagagcaagagaagaaaagctgaggaaattctgaaaagtcagactccaaagggaggagacaagaaggaatcctccaagtcattagtgcgacaagggagcttcactatagaaaaacccagcccaaacatacccatagaacttattccccatataaataaacagacttcctctactccttcttctttagcattaacatctgcaagtagaatacgagaaagaagtgagtctttggatcctgattctagtatggacacaacccttattctaaaagacacagaagcagtaatggcttttctagaagctaaactacgtgaagataataaaactgatgaaggaccagatactcccagttataatagagacaattctatttcaccagaatctgatgtagatacagctagtacaatcagtctggttactggagaaactgaaagaaagtcaacccaaaagcgaaagagtttcactagcctctataaagataggtgttccacaggttctccttccaaagatgttacaaaatcatcatcttcaggtgctagggaaaaaatggaaaagaaaacaaaaagtcgttccacagatgtgggttcaagagcagatggtcgtaaatttgttcagtccagtgggagaataagacagccctcagtagacttaacagatgatgaccaaacctctagtgtacctcattctgccatctctgatattatgtcatctgatcaagaaacttactcttgtaaacctcatggacggactccacttacctcagctgatgagcatgtacattccaaactggaaggaagtaaagtaacgaaatctaagacttctccggtggtatctggttcatctagtaaatcaaccacccttccaaggccacgacctaccaggacttccctcttgcgcagagcacgacttggtgaagcttcagacagtgaacttgctgatgctgacaaagcatctgttgcttctgaagtatccacaacaagttctacatcaaaacctcccacaggaaggcgtaacatctctcggattgatttattggctcagcctcgtagaacacgacttggctcactgtcagctcgtagtgactctgaagcaacaatttctagaagtagtgcctcttcgaggaccgcagaagccatcattagaagtggagccagactagtaccatcagataaattttctcctagaattagagctaacagtatctctcgactctcagactccaaggtcaaaagtatgacctcagctcatggctctgcttcagtaaattcaagatggaggcgctttcctactgattatgcttccacctcagaagatgaatttggatcaaaccgtaattcccctaaacatacccgtctacgtacttctccagccctgaaaaccactcgcttgcagagcgctggatcagcaatgcctactagttcttcattcaaacaccggattaaagagcaggaagactacatccgagattggactgctcatcgagaagagatagccaggatcagccaagatcttgctctcattgctcgggagatcaacgatgtagcaggagagatagattcagtgacttcatcaggcactgcccctagtaccacagtaagcactgctgccaccacccctggctctgccatagacactagagaagagttggttgatcgtgtttttgatgaaagcctcaacttccgaaagattcctccattagttcattccaaaacaccagaaggaaacaacggtcgatctggtgatccaagacctcaagcagcagagcctcccgatcacttaacaattacaaggcggagaacctggagcagggatgaagtcatgggagataatctgctgctgtcatccgtctttcagttctctaagaagataagacaatctatagataagacagctggaaagatcagaatattatttaaagacaaagatcggaattgggatgacatagaaagcaaattaagagccgaaagtgaagtccctattgtgaaaacctcaagcatggagatttcttctatcttacaggaactgaaaagagtagaaaagcagctgcaagcaatcaatgctatgattgatcctgatggaactttggaggctctgaacaacatgggatttcccagtgctatgttgccatctccaccgaaacagaagtccagccctgtgaataaccaccacagcccgggtcagacaccaacacttggccaaccagaagctagggctcttcatcctgctgctgtttcagccgcagctgaatttgagaatgctgaatctgaggctgatttcagtatacatttcaatagattcaaccccgatggggaagaggaagatgttacagtacaagaatgactttctcttgattgttgaaaaatcattacctgtggaatggctaggaatattggaagcagcatagtgttgatgtacgcaaaacaagacagcttggtcagctacaatcttggaatccctgtcttcttaattttatttatttatttttgacgtataatgtagtatatcaatcctttcaaactatttagataaccacttgatgcacaaataggaaaaagcagattgtggcagtgtcgccttttgtggttttatgattttcaaattgaatttaatgattacaccctttcccttcatagatcttttttcttttttttaagccatgctgtgacctacaagcaaactaaatagccaacatttctgaacccctaagtctcctgtgccaagctgctccctgaaatggacttcttcatctgtacagatttgttaaaccattctatttgcttcttaataataggatttatattagtactcattaccattggacacaatgacataagtactctccacagtaaagcagacctttcacaacagtcactctgtgtcctaaaattttccaacatagatgtgatttatataactttgttgatacgtaaattgtcttggggtttacggaaattaactattatgtttgcactaagatttgctgggagtggtaggtggacatatctatatatcaataaggactaaccgtcttttttgtacataggggattgataatactgtatttgttttaagcccacagtgtttttactccactttcaaaaagtcaatttgggcactttttttcatttttttttaatgggaataagatttggtctctcattttaggttaaatgataactagaaagattaaactagacagatagtttaggtggagtatatttttaaaactcagaacatgtatattggtcctgtgttaccaagtttatatgtgacagttgaaaaagaaattcccttgaaatgatcatgaggttaaaattttcttcattaggggacttggagaaccagtagtcgtaagattagttgatagtttcactcccaagcaatgaattgcttctgtgtgtttccctgtaggactcaatagtaaatgctgtctgtcttacacatttataaggaccctgcaagacgacgacaaaggcctttggcctgtgctactaaacaagaagcctatgaaaaatttcttctttaaacttgttttttctctttccagtaagttcacatttggataattttaaaaagaaaagtaattacctttgtgtttccagaacactataattggggtgtatcttaattcagttaaatattattagtagacctggattttcccccttgaccccatcagtctataaaggttaaactgcaacttttatgaaatggtctttaatatttccacaataatcctgtgctatatttgttttaagaaacaaagtaactctatacacttcaagactttacaggattttttaaatcctgtattgttggatcaattaataaagatgcaaaaaaactttatagagatgtaaaaacaaaactataatggatctcctatttttctttaaatacaaaaaaaaaaaggtaaatgaactattctccttgtaaagctaaattccccattctgtctaataaaggaagactgaaaaaaggttttaaagaacataaatggaaagatacaaatgctttgaaggaataaacgaaatgttaaaacagggtcaatccatttgaagaaaaagttggacaaaataatcagcattgctccctcttttatttaatatttgggtactgattatatccacatggaagtagaaggtaaggagtttaggaaaatactagaatctactctgcttacattcttgtttaagtgtttacacagtttggttcaattataaacatttggccttttactatgttatttttattttgtatgaatacattatcctccttatttatttttgttacatttattacttatgttattttgttatgcatttacaactccatttttaaataaagtgtttctggaacttt

SEQ ID NO: 738 - protein, 1584 aa, Homo sapiens
MSLTSWFLVSSGGTRHRLPREMIFVGRDDCELMLQSRSVDKQHAVINYDASTDEHLVKDLGSLNGTFVNDVRIPEQTYITLKLEDKLRFGYDTNLFTVVQGEMRVPEEALKHEKFTIQLQLSQKSSESELSKSASAKSIDSKVADAATEVQHKTTEALKSEEKAMDISAMPRGTPLYGQPSWWGDDEVDEKRAFKTNGKPEEKNHEAGTSGCSIDAKQVEEQSAAANEEVLFPFCREPSYFEIPTKEFQQPSQITESTIHEIPTKDTPSSHITGAGHASFTIEFDDSTPGKVTIRDHVTKFTSDQRHKSKKSSPGTQDLLGIQTGMMAPENKVADWLAQNNPPQMLWERTEEDSKSIKSDVPVYLKRLKGNKHDDGTQSDSENAGAHRRCSKRATLEEHLRRHHSEHKKLQKVQATEKHQDQAVTSSAHHRGGHGVPHGKLLKQKSEEPSVSIPFLQTALLRSSGSLGHRPSQEMDKMLKNQATSATSEKDNDDDQSDKGTYTIELENPNSEEVEARKMIDKVFGVDDNQDYNRPVINEKHKDLIKDWALSSAAAVMEERKPLTTSGFHHSEEGTSSSGSKRWVSQWASLAANHTRHDQEERIMEFSAPLPLENETEISESGMTVRSTGSATSLASQGERRRRTLPQLPNEEKSLESHRAKVVTQRSEIGEKQDTELQEKETPTQVYQKDKQDADRPLSKMNRAVNGETLKTGGDNKTLLHLGSSAPGKEKSETDKETSLVKQTLAKLQQQEQREEAQWTPTKLSSKNVSGQTDKCREETFKQESQPPEKNSGHSTSKGDRVAQSESKRRKAEEILKSQTPKGGDKKESSKSLVRQGSFTIEKPSPNIPIELIPHINKQTSSTPSSLALTSASRIRERSESLDPDSSMDTTLILKDTEAVMAFLEAKLREDNKTDEGPDTPSYNRDNSISPESDVDTASTISLVTGETERKSTQKRKSFTSLYKDRCSTGSPSKDVTKSSSSGAREKMEKKTKSRSTDVGSRADGRKFVQSSGRIRQPSVDLTDDDQTSSVPHSAISDIMSSDQETYSCKPHGRTPLTSADEHVHSKLEGSKVTKSKTSPVVSGSSSKSTTLPRPRPTRTSLLRRARLGEASDSELADADKASVASEVSTTSSTSKPPTGRRNISRIDLLAQPRRTRLGSLSARSDSEATISRSSASSRTAEAIIRSGARLVPSDKFSPRIRANSISRLSDSKVKSMTSAHGSASVNSRWRRFPTDYASTSEDEFGSNRNSPKHTRLRTSPALKTTRLQSAGSAMPTSSSFKHRIKEQEDYIRDWTAHREEIARISQDLALIAREINDVAGEIDSVTSSGTAPSTTVSTAATTPGSAIDTREELVDRVFDESLNFRKIPPLVHSKTPEGNNGRSGDPRPQAAEPPDHLTITRRRTWSRDEVMGDNLLLSSVFQFSKKIRQSIDKTAGKIRILFKDKDRNWDDIESKLRAESEVPIVKTSSMEISSILQELKRVEKQLQAINAMIDPDGTLEALNNMGFPSAMLPSPPKQKSSPVNNHHSPGQTPTLGQPEARALHPAAVSAAAEFENAESEADFSIHFNRFNPDGEEEDVTVQE

SEQ ID NO: 739 - DNA, 2105 bp, Homo sapiens
gttgccattaggggactcctgaggtcctatctccaggctgcggtgactgcactttccctggagtggaagctgctggaaggcggaccggccgccatgtccacgttcaggcaggaggacgtggaggaccattatgagatgggggaggagctgggcagcggccagtttgcgatcgtgcggaagtgccggcagaagggcacgggcaaggagtacgcagccaagttcatcaagaagcgccgcctgtcatccagccggcgtggggtgagccgggaggagatcgagcgggaggtgaacatcctgcgggagatccggcaccccaacatcatcaccctgcacgacatcttcgagaacaagacggacgtggtcctcatcctggagctggtctctggcggggagctctttgacttcctggcggagaaagagtcgctgacggaggacgaggccacccagttcctcaagcagatcctggacggcgttcactacctgcactctaagcgcatcgcacactttgacctgaagccggaaaacatcatgctgctggacaagaacgtgcccaacccacgaatcaagctcatcgacttcggcatcgcgcacaagatcgaggcggggaacgagttcaagaacatcttcggcaccccggagtttgtggccccagagattgtgaactatgagccgctgggcctggaggcggacatgtggagcatcggtgtcatcacctatatcctcctgagcggtgcatccccgttcctgggcgagaccaagcaggagacgctcaccaacatctcagccgtgaactacgacttcgacgaggagtacttcagcaacaccagcgagctggccaaggacttcattcgccggctgctcgtcaaagatcccaagcggagaatgaccattgcccagagcctggaacattcctggattaaggcgatccggcggcggaacgtgcgtggtgaggacagcggccgcaagcccgagcggcggcgcctgaagaccacgcgtctgaaggagtacaccatcaagtcgcactccagcttgccgcccaacaacagctacgccgacttcgagcgcttctccaaggtgctggaggaggcggcggccgccgaggagggcctgcgcgagctgcagcgcagccggcggctctgccacgaggacgtggaggcgctggccgccatctacgaggagaaggaggcctggtaccgcgaggagagcgacagcctgggccaggacctgcggaggctacggcaggagctgctcaagaccgaggcgctcaagcggcaggcgcaggaggaggccaagggcgcgctgctggggaccagcggcctcaagcgccgcttcagccgcctggagaaccgctacgaggcgctggccaagcaagtagcctccgagatgcgcttcgtgcaggacctcgtgcgcgccctggagcaggagaagctgcagggcgtggagtgcgggctgcgctaggcgcagtggggtgggccaggccccaggacagccggagctcggcctgcggtgggggcgcttcctgtggacgctgcgcctcccatcgcccgggtgcctgtccttgcccagcgccaccaggctggaggcggagtgggaggagctggagccaggcccgtaagttcgcaggcaggggtgggtgtgggacggggctgcttctctacacagcctctacgctggccttcaccttcacccctgcatcgtcggtgaccctgggaccctccaggcagcgtggcctgtggcaccgtgagggttgggacccaccgaggcgcagaggcggcccgaatgcagccctggttcaggcccggaggagggtttgcgggtagttgcacggacaattcggcggggtgctgcctgttgctgccattagcccaggaggaggtcgtgggacggggagggtgggatggacggcggacaggcagtccccacgctgctgggtggcgccgggcttggtggggtcttccactgtgtgcccttctcgccgaggccggtcccccgggtgtggggtgccctgctgcggactcctccgcgagccccatcgtcgcgcctgtggacgcctaggcaagagcggccctctgcagccaagagaaataaaatactggcttccagat

SEQ ID NO: 740 - protein, 454 aa, Homo sapiens
MSTFRQEDVEDHYEMGEELGSGQFAIVRKCRQKGTGKEYAAKFIKKRRLSSSRRGVSREEIEREVNILREIRHPNIITLHDIFENKTDVVLILELVSGGELFDFLAEKESLTEDEATQFLKQILDGVHYLHSKRIAHFDLKPENIMLLDKNVPNPRIKLIDFGIAHKIEAGNEFKNIFGTPEFVAPEIVNYEPLGLEADMWSIGVITYILLSGASPFLGETKQETLTNISAVNYDFDEEYFSNTSELAKDFIRRLLVKDPKRRMTIAQSLEHSWIKAIRRRNVRGEDSGRKPERRRLKTTRLKEYTIKSHSSLPPNNSYADFERFSKVLEEAAAAEEGLRELQRSRRLCHEDVEALAAIYEEKEAWYREESDSLGQDLRRLRQELLKTEALKRQAQEEAKGALLGTSGLKRRFSRLENRYEALAKQVASEMRFVQDLVRALEQEKLQGVECGLR

SEQ ID NO: 741 - DNA, 2584 bp, Homo sapiens
gggggcgtggccccgagaaggcggagacaagatggccgcccatagcgcttggaggacctaagaggcggtggccggggccacgccccgggcaggagggccgctctgtgcgcgcccgctctatgatgcttgcgcgcgtcccccgcgcgccgcgctgcgggcggggcgggtctccgggattccaagggctcggttacggaagaagcgcagcgccggctggggagggggctggatgcgcgcgcacccggggggaggccgctgctgcccggagcaggaggagggggagagtgcggcgggcggcagcggcgctggcggcgactccgccatagagcaggggggccagggcagcgcgctcgccccgtccccggtgagcggcgtgcgcagggaaggcgctcggggcggcggccgtggccgggggcggtggaagcaggcgggccggggcggcggcgtctgtggccgtggccggggccggggccgtggccggggacggggacggggccggggccggggccgcggccgtcccccgagtggcggcagcggccttggcggcgacggcggcggctgcggcggcggcggcagcggtggcggcggcgccccccggcgggagccggtccctttcccgtcggggagcgcggggccggggcccaggggaccccgggccacggagagcgggaagaggatggattgcccggccctcccccccggatggaagaaggaggaagtgatccgaaaatctgggctaagtgctggcaagagcgatgtctactacttcagtccaagtggtaagaagttcagaagcaagcctcagttggcaaggtacctgggaaatactgttgatctcagcagttttgacttcagaactggaaagatgatgcctagtaaattacagaagaacaaacagagactgcgaaacgatcctctcaatcaaaataagggtaaaccagacttgaatacaacattgccaattagacaaacagcatcaattttcaaacaaccggtaaccaaagtcacaaatcatcctagtaataaagtgaaatcagacccacaacgaatgaatgaacagccacgtcagcttttctgggagaagaggctacaaggacttagtgcatcagatgtaacagaacaaattataaaaaccatggaactacccaaaggtcttcaaggagttggtccaggtagcaatgatgagacccttttatctgctgttgccagtgctttgcacacaagctctgcgccaatcacagggcaagtctccgctgctgtggaaaagaaccctgctgtttggcttaacacatctcaacccctctgcaaagcttttattgtcacagatgaagacatcaggaaacaggaagagcgagtacagcaagtacgcaagaaattggaagaagcactgatggcagacatcttgtcgcgagctgctgatacagaagagatggatattgaaatggacagtggagatgaagcctaagaatatgatcaggtaactttcgaccgactttccccaagagaaaattcctagaaattgaacaaaaatgtttccactggcttttgcctgtaagaaaaaaaatgtacccgagcacatagagctttttaatagcactaaccaatgcctttttagatgtatttttgatgtatatatctattattcaaaaaatcatgtttattttgagtcctaggacttaaaattagtcttttgtaatatcaagcaggaccctaagatgaagctgagcttttgatgccaggtgcaatctactggaaatgtagcacttacgtaaaacatttgtttcccccacagttttaataagaacagatcaggaattctaaataaatttcccagttaaagattattgtgacttcactgtatataaacatatttttatactttattgaaaggggacacctgtacattcttccatcatcactgtaaagacaaataaatgattatattcacagactgattggaattctttctgttgaaaagcacacacaataaagaacccctcgttagccttcctctgatttacattcaactctgatccctgggccttaggtttgacatggaggtggaggaagatagcgcatatatttgcagtatgaactattgcctctggacgttgtgagaattgtgctttcaccagaatttctaagaatttctgctaaatatcacctagcatgtgtaattttttttccttgcctgtgacttggacttttgatagttctataagaataaggctttttcttcccttgggcatgagtcagatacacaaggacccttcaggtgttactagaaggcgtccatgtttattgttttttaaagaatgtttggcactctctaacgtccactagcttactgagttatcaggtgcaggtcagactcttggctacagtgagaggcagcttctaggcagagttgcttaatgaaagggtttgtaatactttacaaaccattacctgtacctggcctggcctccaaaatattaacattctttttctgttgaaactcgcgagtgtaactttcataccacttgaatttattgatatttaattatgaaaactagcattacattattaaacgatttctaaaatc

SEQ ID NO: 742 - protein, 411 aa, Homo sapiens
MRAHPGGGRCCPEQEEGESAAGGSGAGGDSAIEQGGQGSALAPSPVSGVRREGARGGGRGRGRWKQAGRGGGVCGRGRGRGRGRGRGRGRGRGRGRPPSGGSGLGGDGGGCGGGGSGGGGAPRREPVPFPSGSAGPGPRGPRATESGKRMDCPALPPGWKKEEVIRKSGLSAGKSDVYYFSPSGKKFRSKPQLARYLGNTVDLSSFDFRTGKMMPSKLQKNKQRLRNDPLNQNKGKPDLNTTLPIRQTASIFKQPVTKVTNHPSNKVKSDPQRMNEQPRQLFWEKRLQGLSASDVTEQIIKTMELPKGLQGVGPGSNDETLLSAVASALHTSSAPITGQVSAAVEKNPAVWLNTSQPLCKAFIVTDEDIRKQEERVQQVRKKLEEALMADILSRAADTEEMDIEMDSGDEA

SEQ ID NO: 743 - DNA, 2792 bp, Homo sapiens
gggggcgtggccccgagaaggcggagacaagatggccgcccatagcgcttggaggacctaagaggcggtggccggggccacgccccgggcaggagggccgctctgtgcgcgcccgctctatgatgcttgcgcgcgtcccccgcgcgccgcgctgcgggcggggcgggtctccgggattccaagggctcggttacggaagaagcgcagcgccggctggggagggggctggatgcgcgcgcacccggggggaggccgctgctgcccggagcaggaggagggggagagtgcggcgggcggcagcggcgctggcggcgactccgccatagagcaggggggccagggcagcgcgctcgccccgtccccggtgagcggcgtgcgcagggaaggcgctcggggcggcggccgtggccgggggcggtggaagcaggcgggccggggcggcggcgtctgtggccgtggccggggccggggccgtggccggggacggggacggggccggggccggggccgcggccgtcccccgagtggcggcagcggccttggcggcgacggcggcggctgcggcggcggcggcagcggtggcggcggcgccccccggcgggagccggtccctttcccgtcggggagcgcggggccggggcccaggggaccccgggccacggagagcgggaagaggatggattgcccggccctcccccccggatggaagaaggaggaagtgatccgaaaatctgggctaagtgctggcaagagcgatgtctactacttcagtccaagtggtaagaagttcagaagcaagcctcagttggcaaggtacctgggaaatactgttgatctcagcagttttgacttcagaactggaaagatgatgcctagtaaattacagaagaacaaacagagactgcgaaacgatcctctcaatcaaaataagctgcgctggaacactcatcgtcctgcaccatggcatgcgctttcaagactctgcttgctcatacgctgtttgctctgcttggaatgtgcttacccccttccccttcatctggtgaactcctactcatccaagacccagcttcattgtctccatctctgggaagcctgccctgcatactccaggcagaaccaatcctttcctccataagggtaaaccagacttgaatacaacattgccaattagacaaacagcatcaattttcaaacaaccggtaaccaaagtcacaaatcatcctagtaataaagtgaaatcagacccacaacgaatgaatgaacagccacgtcagcttttctgggagaagaggctacaaggacttagtgcatcagatgtaacagaacaaattataaaaaccatggaactacccaaaggtcttcaaggagttggtccaggtagcaatgatgagacccttttatctgctgttgccagtgctttgcacacaagctctgcgccaatcacagggcaagtctccgctgctgtggaaaagaaccctgctgtttggcttaacacatctcaacccctctgcaaagcttttattgtcacagatgaagacatcaggaaacaggaagagcgagtacagcaagtacgcaagaaattggaagaagcactgatggcagacatcttgtcgcgagctgctgatacagaagagatggatattgaaatggacagtggagatgaagcctaagaatatgatcaggtaactttcgaccgactttccccaagagaaaattcctagaaattgaacaaaaatgtttccactggcttttgcctgtaagaaaaaaaatgtacccgagcacatagagctttttaatagcactaaccaatgcctttttagatgtatttttgatgtatatatctattattcaaaaaatcatgtttattttgagtcctaggacttaaaattagtcttttgtaatatcaagcaggaccctaagatgaagctgagcttttgatgccaggtgcaatctactggaaatgtagcacttacgtaaaacatttgtttcccccacagttttaataagaacagatcaggaattctaaataaatttcccagttaaagattattgtgacttcactgtatataaacatatttttatactttattgaaaggggacacctgtacattcttccatcatcactgtaaagacaaataaatgattatattcacagactgattggaattctttctgttgaaaagcacacacaataaagaacccctcgttagccttcctctgatttacattcaactctgatccctgggccttaggtttgacatggaggtggaggaagatagcgcatatatttgcagtatgaactattgcctctggacgttgtgagaattgtgctttcaccagaatttctaagaatttctgctaaatatcacctagcatgtgtaattttttttccttgcctgtgacttggacttttgatagttctataagaataaggctttttcttcccttgggcatgagtcagatacacaaggacccttcaggtgttactagaaggcgtccatgtttattgttttttaaagaatgtttggcactctctaacgtccactagcttactgagttatcaggtgcaggtcagactcttggctacagtgagaggcagcttctaggcagagttgcttaatgaaagggtttgtaatactttacaaaccattacctgtacctggcctggcctccaaaatattaacattctttttctgttgaaactcgcgagtgtaactttcataccacttgaatttattgatatttaattatgaaaactagcattacattattaaacgatttctaaaatc

SEQ ID NO: 744 - protein, 302 aa, Homo sapiens
MRAHPGGGRCCPEQEEGESAAGGSGAGGDSAIEQGGQGSALAPSPVSGVRREGARGGGRGRGRWKQAGRGGGVCGRGRGRGRGRGRGRGRGRGRGRPPSGGSGLGGDGGGCGGGGSGGGGAPRREPVPFPSGSAGPGPRGPRATESGKRMDCPALPPGWKKEEVIRKSGLSAGKSDVYYFSPSGKKFRSKPQLARYLGNTVDLSSFDFRTGKMMPSKLQKNKQRLRNDPLNQNKLRWNTHRPAPWHALSRLCLLIRCLLCLECAYPLPLHLVNSYSSKTQLHCLHLWEACPAYSRQNQSFPP

SEQ ID NO: 745 - DNA, 6714 bp, Homo sapiens
ccctaggcccgggtcccggatccccgcgcacccggccaggctctggcacgttttgggggaggtgcctgcaggacccaacatactcaatgagcttccagcgcaatgtccgatcgctcggggccgactgccaagggaaaggatggaaagaagtattcctcgctcaacctgtttgatacgtataagggcaagtccttagagatccagaaacccgctgttgcccctcgccatggcctgcagagtctcgggaaagttgccattgcccggcgtatgccacctccagccaaccttccaagcctgaaagccgagaacaaaggcaatgaccccaatgtctcactagtgccaaaagacggaacaggatgggcaagcaaacaggagcagtccgaccccaagagttccgatgcctcaaccgctcagccgccggaatcgcagccactgccggcttcacagacgcctgcctccaaccagccgaaacgacccccagcagcccccgagaacactcctttggttccaagcggggtaaagtcctgggcacaagccagcgtcacccatggagcacatggagatggtggaagggcatcaagcctactgtcacgattctctcgagaggaatttccgaccctgcaggcggctggcgaccaggacaaggctgccaaggaaagggagtctgccgaacagtcgtctgggcccggaccaagcctccgcccccaaaattctacaacttggagggacggaggtgggcgtggccctgatgagctggagggcccggactccaaacttcatcatggtcatgatccccggggtgggctacagccttcaggcccaccccagttccctccctaccgcggaatgatgccgcctttcatgtatcccccatatctcccgttccctccgccctatggaccccaggggccttaccgataccccactcctgatgggcccagccgttttccccgtgtggcgggcccccgaggctcagggccaccaatgcgcttagtagagcctgtgggtcgtccctctattctcaaagaggataatctcaaagagtttgatcagttggatcaggagaatgatgatggttgggcaggggcccatgaagaggttgactacactgaaaagctcaagttcagcgatgaggaagatgggcgagactctgatgaggagggagctgagggccacagggattcccaatcagcttctggtgaggaacggccccctgaagcagatggcaaaaagggcaactcccccaacagcgaaccgcccactcctaagacggcctgggcagaaacctctcggcctccagagacagagccgggacctcctgccccaaagcctcccctaccccctggggactacccagatcgtgggggtcctccctgcaagcccccagcacctgaagatgaggatgaggcatggcggcagcgacgaaagcagtcgtcatctgagatttccctggcagtggagcgggcccggcgacggcgagaagaagaggagcggcgcatgcaagaagagcgccgggcagcctgtgctgagaagctcaagcgactcgatgaaaagtttggggcacctgacaagcggctcaaagcagagcctgctgccccacctgctgccccttctaccccagctccaccacctgcagtccctaaagaactccctgcacctccagctccacctccagcatcagccccaacaccagagaaagaacctgaagagccagcacaggcccctcctgcccaatctactcctactccaggtgtggctgcggctcccactctggtgagtggtggtggcagtaccagtagcaccagcagtggcagcttcgaagccagcccagtggaaccacaactgccctcaaaagagggtcctgaaccaccagaagaggttcctcctcctaccacacccccagttccaaaggtggaacccaagggtgatgggattggtcccacccgccagccccctagtcagggcttgggctaccccaaatatcagaagtcgttgcctcctcgtttccagcggcagcagcaggagcagctcctgaagcagcagcagcagcaccagtggcagcagcatcaacagggctctgcccctcctaccccagtgcccccatcaccaccacagcctgtgaccctgggggctgtgccagctccacaggctccacccccgccccccaaggccctgtacccaggtgctctgggccggcccccacccatgcccccaatgaactttgatccccgatggatgatgattcctccttatgtggacccccggctcctccagggtcgtccccctctagacttctaccctcctggtgtgcatccctctggcctagttccccgagagcgttcagacagtgggggctcaagctcagagccatttgaccgtcatgcacctgctatgttacgggaacggggcactccaccggtggatccaaagttggcctgggtaggagatgtcttcaccgccacacccgctgaaccccgcccacttacctcacctctgcgccaggctgcggatgaggatgacaaggggatgaggagcgagactcctccagtacctcccccaccaccctatctggccagttatccaggctttcctgagaatggagcccctgggcccccaatctctcgctttcctctggaggaaccagggccccgtccactcccctggcccccaggcagtgatgaagtggccaagatacaaactccaccacccaagaaggagccccctaaggaggagactgcacagctgacggggccagaagcaggccgaaagcctgcccgcggagtcgggagtggaggccagggccccccaccaccacgcagagagagtcgcacagagacccgctggggccctcgtccagggagcagtcgtcgtggaatccctccagaggagccaggggccccaccccgccgggctgggcctataaagaaacctccaccacctacaaaagtagaagagctgcctcccaagcccctcgaacagggggatgaaacccccaaacccccaaagccagacccactcaagataaccaaggggaagctagggggccccaaggagaccccacccaatggaaatctttcccctgccccaaggcttcggagggactattcgtatgaaagagtgggtcctacctcttgccggggtcggggccgaggcgagtattttgccagagggaggggttttcgggggacctatgggggacgagggcggggagcccgaagccgggaattccgcagttaccgagagtttcgaggagatgatgggcgtggaggtgggacagggggaccaaaccaccctcctgctccccgaggccgcactgccagcgagacacggagcgagggttcagagtatgaggaaatccccaagcggcgccggcagcggggctcagaaacaggcagcgagacccatgagagtgatctggctccttcagacaaggaggctcccacacccaaggagggaacactcacccaggtccctctcgctcccccaccaccaggagccccaccttcaccagccccagcccgcttcactgcccggggtgggcgagtcttcactcccagaggggtgccatctcgccggggccgaggaggagggaggccccctcctcaagtttgcccaggctggagccctccagccaagtctctggctcccaagaaacctcccacaggccctttgccaccaagtaaggagcctttgaaagagaagttgatcccagggcctctgtcccctgtggcgcgcggaggcagcaatggaggtagcaatgtgggcatggaagatggggagcgaccccgaaggaggcgacatgggagggctcagcagcaggataaaccgcctcgtttccggaggctgaagcaggaacgggagaatgccgcaagggggtctgagggcaagccctccctaacccttccagcctccgctcctgcacctgaggaggccctcacaacagtcacagtggccccagcacctcgccgggcagctgccaagtctcctgatctgtcaaaccagaactcagaccaagccaatgaggaatgggagactgcatcagagagcagtgacttcaccagtgagcgccgaggggacaaagaggcacccccaccagtactgctgacacccaaggctgtgggaactcctgggggaggtggaggtggagccgtaccaggtatttcagccatgtcccgcggagatctgagccagagagccaaggatttgagtaaacggagcttctcaagtcagcggccaggcatggaacggcagaatcggcgccctggcccagggggcaaggctggcagcagtggcagcagcagtggaggaggcggtgggggtcctggaggaaggaccgggccaggacgaggcgacaagaggagctggccctctcccaagaaccgaagtcgtcctccagaggagcgtcccccggggcttcccctgcctcccccacctcccagcagttctgctgtcttccgcctggaccaagttatccacagcaaccctgctggcatccaacaggctctggcccagcttagtagccgtcaagggagtgtaactgcaccagggggtcatccaaggcacaagcctgggcctccccaagcccctcagggcccctctcctaggcccccaacccgatacgagccccagagggtcaacagcggcctcagttctgacccccactttgaggagccggggccaatggtgagaggggtgggtgggactcctcgggactctgccggggttagtccctttccccctaaacgtcgggagcggcctcccagaaaaccagagctgctacaggaggaatctttgccacctcctcatagctctggattcttgggctctaagcctgagggcccaggccctcaggcagagtccagagatacaggcacagaggccctgacccctcacatctggaaccgtttacatactgccactagccgaaagagttaccggcccagctccatggagccttggatggagcccctgagtccttttgaggatgtggctggcacagaaatgagtcagtctgacagtggggtggacctgagtggggattctcaggtgtcatcaggtccctgcagccagcgaagttcccctgatggaggactcaagggggcagcagagggaccccccaagaggcctggaggctcctcacccctgaatgctgttccttgtgagggtccacctggctctgaacctcctaggagaccaccacctgccccccacgatggggacagaaaggagctgccccgggagcagcctctgccccctggccccattggcacagaacgatcacagcatacagaccgaggcacagagcctggccccattcggccatcccatcgacctggtcccccagtccagtttggcactagtgacaaggactcagacttacgcctagtggtaggagacagcttgaaagcagagaaggagctaacagcatcagtcactgaggccattcctgtatcacgagactgggagctgcttcccagtgctgctgcctctgctgagccacaatccaagaacctggattctgggcactgtgtcccggagcccagctcctcaggccagcgcctgtatcctgaggttttctatggcagtgctgggccttccagttctcagatctctgggggagccatggactctcaattacatccaaacagtggaggcttccgccctgggacaccctcactgcacccttacagatcacagcccctatacctaccccccggcccagcccctccctcagcactgctctctggggtagctctcaagggccagtttctggatttctccacaatgcaagctacagagctggggaagttgccggctggaggagttctctaccctccaccttccttcctctactctccggctttctgccccagtcctttgcctgacacatcgttgcttcaggtacgccaggatctgccatccccttcggatttttattctactcctctgcagcctggtggccaaagtggctttctcccttcaggggctcctgcccagcagatgcttctacccatggtagactcacagctgcctgtggtgaactttggctccctgccgccagcaccacctcctgccccacctcccctttctctgttacctgtgggccctgctctgcagccccccagcctggctgtgcggcccccacctgctcctgctactcgggtgctgccttcacctgccaggcccttccccgctagcttggggcgagcagagctgcatccagtggaactaaagccgttccaggattatcaaaaactgagcagcaaccttgggggacctggatcatcacggactcccccaactggaaggtccttctctggcctcaattcccgtctcaaggccacgccttccacctacagtggagtcttccgcacccagcgcgtcgacctttaccagcaggcctccccaccagatgccctgcgctggatacctaagccttgggagcggacagggctgccacctcgagaagggccctcccgacgggcagaggagcctgggtcccgaggggacaaggagcctgggttgcccccaccccgctgagggagttcctcttgccccctacccccggggcttgtatatagattataaatatataagggggaaaggggtgggcggggaggggttgtggggctggggcctcacttcccctcctcccccttcccctggtcccctgtccctggggctgtttgttaaaaaagagtaataaaaggattt

SEQ ID NO: 746 - protein, 2145 aa, Homo sapiens
MSDRSGPTAKGKDGKKYSSLNLFDTYKGKSLEIQKPAVAPRHGLQSLGKVAIARRMPPPANLPSLKAENKGNDPNVSLVPKDGTGWASKQEQSDPKSSDASTAQPPESQPLPASQTPASNQPKRPPAAPENTPLVPSGVKSWAQASVTHGAHGDGGRASSLLSRFSREEFPTLQAAGDQDKAAKERESAEQSSGPGPSLRPQNSTTWRDGGGRGPDELEGPDSKLHHGHDPRGGLQPSGPPQFPPYRGMMPPFMYPPYLPFPPPYGPQGPYRYPTPDGPSRFPRVAGPRGSGPPMRLVEPVGRPSILKEDNLKEFDQLDQENDDGWAGAHEEVDYTEKLKFSDEEDGRDSDEEGAEGHRDSQSASGEERPPEADGKKGNSPNSEPPTPKTAWAETSRPPETEPGPPAPKPPLPPGDYPDRGGPPCKPPAPEDEDEAWRQRRKQSSSEISLAVERARRRREEEERRMQEERRAACAEKLKRLDEKFGAPDKRLKAEPAAPPAAPSTPAPPPAVPKELPAPPAPPPASAPTPEKEPEEPAQAPPAQSTPTPGVAAAPTLVSGGGSTSSTSSGSFEASPVEPQLPSKEGPEPPEEVPPPTTPPVPKVEPKGDGIGPTRQPPSQGLGYPKYQKSLPPRFQRQQQEQLLKQQQQHQWQQHQQGSAPPTPVPPSPPQPVTLGAVPAPQAPPPPPKALYPGALGRPPPMPPMNFDPRWMMIPPYVDPRLLQGRPPLDFYPPGVHPSGLVPRERSDSGGSSSEPFDRHAPAMLRERGTPPVDPKLAWVGDVFTATPAEPRPLTSPLRQAADEDDKGMRSETPPVPPPPPYLASYPGFPENGAPGPPISRFPLEEPGPRPLPWPPGSDEVAKIQTPPPKKEPPKEETAQLTGPEAGRKPARGVGSGGQGPPPPRRESRTETRWGPRPGSSRRGIPPEEPGAPPRRAGPIKKPPPPTKVEELPPKPLEQGDETPKPPKPDPLKITKGKLGGPKETPPNGNLSPAPRLRRDYSYERVGPTSCRGRGRGEYFARGRGFRGTYGGRGRGARSREFRSYREFRGDDGRGGGTGGPNHPPAPRGRTASETRSEGSEYEEIPKRRRQRGSETGSETHESDLAPSDKEAPTPKEGTLTQVPLAPPPPGAPPSPAPARFTARGGRVFTPRGVPSRRGRGGGRPPPQVCPGWSPPAKSLAPKKPPTGPLPPSKEPLKEKLIPGPLSPVARGGSNGGSNVGMEDGERPRRRRHGRAQQQDKPPRFRRLKQERENAARGSEGKPSLTLPASAPAPEEALTTVTVAPAPRRAAAKSPDLSNQNSDQANEEWETASESSDFTSERRGDKEAPPPVLLTPKAVGTPGGGGGGAVPGISAMSRGDLSQRAKDLSKRSFSSQRPGMERQNRRPGPGGKAGSSGSSSGGGGGGPGGRTGPGRGDKRSWPSPKNRSRPPEERPPGLPLPPPPPSSSAVFRLDQVIHSNPAGIQQALAQLSSRQGSVTAPGGHPRHKPGPPQAPQGPSPRPPTRYEPQRVNSGLSSDPHFEEPGPMVRGVGGTPRDSAGVSPFPPKRRERPPRKPELLQEESLPPPHSSGFLGSKPEGPGPQAESRDTGTEALTPHIWNRLHTATSRKSYRPSSMEPWMEPLSPFEDVAGTEMSQSDSGVDLSGDSQVSSGPCSQRSSPDGGLKGAAEGPPKRPGGSSPLNAVPCEGPPGSEPPRRPPPAPHDGDRKELPREQPLPPGPIGTERSQHTDRGTEPGPIRPSHRPGPPVQFGTSDKDSDLRLVVGDSLKAEKELTASVTEAIPVSRDWELLPSAAASAEPQSKNLDSGHCVPEPSSSGQRLYPEVFYGSAGPSSSQISGGAMDSQLHPNSGGFRPGTPSLHPYRSQPLYLPPGPAPPSALLSGVALKGQFLDFSTMQATELGKLPAGGVLYPPPSFLYSPAFCPSPLPDTSLLQVRQDLPSPSDFYSTPLQPGGQSGFLPSGAPAQQMLLPMVDSQLPVVNFGSLPPAPPPAPPPLSLLPVGPALQPPSLAVRPPPAPATRVLPSPARPFPASLGRAELHPVELKPFQDYQKLSSNLGGPGSSRTPPTGRSFSGLNSRLKATPSTYSGVFRTQRVDLYQQASPPDALRWIPKPWERTGLPPREGPSRRAEEPGSRGDKEPGLPPPR

SEQ ID NO: 747 - DNA, 6750 bp, Homo sapiens
ccctaggcccgggtcccggatccccgcgcacccggccaggctctggcacgttttgggggaggtgcctgcaggacccaacatactcaatgagcttccagcgcaatgtccgatcgctcggggccgactgccaagggaaaggatggaaagaagtattcctcgctcaacctgtttgatacgtataagggcaagtccttagagatccagaaacccgctgttgcccctcgccatggcctgcagagtctcgggaaagttgccattgcccggcgtatgccacctccagccaaccttccaagcctgaaagccgagaacaaaggcaatgaccccaatgtctcactagtgccaaaagacggaacaggatgggcaagcaaacaggagcagtccgaccccaagagttccgatgcctcaaccgctcagccgccggaatcgcagccactgccggcttcacagacgcctgcctccaaccagccgaaacgacccccagcagcccccgagaacactcctttggttccaagcggggtaaagtcctgggcacaagccagcgtcacccatggagcacatggagatggtggaagggcatcaagcctactgtcacgattctctcgagaggaatttccgaccctgcaggcggctggcgaccaggacaaggctgccaaggaaagggagtctgccgaacagtcgtctgggcccggaccaagcctccgcccccaaaattctacaacttggagggacggaggtgggcgtggccctgatgagctggagggcccggactccaaacttcatcatggtcatgatccccggggtgggctacagccttcaggcccaccccagttccctccctaccgcggaatgatgccgcctttcatgtatcccccatatctcccgttccctccgccctatggaccccaggggccttaccgataccccactcctgatgggcccagccgttttccccgtgtggcgggcccccgaggctcagggccaccaatgcgcttagtagagcctgtgggtcgtccctctattctcaaagaggataatctcaaagagtttgatcagttggatcaggagaatgatgatggttgggcaggggcccatgaagaggttgactacactgaaaagctcaagttcagcgatgaggaagatgggcgagactctgatgaggagggagctgagggccacagggattcccaatcagcttctggtgaggaacggccccctgaagcagatggcaaaaagggcaactcccccaacagcgaaccgcccactcctaagacggcctgggcagaaacctctcggcctccagagacagagccgggacctcctgccccaaagcctcccctacccccacctcaccggggccccgccgggaactggggcccccctggggactacccagatcgtgggggtcctccctgcaagcccccagcacctgaagatgaggatgaggcatggcggcagcgacgaaagcagtcgtcatctgagatttccctggcagtggagcgggcccggcgacggcgagaagaagaggagcggcgcatgcaagaagagcgccgggcagcctgtgctgagaagctcaagcgactcgatgaaaagtttggggcacctgacaagcggctcaaagcagagcctgctgccccacctgctgccccttctaccccagctccaccacctgcagtccctaaagaactccctgcacctccagctccacctccagcatcagccccaacaccagagaaagaacctgaagagccagcacaggcccctcctgcccaatctactcctactccaggtgtggctgcggctcccactctggtgagtggtggtggcagtaccagtagcaccagcagtggcagcttcgaagccagcccagtggaaccacaactgccctcaaaagagggtcctgaaccaccagaagaggttcctcctcctaccacacccccagttccaaaggtggaacccaagggtgatgggattggtcccacccgccagccccctagtcagggcttgggctaccccaaatatcagaagtcgttgcctcctcgtttccagcggcagcagcaggagcagctcctgaagcagcagcagcagcaccagtggcagcagcatcaacagggctctgcccctcctaccccagtgcccccatcaccaccacagcctgtgaccctgggggctgtgccagctccacaggctccacccccgccccccaaggccctgtacccaggtgctctgggccggcccccacccatgcccccaatgaactttgatccccgatggatgatgattcctccttatgtggacccccggctcctccagggtcgtccccctctagacttctaccctcctggtgtgcatccctctggcctagttccccgagagcgttcagacagtgggggctcaagctcagagccatttgaccgtcatgcacctgctatgttacgggaacggggcactccaccggtggatccaaagttggcctgggtaggagatgtcttcaccgccacacccgctgaaccccgcccacttacctcacctctgcgccaggctgcggatgaggatgacaaggggatgaggagcgagactcctccagtacctcccccaccaccctatctggccagttatccaggctttcctgagaatggagcccctgggcccccaatctctcgctttcctctggaggaaccagggccccgtccactcccctggcccccaggcagtgatgaagtggccaagatacaaactccaccacccaagaaggagccccctaaggaggagactgcacagctgacggggccagaagcaggccgaaagcctgcccgcggagtcgggagtggaggccagggccccccaccaccacgcagagagagtcgcacagagacccgctggggccctcgtccagggagcagtcgtcgtggaatccctccagaggagccaggggccccaccccgccgggctgggcctataaagaaacctccaccacctacaaaagtagaagagctgcctcccaagcccctcgaacagggggatgaaacccccaaacccccaaagccagacccactcaagataaccaaggggaagctagggggccccaaggagaccccacccaatggaaatctttcccctgccccaaggcttcggagggactattcgtatgaaagagtgggtcctacctcttgccggggtcggggccgaggcgagtattttgccagagggaggggttttcgggggacctatgggggacgagggcggggagcccgaagccgggaattccgcagttaccgagagtttcgaggagatgatgggcgtggaggtgggacagggggaccaaaccaccctcctgctccccgaggccgcactgccagcgagacacggagcgagggttcagagtatgaggaaatccccaagcggcgccggcagcggggctcagaaacaggcagcgagacccatgagagtgatctggctccttcagacaaggaggctcccacacccaaggagggaacactcacccaggtccctctcgctcccccaccaccaggagccccaccttcaccagccccagcccgcttcactgcccggggtgggcgagtcttcactcccagaggggtgccatctcgccggggccgaggaggagggaggccccctcctcaagtttgcccaggctggagccctccagccaagtctctggctcccaagaaacctcccacaggccctttgccaccaagtaaggagcctttgaaagagaagttgatcccagggcctctgtcccctgtggcgcgcggaggcagcaatggaggtagcaatgtgggcatggaagatggggagcgaccccgaaggaggcgacatgggagggctcagcagcaggataaaccgcctcgtttccggaggctgaagcaggaacgggagaatgccgcaagggggtctgagggcaagccctccctaacccttccagcctccgctcctgcacctgaggaggccctcacaacagtcacagtggccccagcacctcgccgggcagctgccaagtctcctgatctgtcaaaccagaactcagaccaagccaatgaggaatgggagactgcatcagagagcagtgacttcaccagtgagcgccgaggggacaaagaggcacccccaccagtactgctgacacccaaggctgtgggaactcctgggggaggtggaggtggagccgtaccaggtatttcagccatgtcccgcggagatctgagccagagagccaaggatttgagtaaacggagcttctcaagtcagcggccaggcatggaacggcagaatcggcgccctggcccagggggcaaggctggcagcagtggcagcagcagtggaggaggcggtgggggtcctggaggaaggaccgggccaggacgaggcgacaagaggagctggccctctcccaagaaccgaagtcgtcctccagaggagcgtcccccggggcttcccctgcctcccccacctcccagcagttctgctgtcttccgcctggaccaagttatccacagcaaccctgctggcatccaacaggctctggcccagcttagtagccgtcaagggagtgtaactgcaccagggggtcatccaaggcacaagcctgggcctccccaagcccctcagggcccctctcctaggcccccaacccgatacgagccccagagggtcaacagcggcctcagttctgacccccactttgaggagccggggccaatggtgagaggggtgggtgggactcctcgggactctgccggggttagtccctttccccctaaacgtcgggagcggcctcccagaaaaccagagctgctacaggaggaatctttgccacctcctcatagctctggattcttgggctctaagcctgagggcccaggccctcaggcagagtccagagatacaggcacagaggccctgacccctcacatctggaaccgtttacatactgccactagccgaaagagttaccggcccagctccatggagccttggatggagcccctgagtccttttgaggatgtggctggcacagaaatgagtcagtctgacagtggggtggacctgagtggggattctcaggtgtcatcaggtccctgcagccagcgaagttcccctgatggaggactcaagggggcagcagagggaccccccaagaggcctggaggctcctcacccctgaatgctgttccttgtgagggtccacctggctctgaacctcctaggagaccaccacctgccccccacgatggggacagaaaggagctgccccgggagcagcctctgccccctggccccattggcacagaacgatcacagcatacagaccgaggcacagagcctggccccattcggccatcccatcgacctggtcccccagtccagtttggcactagtgacaaggactcagacttacgcctagtggtaggagacagcttgaaagcagagaaggagctaacagcatcagtcactgaggccattcctgtatcacgagactgggagctgcttcccagtgctgctgcctctgctgagccacaatccaagaacctggattctgggcactgtgtcccggagcccagctcctcaggccagcgcctgtatcctgaggttttctatggcagtgctgggccttccagttctcagatctctgggggagccatggactctcaattacatccaaacagtggaggcttccgccctgggacaccctcactgcacccttacagatcacagcccctatacctaccccccggcccagcccctccctcagcactgctctctggggtagctctcaagggccagtttctggatttctccacaatgcaagctacagagctggggaagttgccggctggaggagttctctaccctccaccttccttcctctactctccggctttctgccccagtcctttgcctgacacatcgttgcttcaggtacgccaggatctgccatccccttcggatttttattctactcctctgcagcctggtggccaaagtggctttctcccttcaggggctcctgcccagcagatgcttctacccatggtagactcacagctgcctgtggtgaactttggctccctgccgccagcaccacctcctgccccacctcccctttctctgttacctgtgggccctgctctgcagccccccagcctggctgtgcggcccccacctgctcctgctactcgggtgctgccttcacctgccaggcccttccccgctagcttggggcgagcagagctgcatccagtggaactaaagccgttccaggattatcaaaaactgagcagcaaccttgggggacctggatcatcacggactcccccaactggaaggtccttctctggcctcaattcccgtctcaaggccacgccttccacctacagtggagtcttccgcacccagcgcgtcgacctttaccagcaggcctccccaccagatgccctgcgctggatacctaagccttgggagcggacagggctgccacctcgagaagggccctcccgacgggcagaggagcctgggtcccgaggggacaaggagcctgggttgcccccaccccgctgagggagttcctcttgccccctacccccggggcttgtatatagattataaatatataagggggaaaggggtgggcggggaggggttgtggggctggggcctcacttcccctcctcccccttcccctggtcccctgtccctggggctgtttgttaaaaaagagtaataaaaggattt

SEQ ID NO: 748 - protein, 2157 aa, Homo sapiens
MSDRSGPTAKGKDGKKYSSLNLFDTYKGKSLEIQKPAVAPRHGLQSLGKVAIARRMPPPANLPSLKAENKGNDPNVSLVPKDGTGWASKQEQSDPKSSDASTAQPPESQPLPASQTPASNQPKRPPAAPENTPLVPSGVKSWAQASVTHGAHGDGGRASSLLSRFSREEFPTLQAAGDQDKAAKERESAEQSSGPGPSLRPQNSTTWRDGGGRGPDELEGPDSKLHHGHDPRGGLQPSGPPQFPPYRGMMPPFMYPPYLPFPPPYGPQGPYRYPTPDGPSRFPRVAGPRGSGPPMRLVEPVGRPSILKEDNLKEFDQLDQENDDGWAGAHEEVDYTEKLKFSDEEDGRDSDEEGAEGHRDSQSASGEERPPEADGKKGNSPNSEPPTPKTAWAETSRPPETEPGPPAPKPPLPPPHRGPAGNWGPPGDYPDRGGPPCKPPAPEDEDEAWRQRRKQSSSEISLAVERARRRREEEERRMQEERRAACAEKLKRLDEKFGAPDKRLKAEPAAPPAAPSTPAPPPAVPKELPAPPAPPPASAPTPEKEPEEPAQAPPAQSTPTPGVAAAPTLVSGGGSTSSTSSGSFEASPVEPQLPSKEGPEPPEEVPPPTTPPVPKVEPKGDGIGPTRQPPSQGLGYPKYQKSLPPRFQRQQQEQLLKQQQQHQWQQHQQGSAPPTPVPPSPPQPVTLGAVPAPQAPPPPPKALYPGALGRPPPMPPMNFDPRWMMIPPYVDPRLLQGRPPLDFYPPGVHPSGLVPRERSDSGGSSSEPFDRHAPAMLRERGTPPVDPKLAWVGDVFTATPAEPRPLTSPLRQAADEDDKGMRSETPPVPPPPPYLASYPGFPENGAPGPPISRFPLEEPGPRPLPWPPGSDEVAKIQTPPPKKEPPKEETAQLTGPEAGRKPARGVGSGGQGPPPPRRESRTETRWGPRPGSSRRGIPPEEPGAPPRRAGPIKKPPPPTKVEELPPKPLEQGDETPKPPKPDPLKITKGKLGGPKETPPNGNLSPAPRLRRDYSYERVGPTSCRGRGRGEYFARGRGFRGTYGGRGRGARSREFRSYREFRGDDGRGGGTGGPNHPPAPRGRTASETRSEGSEYEEIPKRRRQRGSETGSETHESDLAPSDKEAPTPKEGTLTQVPLAPPPPGAPPSPAPARFTARGGRVFTPRGVPSRRGRGGGRPPPQVCPGWSPPAKSLAPKKPPTGPLPPSKEPLKEKLIPGPLSPVARGGSNGGSNVGMEDGERPRRRRHGRAQQQDKPPRFRRLKQERENAARGSEGKPSLTLPASAPAPEEALTTVTVAPAPRRAAAKSPDLSNQNSDQANEEWETASESSDFTSERRGDKEAPPPVLLTPKAVGTPGGGGGGAVPGISAMSRGDLSQRAKDLSKRSFSSQRPGMERQNRRPGPGGKAGSSGSSSGGGGGGPGGRTGPGRGDKRSWPSPKNRSRPPEERPPGLPLPPPPPSSSAVFRLDQVIHSNPAGIQQALAQLSSRQGSVTAPGGHPRHKPGPPQAPQGPSPRPPTRYEPQRVNSGLSSDPHFEEPGPMVRGVGGTPRDSAGVSPFPPKRRERPPRKPELLQEESLPPPHSSGFLGSKPEGPGPQAESRDTGTEALTPHIWNRLHTATSRKSYRPSSMEPWMEPLSPFEDVAGTEMSQSDSGVDLSGDSQVSSGPCSQRSSPDGGLKGAAEGPPKRPGGSSPLNAVPCEGPPGSEPPRRPPPAPHDGDRKELPREQPLPPGPIGTERSQHTDRGTEPGPIRPSHRPGPPVQFGTSDKDSDLRLVVGDSLKAEKELTASVTEAIPVSRDWELLPSAAASAEPQSKNLDSGHCVPEPSSSGQRLYPEVFYGSAGPSSSQISGGAMDSQLHPNSGGFRPGTPSLHPYRSQPLYLPPGPAPPSALLSGVALKGQFLDFSTMQATELGKLPAGGVLYPPPSFLYSPAFCPSPLPDTSLLQVRQDLPSPSDFYSTPLQPGGQSGFLPSGAPAQQMLLPMVDSQLPVVNFGSLPPAPPPAPPPLSLLPVGPALQPPSLAVRPPPAPATRVLPSPARPFPASLGRAELHPVELKPFQDYQKLSSNLGGPGSSRTPPTGRSFSGLNSRLKATPSTYSGVFRTQRVDLYQQASPPDALRWIPKPWERTGLPPREGPSRRAEEPGSRGDKEPGLPPPR

SEQ ID NO: 749 - DNA, 801 bp, Homo sapiens
caccgcaccctcggactgccccaaggcccccgccgccgctccagcgccgcgcagccaccgccgccgccgccgcctctccttagtcgccgccatgacgaccgcgtccacctcgcaggtgcgccagaactaccaccaggactcagaggccgccatcaaccgccagatcaacctggagctctacgcctcctacgtttacctgtccatgtcttactactttgaccgcgatgatgtggctttgaagaactttgccaaatactttcttcaccaatctcatgaggagagggaacatgctgagaaactgatgaagctgcagaaccaacgaggtggccgaatcttccttcaggatatcaagaaaccagactgtgatgactgggagagcgggctgaatgcaatggagtgtgcattacatttggaaaaaaatgtgaatcagtcactactggaactgcacaaactggccactgacaaaaatgacccccatttgtgtgacttcattgagacacattacctgaatgagcaggtgaaagccatcaaagaattgggtgaccacgtgaccaacttgcgcaagatgggagcgcccgaatctggcttggcggaatatctctttgacaagcacacctgggagacagtgataatgaaagctaagcctcgggctaatttcccatagccgtggggtgacttcctggtcaccaaggcagtgcatgcatgttggggtttcctttaccttttctataagttgtaccaaaacatccacttaagttctttgatttgtaccattccttcaaataaagaaatttggtaccc

SEQ ID NO: 750 - protein, 190 aa, Homo sapiens
MTTASTSQVRQNYHQDSEAAINRQINLELYASYVYLSMSYYFDRDDVALKNFAKYFLHQSHEEREHAEKLMKLQNQRGGRIFLQDIKKPDCDDWESGLNAMECALHLEKNVNQSLLELHKLATDKNDPHLCDFIETHYLNEQVKAIKELGDHVTNLRKMGAPESGLAEYLFDKHTWETVIMKAKPRANFP

SEQ ID NO: 751 - DNA, 2215 bp, Homo sapiens
agcttttctcttctgtcaaccccacacgcctttggcacaatgaagtgggtaacctttatttcccttctttttctctttagctcggcttattccaggggtgtgtttcgtcgagatgcacacaagagtgaggttgctcatcggtttaaagatttgggagaagaaaatttcaaagccttggtgttgattgcctttgctcagtatcttcagcagtgtccatttgaagatcatgtaaaattagtgaatgaagtaactgaatttgcaaaaacatgtgttgctgatgagtcagctgaaaattgtgacaaatcacttcataccctttttggagacaaattatgcacagttgcaactcttcgtgaaacctatggtgaaatggctgactgctgtgcaaaacaagaacctgagagaaatgaatgcttcttgcaacacaaagatgacaacccaaacctcccccgattggtgagaccagaggttgatgtgatgtgcactgcttttcatgacaatgaagagacatttttgaaaaaatacttatatgaaattgccagaagacatccttacttttatgccccggaactccttttctttgctaaaaggtataaagctgcttttacagaatgttgccaagctgctgataaagctgcctgcctgttgccaaagctcgatgaacttcgggatgaagggaaggcttcgtctgccaaacagagactcaagtgtgccagtctccaaaaatttggagaaagagctttcaaagcatgggcagtagctcgcctgagccagagatttcccaaagctgagtttgcagaagtttccaagttagtgacagatcttaccaaagtccacacggaatgctgccatggagatctgcttgaatgtgctgatgacagggcggaccttgccaagtatatctgtgaaaatcaagattcgatctccagtaaactgaaggaatgctgtgaaaaacctctgttggaaaaatcccactgcattgccgaagtggaaaatgatgagatgcctgctgacttgccttcattagctgctgattttgttgaaagtaaggatgtttgcaaaaactatgctgaggcaaaggatgtcttcctgggcatgtttttgtatgaatatgcaagaaggcatcctgattactctgtcgtgctgctgctgagacttgccaagacatatgaaaccactctagagaagtgctgtgccgctgcagatcctcatgaatgctatgccaaagtgttcgatgaatttaaacctcttgtggaagagcctcagaatttaatcaaacaaaattgtgagctttttgagcagcttggagagtacaaattccagaatgcgctattagttcgttacaccaagaaagtaccccaagtgtcaactccaactcttgtagaggtctcaagaaacctaggaaaagtgggcagcaaatgttgtaaacatcctgaagcaaaaagaatgccctgtgcagaagactatctatccgtggtcctgaaccagttatgtgtgttgcatgagaaaacgccagtaagtgacagagtcaccaaatgctgcacagaatccttggtgaacaggcgaccatgcttttcagctctggaagtcgatgaaacatacgttcccaaagagtttaatgctgaaacattcaccttccatgcagatatatgcacactttctgagaaggagagacaaatcaagaaacaaactgcacttgttgagctcgtgaaacacaagcccaaggcaacaaaagagcaactgaaagctgttatggatgatttcgcagcttttgtagagaagtgctgcaaggctgacgataaggagacctgctttgccgaggagggtaaaaaacttgttgctgcaagtcaagctgccttaggcttataacatctacatttaaaagcatctcagcctaccatgagaataagagaaagaaaatgaagatcaaaagcttattcatctgttttctttttcgttggtgtaaagccaacaccctgtctaaaaaacataaatttctttaatcattttgcctcttttctctgtgcttcaattaataaaaaatggaaagaatctaatagagtggtacagcactgttatttttcaaagatgtgttgctatcctgaaaattctgtaggttctgtggaagttccagtgttctctcttattccacttcggtagaggatttctagtttctgtgggctaattaaataaatcactaatactcttctaagtt

SEQ ID NO: 752 - protein, 609 aa, Homo sapiens [sequence omitted]

SEQ ID NO: 753 - DNA, 704 bp, Homo sapiens
attactgcaggaaaaggtcccggagagctgagcagtcaagatgtgtgacttcaccgaagaccagaccgcagagttcaaggaggccttccagctgtttgaccgaacaggtgatggcaagatcctgtacagccagtgtggggatgtgatgagggccctgggccagaaccctaccaacgccgaggtgctcaaggtcctggggaaccccaagagtgatgagatgaatgtgaaggtgctggactttgagcactttctgcccatgctgcagacagtggccaagaacaaggaccagggcacctatgaggattatgtcgaaggacttcgggtgtttgacaaggaaggaaatggcaccgtcatgggtgctgaaatccggcatgttcttgtcacactgggtgagaagatgacagaggaagaagtagagatgctggtggcagggcatgaggacagcaatggttgtatcaactatgaagcgtttgtgaggcatatcctgtcggggtgacgggcccatggggcggagctcgtccgcatggtgctgaatggctgaggaccttcccagtctccccagagtccgtgcctttccctgtgtgaattttgtatctagcctaaagtttccctaggctttcttgtctcagcaactttcccatcttgtctctcttggatgatgtttgccgtcagcattcaccaaataaacttgctctctgggcctc

SEQ ID NO: 754 - protein, 151 aa, Homo sapiens
MCDFTEDQTAEFKEAFQLFDRTGDGKILYSQCGDVMRALGQNPTNAEVLKVLGNPKSDEMNVKVLDFEHFLPMLQTVAKNKDQGTYEDYVEGLRVFDKEGNGTVMGAEIRHVLVTLGEKMTEEEVEMLVAGHEDSNGCINYEAFVRHILSG

SEQ ID NO: 755 - DNA, 651 bp, Homo sapiens
ggaaaaggtcccggagagctgagcagtcaagatgtgtgacttcaccgaagaccagaccgcagagttcaaggaggccttccagctgtttgaccgaacaggtgatggcaagatcctgtacagccagtgtggggatgtgatgagggccctgggccagaaccctaccaacgccgaggtgctcaaggtcctggggaaccccaagagtgatgagatgaatgtgaaggtgctggactttgagcactttctgcccatgctgcagacagtggccaagaacaaggaccagggcacctatgaggattatgtcgaaggacttcgggtgtttgacaaggaaggaaatggcaccgtcatgggtgctgaaatccggcatgttcttgtcacactgggtgagaagatgacagaggaagaagtagagatgctggtggcagggcatgaggacagcaatggttgtatcaactatgaagagctcgtccgcatggtgctgaatggctgaggaccttcccagtctccccagagtccgtgcctttccctgtgtgaattttgtatctagcctaaagtttccctaggctttcttgtctcagcaactttcccatcttgtctctcttggatgatgtttgccgtcagcattcaccaaataaacttgctctctgggaaaaa

SEQ ID NO: 756 - protein, 116 aa, Homo sapiens
MRALGQNPTNAEVLKVLGNPKSDEMNVKVLDFEHFLPMLQTVAKNKDQGTYEDYVEGLRVFDKEGNGTVMGAEIRHVLVTLGEKMTEEEVEMLVAGHEDSNGCINYEELVRMVLNG

SEQ ID NO: 757 - DNA, 674 bp, Homo sapiens
gcagtcaagatgtgtgacttcaccgaagaccagaccgcagagttcaaggaggccttccagctgtttgaccgaacaggtgatggcaagatcctgtacagccagtgtggggatgtgatgagggccctgggccagaaccctaccaacgccgaggtgctcaaggtcctggggaaccccaagagtgatgagatgaatgtgaaggtgctggactttgagcactttctgcccatgctgcagacagtggccaagaacaaggaccagggcacctatgaggattatgtcgaaggacttcgggtgtttgacaaggaaggaaatggcaccgtcatgggtgctgaaatccggcatgttcttgtcacactgggtgagaagatgacagaggaagaagtagagatgctggtggcagggcatgaggacagcaatggttgtatcaactatgaagcgtttgtgaggcatatcctgtcggggtgacgggcccatggggcggagctcgtccgcatggtgctgaatggctgaggaccttcccagtctccccagagtccgtgcctttccctgtgtgaattttgtatctagcctaaagtttccctaggctttcttgtctcagcaactttcccatcttgtctctcttggatgatgtttgccgtcagcattcaccaaataaacttgctctctgggaaaaa

SEQ ID NO: 758 - protein, 116 aa, Homo sapiens
MRALGQNPTNAEVLKVLGNPKSDEMNVKVLDFEHFLPMLQTVAKNKDQGTYEDYVEGLRVFDKEGNGTVMGAEIRHVLVTLGEKMTEEEVEMLVAGHEDSNGCINYEAFVRHILSG

SEQ ID NO: 759 - DNA, 717 bp, Homo sapiens
attactgcaggaaaaggtcccggagagctgagcagtcaagatgtgtgacttcaccgaagaccagaccgcagatctgatcccaagcactgagttcaaggaggccttccagctgtttgaccgaacaggtgatggcaagatcctgtacagccagtgtggggatgtgatgagggccctgggccagaaccctaccaacgccgaggtgctcaaggtcctggggaaccccaagagtgatgagatgaatgtgaaggtgctggactttgagcactttctgcccatgctgcagacagtggccaagaacaaggaccagggcacctatgaggattatgtcgaaggacttcgggtgtttgacaaggaaggaaatggcaccgtcatgggtgctgaaatccggcatgttcttgtcacactgggtgagaagatgacagaggaagaagtagagatgctggtggcagggcatgaggacagcaatggttgtatcaactatgaagcgtttgtgaggcatatcctgtcggggtgacgggcccatggggcgagctcgtccgcatggtgctgaatggctgaggaccttcccagtctccccagagtccgtgcctttccctgtgtgaattttgtatctagcctaaagtttccctaggctttcttgtctcagcaactttcccatcttgtctctcttggatgatgtttgccgtcagcattcaccaaataaacttgctctctggg

SEQ ID NO: 760 - protein, 157 aa, Homo sapiens
MCDFTEDQTADLIPSTEFKEAFQLFDRTGDGKILYSQCGDVMRALGQNPTNAEVLKVLGNPKSDEMNVKVLDFEHFLPMLQTVAKNKDQGTYEDYVEGLRVFDKEGNGTVMGAEIRHVLVTLGEKMTEEEVEMLVAGHEDSNGCINYEAFVRHILSG

SEQ ID NO: 761 - DNA, 1053 bp, Homo sapiens
gaaaaagctccctggaaaaactctgttgccacatgcacgtgccctgttactcctccagccagccagtgctgccagcattttattgtgtaaaagtccaaataaataagggcctgcatgcaacctttatcttcaaaaactaggttttatatgtaaaatgtgacttgggaaatgattctgtttattaactggctgggatttttcatttctatgaaagtttcaaacatctccagtactttataaaatcccaacaattgctgtaagtcagcactttggtccactcagcccacccagcccacttgcaactctgactcttcactgaatcatatttgggaagtttgggtagggtgaggctatcttcttcaagattattttctcatatgtctgtctgtcaccttgtaaaccatgagactcctgggtatttgcatgtaacttctttgaggaagttaccaccatctctgatatagacacactttttgagttgcagtttctgttagaattttttggagactaacttgccaattctgtgaatgttattgaatatttaaaaagctgggtctgtaatgggaggcattttattagctgttgtgattgggtaacatgtccccttagatttcctgatttaaaattatacaaaattactatttttgataaaataaaggaacacctacagaaaattaagtttctaagatgtttctatacttcattagaaaagattttattactattacttatggttattggtgattaacacttaatgcgtctcctctgattttgtgttccatgaggtgcttggaacatttggagtgctctgtgcgagggacatacagtgatataggaaatttaaaaattaaaataatacccaaaacccactttatcagatatggtattgtgatggttaatattatgtgtcaacttggtgaggctatggcgcccatgtgtttggtcaaacactagcctagatgttgctgtgaatatattttgtagatgtgattaacatttacaatcagttgattttaagtaaagcagattctcatccaaaaaaaaaaaaaaaaa

SEQ ID NO: 762 - DNA, 2599 bp, Homo sapiens
aaatccgagcctcgcgtgggctcctggcccccgacggacaccaccaggcccacggagcccaccatgccgcgcccggcccccgcgcgccgcctcccgggactcctcctgctgctctggccgctgctgctgctgccctccgccgcccccgaccccgtggcccgcccgggcttccggaggctggagacccgaggtcccgggggcagccctggacgccgcccctctcctgcggctcccgacggcgcgcccgcttccgggaccagcgagcctggccgcgcccgcggtgcaggtgtttgcaagagcagacccttggacctggtgtttatcattgatagttctcgtagcgtacggcccctggaattcaccaaagtgaaaacttttgtctcccggataatcgacactctggacattgggccagccgacacgcgggtggcagtggtgaactatgctagcactgtgaagatcgagttccaactccaggcctacacagataagcagtccctgaagcaggctgtgggtcgaatcacacccttgtcaacaggcaccatgtcaggcctagccatccagacagcaatggacgaagccttcacagtggaggcaggggctcgagagccctcttctaacatccctaaggtggccatcattgttacagatgggaggccccaggaccaggtgaatgaagtggcggctcgggcccaagcatctggtattgagctctatgctgtgggcgtggaccgggcagacatggcgtccctcaagatgatggccagtgagcccctagaggagcatgttttctacgtggagacctatggggtcattgagaaactttcctctagattccaggaaaccttctgtgcgctggacccctgtgtgcttggaacacaccagtgccagcacgtctgcatcagtgatggggaaggcaagcaccactgtgagtgtagccaaggatacaccttgaatgccgacaagaaaacgtgttcagctcttgataggtgtgctcttaacacccacggatgtgagcacatctgtgtgaatgacagaagtggctcttatcattgtgagtgctatgaaggttataccttgaatgaagacaggaaaacttgttcagctcaagataaatgtgctttgggtacccatgggtgtcagcacatttgtgtgaatgacagaacagggtcccatcattgtgaatgctatgagggctacactctgaatgcagataaaaaaacatgttcagtccgtgacaagtgtgccctaggctctcatggttgccagcacatttgtgtgagtgatggggccgcatcctaccactgtgattgctatcctggctacaccttaaatgaggacaagaaaacatgttcagccactgaggaagcacgaagacttgtttccactgaagatgcttgtggatgtgaagctacactggcattccaggacaaggtcagctcgtatcttcaaagactgaacactaaacttgatgacattttggagaagttgaaaataaatgaatatggacaaatacatcgttaaattgctccaatttctcacctgaaaatgtggacagcttggtgtacttaatactcatgcattcttttgcacacctgttattgccaatgttcctgctaataatttgccattatctgtattaatgcttgaatattactggataaattgtatgaagatcttctgcagaatcagcatgatttttccaaggaaatacatatgcagatacttattaagagcaaactttagtgtctctaagttatgactgtgaaatgattggtaggaaatagaatgaaaagtttagtgtttctttatctactaattgagccatttaatttttaaatgtttatattagataaccatattcacaatggaaactttaggtctagtttcttttgatagtatttataatataaatcaatcttattactgagagtgcaaattgtacaaggtatttacacatacaacttcatataactgagatgaatgtaattttgaactgtttaacactttttgttttttgcttattttgttggagtattattgaagatgtgatcaatagattgtaatacacatatctaaaaatagttaacacagatcaagtgaacattacattgccatttttaattcattctggtctttgaaagaaatgtactactaaagagcactagttgtgaatttagggtgttaaactttttaccaagtacaaaaatcccaaattcactttattattttgcttcaggatccaagtgacaaagttatatatttataaaattgctataaatcgacaaaatctaatgttgtctttttaatgttagtgatccacctgcctcagcctcccaaagtgctgggattacaggcttgaaagtctaacttttttttacttatatatttgatacatataattcttttggctttgaaacttgcaactttgagaacaaaacagtcctttaaattttgcactgctcaattctgtttttcgtttgcattgtctttaatataataaaagttattacctttacatattatcatgtctatttttgatgactcatcaattttgtctattaaagatatttctttaaattaaaaaaaaaaaaaaaaa

SEQ ID NO: 763 - protein, 486 aa, Homo sapiens
MPRPAPARRLPGLLLLLWPLLLLPSAAPDPVARPGFRRLETRGPGGSPGRRPSPAAPDGAPASGTSEPGRARGAGVCKSRPLDLVFIIDSSRSVRPLEFTKVKTFVSRIIDTLDIGPADTRVAVVNYASTVKIEFQLQAYTDKQSLKQAVGRITPLSTGTMSGLAIQTAMDEAFTVEAGAREPSSNIPKVAIIVTDGRPQDQVNEVAARAQASGIELYAVGVDRADMASLKMMASEPLEEHVFYVETYGVIEKLSSRFQETFCALDPCVLGTHQCQHVCISDGEGKHHCECSQGYTLNADKKTCSALDRCALNTHGCEHICVNDRSGSYHCECYEGYTLNEDRKTCSAQDKCALGTHGCQHICVNDRTGSHHCECYEGYTLNADKKTCSVRDKCALGSHGCQHICVSDGAASYHCDCYPGYTLNEDKKTCSATEEARRLVSTEDACGCEATLAFQDKVSSYLQRLNTKLDDILEKLKINEYGQIHR

SEQ ID NO: 764 - DNA, 1263 bp, Homo sapiens
ggcacgagaccttcagcgcctcggctccagcgccatggcgccctccaggaagttcttcgttgggggaaactggaagatgaacgggcggaagcagagtctgggggagctcatcggcactctgaacgcggccaaggtgccggccgacaccgaggtggtttgtgctccccctactgcctatatcgacttcgcccggcagaagctagatcccaagattgctgtggctgcgcagaactgctacaaagtgactaatggggcttttactggggagatcagccctggcatgatcaaagactgcggagccacgtgggtggtcctggggcactcagagagaaggcatgtctttggggagtcagatgagctgattgggcagaaagtggcccatgctctggcagagggactcggagtaatcgcctgcattggggagaagctagatgaaagggaagctggcatcactgagaaggttgttttcgagcagacaaaggtcatcgcagataacgtgaaggactggagcaaggtcgtcctggcctatgagcctgtgtgggccattggtactggcaagactgcaacaccccaacaggcccaggaagtacacgagaagctccgaggatggctgaagtccaacgtctctgatgcggtggctcagagcacccgtatcatttatggaggctctgtgactggggcaacctgcaaggagctggccagccagcctgatgtggatggcttccttgtgggtggtgcttccctcaagcccgaattcgtggacatcatcaatgccaaacaatgagccccatccatcttccctacccttcctgccaagccagggactaagcagcccagaagcccagtaactgccctttccctgcatatgcttctgatggtgtcatctgctccttcctgtggcctcatccaaactgtatcttcctttactgtttatatcttcaccctgtaatggttgggaccaggccaatcccttctccacttactataatggttggaactaaacgtcaccaaggtggcttctccttggctgagagatggaaggcgtggtgggatttgctcctgggttccctaggccctagtgagggcagaagagaaaccatcctctcccttcttacaccgtgaggccaagatcccctcagaaggcaggagtgctgccctctcccatggtgcccgtgcctctgtgctgtgtatgtgaaccacccatgtgagggaataaacctggcactaggaaaaaaaaaaaaaaaaaaaaaaaaaaaaaaaaaa

SEQ ID NO: 765 - protein, 249 aa, Homo sapiens
MAPSRKFFVGGNWKMNGRKQSLGELIGTLNAAKVPADTEVVCAPPTAYIDFARQKLDPKIAVAAQNCYKVTNGAFTGEISPGMIKDCGATWVVLGHSERRHVFGESDELIGQKVAHALAEGLGVIACIGEKLDEREAGITEKVVFEQTKVIADNVKDWSKVVLAYEPVWAIGTGKTATPQQAQEVHEKLRGWLKSNVSDAVAQSTRIIYGGSVTGATCKELASQPDVDGFLVGGASLKPEFVDIINAKQ

SEQ ID NO: 766 - DNA, 5927 bp, Homo sapiens
ccaggcggcgttgcggccccggccccggctccctgcgccgccgccgccgccgccgccgccgccgccgccgccgccgccagcgctagcgccagcagccgggcccgatcacccgccgcccggtgcccgccgccgcccgcgccagcaaccgggcccgatcacccgccgcccggtgcccgccgccgcccgcgccaccggcatggcgctccggggcttctgcagcgccgatggctccgacccgctctgggactggaatgtcacgtggaataccagcaaccccgacttcaccaagtgctttcagaacacggtcctcgtgtgggtgccttgtttttacctctgggcctgtttccccttctacttcctctatctctcccgacatgaccgaggctacattcagatgacacctctcaacaaaaccaaaactgccttgggatttttgctgtggatcgtctgctgggcagacctcttctactctttctgggaaagaagtcggggcatattcctggccccagtgtttctggtcagcccaactctcttgggcatcaccacgctgcttgctacctttttaattcagctggagaggaggaagggagttcagtcttcagggatcatgctcactttctggctggtagccctagtgtgtgccctagccatcctgagatccaaaattatgacagccttaaaagaggatgcccaggtggacctgtttcgtgacatcactttctacgtctacttttccctcttactcattcagctcgtcttgtcctgtttctcagatcgctcacccctgttctcggaaaccatccacgaccctaatccctgcccagagtccagcgcttccttcctgtcgaggatcaccttctggtggatcacagggttgattgtccggggctaccgccagcccctggagggcagtgacctctggtccttaaacaaggaggacacgtcggaacaagtcgtgcctgttttggtaaagaactggaagaaggaatgcgccaagactaggaagcagccggtgaaggttgtgtactcctccaaggatcctgcccagccgaaagagagttccaaggtggatgcgaatgaggaggtggaggctttgatcgtcaagtccccacagaaggagtggaacccctctctgtttaaggtgttatacaagacctttgggccctacttcctcatgagcttcttcttcaaggccatccacgacctgatgatgttttccgggccgcagatcttaaagttgctcatcaagttcgtgaatgacacgaaggccccagactggcagggctacttctacaccgtgctgctgtttgtcactgcctgcctgcagaccctcgtgctgcaccagtacttccacatctgcttcgtcagtggcatgaggatcaagaccgctgtcattggggctgtctatcggaaggccctggtgatcaccaattcagccagaaaatcctccacggtcggggagattgtcaacctcatgtctgtggacgctcagaggttcatggacttggccacgtacattaacatgatctggtcagcccccctgcaagtcatccttgctctctacctcctgtggctgaatctgggcccttccgtcctggctggagtggcggtgatggtcctcatggtgcccgtcaatgctgtgatggcgatgaagaccaagacgtatcaggtggcccacatgaagagcaaagacaatcggatcaagctgatgaacgaaattctcaatgggatcaaagtgctaaagctttatgcctgggagctggcattcaaggacaaggtgctggccatcaggcaggaggagctgaaggtgctgaagaagtctgcctacctgtcagccgtgggcaccttcacctgggtctgcacgccctttctggtggccttgtgcacatttgccgtctacgtgaccattgacgagaacaacatcctggatgcccagacagccttcgtgtctttggccttgttcaacatcctccggtttcccctgaacattctccccatggtcatcagcagcatcgtgcaggcgagtgtctccctcaaacgcctgaggatctttctctcccatgaggagctggaacctgacagcatcgagcgacggcctgtcaaagacggcgggggcacgaacagcatcaccgtgaggaatgccacattcacctgggccaggagcgaccctcccacactgaatggcatcaccttctccatccccgaaggtgctttggtggccgtggtgggccaggtgggctgcggaaagtcgtccctgctctcagccctcttggctgagatggacaaagtggaggggcacgtggctatcaagggctccgtggcctatgtgccacagcaggcctggattcagaatgattctctccgagaaaacatcctttttggatgtcagctggaggaaccatattacaggtccgtgatacaggcctgtgccctcctcccagacctggaaatcctgcccagtggggatcggacagagattggcgagaagggcgtgaacctgtctgggggccagaagcagcgcgtgagcctggcccgggccgtgtactccaacgctgacatttacctcttcgatgatcccctctcagcagtggatgcccatgtgggaaaacacatctttgaaaatgtgattggccccaaggggatgctgaagaacaagacgcggatcttggtcacgcacagcatgagctacttgccgcaggtggacgtcatcatcgtcatgagtggcggcaagatctctgagatgggctcctaccaggagctgctggctcgagacggcgccttcgctgagttcctgcgtacctatgccagcacagagcaggagcaggatgcagaggagaacggggtcacgggcgtcagcggtccagggaaggaagcaaagcaaatggagaatggcatgctggtgacggacagtgcagggaagcaactgcagagacagctcagcagctcctcctcctatagtggggacatcagcaggcaccacaacagcaccgcagaactgcagaaagctgaggccaagaaggaggagacctggaagctgatggaggctgacaaggcgcagacagggcaggtcaagctttccgtgtactgggactacatgaaggccatcggactcttcatctccttcctcagcatcttccttttcatgtgtaaccatgtgtccgcgctggcttccaactattggctcagcctctggactgatgaccccatcgtcaacgggactcaggagcacacgaaagtccggctgagcgtctatggagccctgggcatttcacaagggatcgccgtgtttggctactccatggccgtgtccatcggggggatcttggcttcccgctgtctgcacgtggacctgctgcacagcatcctgcggtcacccatgagcttctttgagcggacccccagtgggaacctggtgaaccgcttctccaaggagctggacacagtggactccatgatcccggaggtcatcaagatgttcatgggctccctgttcaacgtcattggtgcctgcatcgttatcctgctggccacgcccatcgccgccatcatcatcccgccccttggcctcatctacttcttcgtccagaggttctacgtggcttcctcccggcagctgaagcgcctcgagtcggtcagccgctccccggtctattcccatttcaacgagaccttgctgggggtcagcgtcattcgagccttcgaggagcaggagcgcttcatccaccagagtgacctgaaggtggacgagaaccagaaggcctattaccccagcatcgtggccaacaggtggctggccgtgcggctggagtgtgtgggcaactgcatcgttctgtttgctgccctgtttgcggtgatctccaggcacagcctcagtgctggcttggtgggcctctcagtgtcttactcattgcaggtcaccacgtacttgaactggctggttcggatgtcatctgaaatggaaaccaacatcgtggccgtggagaggctcaaggagtattcagagactgagaaggaggcgccctggcaaatccaggagacagctccgcccagcagctggccccaggtgggccgagtggaattccggaactactgcctgcgctaccgagaggacctggacttcgttctcaggcacatcaatgtcacgatcaatgggggagaaaaggtcggcatcgtggggcggacgggagctgggaagtcgtccctgaccctgggcttatttcggatcaacgagtctgccgaaggagagatcatcatcgatggcatcaacatcgccaagatcggcctgcacgacctccgcttcaagatcaccatcatcccccaggaccctgttttgttttcgggttccctccgaatgaacctggacccattcagccagtactcggatgaagaagtctggacgtccctggagctggcccacctgaaggacttcgtgtcagcccttcctgacaagctagaccatgaatgtgcagaaggcggggagaacctcagtgtcgggcagcgccagcttgtgtgcctagcccgggccctgctgaggaagacgaagatccttgtgttggatgaggccacggcagccgtggacctggaaacggacgacctcatccagtccaccatccggacacagttcgaggactgcaccgtcctcaccatcgcccaccggctcaacaccatcatggactacacaagggtgatcgtcttggacaaaggagaaatccaggagtacggcgccccatcggacctcctgcagcagagaggtcttttctacagcatggccaaagacgccggcttggtgtgagccccagagctggcatatctggtcagaactgcagggcctatatgccagcgcccagggaggagtcagtacccctggtaaaccaagcctcccacactgaaaccaaaacataaaaaccaaacccagacaaccaaaacatattcaaagcagcagccaccgccatccggtcccctgcctggaactggctgtgaagacccaggagagacagagatgcgaaccacccaaaacacgcacaccctgcccctggtgccctgagacagacacacagcctcacgcccccaggaatgcaagtggtttcctggtgcttcccacggaggagttttggcagccagacttctggaggaattggttgtatagaagatcctagtgaccaaattcagcctactgcctcggatctctccagccgaagtctgtggactgcaagtctttgagatgcttctggctcccatcacctctaacatccttgtctgggtctaccaggaacgcttcatttccttggggctgcagttttgtggttgaggggcctggagaaaatcattttctccccttggcagtgtcccagggccctggatggtcctcttaccaacatctggtcttccaggcactcaaaagctgggaaccagcatctcagcgccagctctaccagttctcgttttgggccagaggcagcctctgcactcccacgcctgtcctcctggaagggacctggttggactaacggctaacctggacctggaactgtagggccaggggattgtctcagggccgacgttccacctggggcttccctccccacccaccccgactccaggctttcccttttttcttttgttcaacattgtaagaacaatcaatgctgttattactgatcccaccatgattgatgtggggtaaatattaaggagatggcctcatgggaatttgaccttgactagaaatagagactgagagtgagcaaccagctggaaggtactatgccagtcctagcagaaaaatgtgttaggggcctggcccaaagcagtgttggttgcttacagtgttgattgattttgttcttttttcttaccacctcttttctttccctctcatggtacctgctcatggttatgaagctttcaaagtaaagaacacgaaatac

SEQ ID NO: 767 - protein, 1531 aa, Homo sapiens
MALRGFCSADGSDPLWDWNVTWNTSNPDFTKCFQNTVLVWVPCFYLWACFPFYFLYLSRHDRGYIQMTPLNKTKTALGFLLWIVCWADLFYSFWERSRGIFLAPVFLVSPTLLGITTLLATFLIQLERRKGVQSSGIMLTFWLVALVCALAILRSKIMTALKEDAQVDLFRDITFYVYFSLLLIQLVLSCFSDRSPLFSETIHDPNPCPESSASFLSRITFWWITGLIVRGYRQPLEGSDLWSLNKEDTSEQVVPVLVKNWKKECAKTRKQPVKVVYSSKDPAQPKESSKVDANEEVEALIVKSPQKEWNPSLFKVLYKTFGPYFLMSFFFKAIHDLMMFSGPQILKLLIKFVNDTKAPDWQGYFYTVLLFVTACLQTLVLHQYFHICFVSGMRIKTAVIGAVYRKALVITNSARKSSTVGEIVNLMSVDAQRFMDLATYINMIWSAPLQVILALYLLWLNLGPSVLAGVAVMVLMVPVNAVMAMKTKTYQVAHMKSKDNRIKLMNEILNGIKVLKLYAWELAFKDKVLAIRQEELKVLKKSAYLSAVGTFTWVCTPFLVALCTFAVYVTIDENNILDAQTAFVSLALFNILRFPLNILPMVISSIVQASVSLKRLRIFLSHEELEPDSIERRPVKDGGGTNSITVRNATFTWARSDPPTLNGITFSIPEGALVAVVGQVGCGKSSLLSALLAEMDKVEGHVAIKGSVAYVPQQAWIQNDSLRENILFGCQLEEPYYRSVIQACALLPDLEILPSGDRTEIGEKGVNLSGGQKQRVSLARAVYSNADIYLFDDPLSAVDAHVGKHIFENVIGPKGMLKNKTRILVTHSMSYLPQVDVIIVMSGGKISEMGSYQELLARDGAFAEFLRTYASTEQEQDAEENGVTGVSGPGKEAKQMENGMLVTDSAGKQLQRQLSSSSSYSGDISRHHNSTAELQKAEAKKEETWKLMEADKAQTGQVKLSVYWDYMKAIGLFISFLSIFLFMCNHVSALASNYWLSLWTDDPIVNGTQEHTKVRLSVYGALGISQGIAVFGYSMAVSIGGILASRCLHVDLLHSILRSPMSFFERTPSGNLVNRFSKELDTVDSMIPEVIKMFMGSLFNVIGACIVILLATPIAAIIIPPLGLIYFFVQRFYVASSRQLKRLESVSRSPVYSHFNETLLGVSVIRAFEEQERFIHQSDLKVDENQKAYYPSIVANRWLAVRLECVGNCIVLFAALFAVISRHSLSAGLVGLSVSYSLQVTTYLNWLVRMSSEMETNIVAVERLKEYSETEKEAPWQIQETAPPSSWPQVGRVEFRNYCLRYREDLDFVLRHINVTINGGEKVGIVGRTGAGKSSLTLGLFRINESAEGEIIIDGINIAKIGLHDLRFKITIIPQDPVLFSGSLRMNLDPFSQYSDEEVWTSLELAHLKDFVSALPDKLDHECAEGGENLSVGQRQLVCLARALLRKTKILVLDEATAAVDLETDDLIQSTIRTQFEDCTVLTIAHRLNTIMDYTRVIVLDKGEIQEYGAPSDLLQQRGLFYSMAKDAGLV

SEQ ID NO: 768 - DNA, 5749 bp, Homo sapiens
ccaggcggcgttgcggccccggccccggctccctgcgccgccgccgccgccgccgccgccgccgccgccgccgccgccagcgctagcgccagcagccgggcccgatcacccgccgcccggtgcccgccgccgcccgcgccagcaaccgggcccgatcacccgccgcccggtgcccgccgccgcccgcgccaccggcatggcgctccggggcttctgcagcgccgatggctccgacccgctctgggactggaatgtcacgtggaataccagcaaccccgacttcaccaagtgctttcagaacacggtcctcgtgtgggtgccttgtttttacctctgggcctgtttccccttctacttcctctatctctcccgacatgaccgaggctacattcagatgacacctctcaacaaaaccaaaactgccttgggatttttgctgtggatcgtctgctgggcagacctcttctactctttctgggaaagaagtcggggcatattcctggccccagtgtttctggtcagcccaactctcttgggcatcaccacgctgcttgctacctttttaattcagctggagaggaggaagggagttcagtcttcagggatcatgctcactttctggctggtagccctagtgtgtgccctagccatcctgagatccaaaattatgacagccttaaaagaggatgcccaggtggacctgtttcgtgacatcactttctacgtctacttttccctcttactcattcagctcgtcttgtcctgtttctcagatcgctcacccctgttctcggaaaccatccacgaccctaatccctgcccagagtccagcgcttccttcctgtcgaggatcaccttctggtggatcacagggttgattgtccggggctaccgccagcccctggagggcagtgacctctggtccttaaacaaggaggacacgtcggaacaagtcgtgcctgttttggtaaagaactggaagaaggaatgcgccaagactaggaagcagccggtgaaggttgtgtactcctccaaggatcctgcccagccgaaagagagttccaaggtggatgcgaatgaggaggtggaggctttgatcgtcaagtccccacagaaggagtggaacccctctctgtttaaggtgttatacaagacctttgggccctacttcctcatgagcttcttcttcaaggccatccacgacctgatgatgttttccgggccgcagatcttaaagttgctcatcaagttcgtgaatgacacgaaggccccagactggcagggctacttctacaccgtgctgctgtttgtcactgcctgcctgcagaccctcgtgctgcaccagtacttccacatctgcttcgtcagtggcatgaggatcaagaccgctgtcattggggctgtctatcggaaggccctggtgatcaccaattcagccagaaaatcctccacggtcggggagattgtcaacctcatgtctgtggacgctcagaggttcatggacttggccacgtacattaacatgatctggtcagcccccctgcaagtcatccttgctctctacctcctgtggctgaatctgggcccttccgtcctggctggagtggcggtgatggtcctcatggtgcccgtcaatgctgtgatggcgatgaagaccaagacgtatcaggtggcccacatgaagagcaaagacaatcggatcaagctgatgaacgaaattctcaatgggatcaaagtgctaaagctttatgcctgggagctggcattcaaggacaaggtgctggccatcaggcaggaggagctgaaggtgctgaagaagtctgcctacctgtcagccgtgggcaccttcacctgggtctgcacgccctttctggtggccttgtgcacatttgccgtctacgtgaccattgacgagaacaacatcctggatgcccagacagccttcgtgtctttggccttgttcaacatcctccggtttcccctgaacattctccccatggtcatcagcagcatcgtgcaggcgagtgtctccctcaaacgcctgaggatctttctctcccatgaggagctggaacctgacagcatcgagcgacggcctgtcaaagacggcgggggcacgaacagcatcaccgtgaggaatgccacattcacctgggccaggagcgaccctcccacactgaatggcatcaccttctccatccccgaaggtgctttggtggccgtggtgggccaggtgggctgcggaaagtcgtccctgctctcagccctcttggctgagatggacaaagtggaggggcacgtggctatcaagggcgtgaacctgtctgggggccagaagcagcgcgtgagcctggcccgggccgtgtactccaacgctgacatttacctcttcgatgatcccctctcagcagtggatgcccatgtgggaaaacacatctttgaaaatgtgattggccccaaggggatgctgaagaacaagacgcggatcttggtcacgcacagcatgagctacttgccgcaggtggacgtcatcatcgtcatgagtggcggcaagatctctgagatgggctcctaccaggagctgctggctcgagacggcgccttcgctgagttcctgcgtacctatgccagcacagagcaggagcaggatgcagaggagaacggggtcacgggcgtcagcggtccagggaaggaagcaaagcaaatggagaatggcatgctggtgacggacagtgcagggaagcaactgcagagacagctcagcagctcctcctcctatagtggggacatcagcaggcaccacaacagcaccgcagaactgcagaaagctgaggccaagaaggaggagacctggaagctgatggaggctgacaaggcgcagacagggcaggtcaagctttccgtgtactgggactacatgaaggccatcggactcttcatctccttcctcagcatcttccttttcatgtgtaaccatgtgtccgcgctggcttccaactattggctcagcctctggactgatgaccccatcgtcaacgggactcaggagcacacgaaagtccggctgagcgtctatggagccctgggcatttcacaagggatcgccgtgtttggctactccatggccgtgtccatcggggggatcttggcttcccgctgtctgcacgtggacctgctgcacagcatcctgcggtcacccatgagcttctttgagcggacccccagtgggaacctggtgaaccgcttctccaaggagctggacacagtggactccatgatcccggaggtcatcaagatgttcatgggctccctgttcaacgtcattggtgcctgcatcgttatcctgctggccacgcccatcgccgccatcatcatcccgccccttggcctcatctacttcttcgtccagaggttctacgtggcttcctcccggcagctgaagcgcctcgagtcggtcagccgctccccggtctattcccatttcaacgagaccttgctgggggtcagcgtcattcgagccttcgaggagcaggagcgcttcatccaccagagtgacctgaaggtggacgagaaccagaaggcctattaccccagcatcgtggccaacaggtggctggccgtgcggctggagtgtgtgggcaactgcatcgttctgtttgctgccctgtttgcggtgatctccaggcacagcctcagtgctggcttggtgggcctctcagtgtcttactcattgcaggtcaccacgtacttgaactggctggttcggatgtcatctgaaatggaaaccaacatcgtggccgtggagaggctcaaggagtattcagagactgagaaggaggcgccctggcaaatccaggagacagctccgcccagcagctggccccaggtgggccgagtggaattccggaactactgcctgcgctaccgagaggacctggacttcgttctcaggcacatcaatgtcacgatcaatgggggagaaaaggtcggcatcgtggggcggacgggagctgggaagtcgtccctgaccctgggcttatttcggatcaacgagtctgccgaaggagagatcatcatcgatggcatcaacatcgccaagatcggcctgcacgacctccgcttcaagatcaccatcatcccccaggaccctgttttgttttcgggttccctccgaatgaacctggacccattcagccagtactcggatgaagaagtctggacgtccctggagctggcccacctgaaggacttcgtgtcagcccttcctgacaagctagaccatgaatgtgcagaaggcggggagaacctcagtgtcgggcagcgccagcttgtgtgcctagcccgggccctgctgaggaagacgaagatccttgtgttggatgaggccacggcagccgtggacctggaaacggacgacctcatccagtccaccatccggacacagttcgaggactgcaccgtcctcaccatcgcccaccggctcaacaccatcatggactacacaagggtgatcgtcttggacaaaggagaaatccaggagtacggcgccccatcggacctcctgcagcagagaggtcttttctacagcatggccaaagacgccggcttggtgtgagccccagagctggcatatctggtcagaactgcagggcctatatgccagcgcccagggaggagtcagtacccctggtaaaccaagcctcccacactgaaaccaaaacataaaaaccaaacccagacaaccaaaacatattcaaagcagcagccaccgccatccggtcccctgcctggaactggctgtgaagacccaggagagacagagatgcgaaccacccaaaacacgcacaccctgcccctggtgccctgagacagacacacagcctcacgcccccaggaatgcaagtggtttcctggtgcttcccacggaggagttttggcagccagacttctggaggaattggttgtatagaagatcctagtgaccaaattcagcctactgcctcggatctctccagccgaagtctgtggactgcaagtctttgagatgcttctggctcccatcacctctaacatccttgtctgggtctaccaggaacgcttcatttccttggggctgcagttttgtggttgaggggcctggagaaaatcattttctccccttggcagtgtcccagggccctggatggtcctcttaccaacatctggtcttccaggcactcaaaagctgggaaccagcatctcagcgccagctctaccagttctcgttttgggccagaggcagcctctgcactcccacgcctgtcctcctggaagggacctggttggactaacggctaacctggacctggaactgtagggccaggggattgtctcagggccgacgttccacctggggcttccctccccacccaccccgactccaggctttcccttttttcttttgttcaacattgtaagaacaatcaatgctgttattactgatcccaccatgattgatgtggggtaaatattaaggagatggcctcatgggaatttgaccttgactagaaatagagactgagagtgagcaaccagctggaaggtactatgccagtcctagcagaaaaatgtgttaggggcctggcccaaagcagtgttggttgcttacagtgttgattgattttgttcttttttcttaccacctcttttctttccctctcatggtacctgctcatggttatgaagctttcaaagtaaagaacacgaaata

SEQ ID NO: 769 - protein, 1472 aa, Homo sapiens
MALRGFCSADGSDPLWDWNVTWNTSNPDFTKCFQNTVLVWVPCFYLWACFPFYFLYLSRHDRGYIQMTPLNKTKTALGFLLWIVCWADLFYSFWERSRGIFLAPVFLVSPTLLGITTLLATFLIQLERRKGVQSSGIMLTFWLVALVCALAILRSKIMTALKEDAQVDLFRDITFYVYFSLLLIQLVLSCFSDRSPLFSETIHDPNPCPESSASFLSRITFWWITGLIVRGYRQPLEGSDLWSLNKEDTSEQVVPVLVKNWKKECAKTRKQPVKVVYSSKDPAQPKESSKVDANEEVEALIVKSPQKEWNPSLFKVLYKTFGPYFLMSFFFKAIHDLMMFSGPQILKLLIKFVNDTKAPDWQGYFYTVLLFVTACLQTLVLHQYFHICFVSGMRIKTAVIGAVYRKALVITNSARKSSTVGEIVNLMSVDAQRFMDLATYINMIWSAPLQVILALYLLWLNLGPSVLAGVAVMVLMVPVNAVMAMKTKTYQVAHMKSKDNRIKLMNEILNGIKVLKLYAWELAFKDKVLAIRQEELKVLKKSAYLSAVGTFTWVCTPFLVALCTFAVYVTIDENNILDAQTAFVSLALFNILRFPLNILPMVISSIVQASVSLKRLRIFLSHEELEPDSIERRPVKDGGGTNSITVRNATFTWARSDPPTLNGITFSIPEGALVAVVGQVGCGKSSLLSALLAEMDKVEGHVAIKGVNLSGGQKQRVSLARAVYSNADIYLFDDPLSAVDAHVGKHIFENVIGPKGMLKNKTRILVTHSMSYLPQVDVIIVMSGGKISEMGSYQELLARDGAFAEFLRTYASTEQEQDAEENGVTGVSGPGKEAKQMENGMLVTDSAGKQLQRQLSSSSSYSGDISRHHNSTAELQKAEAKKEETWKLMEADKAQTGQVKLSVYWDYMKAIGLFISFLSIFLFMCNHVSALASNYWLSLWTDDPIVNGTQEHTKVRLSVYGALGISQGIAVFGYSMAVSIGGILASRCLHVDLLHSILRSPMSFFERTPSGNLVNRFSKELDTVDSMIPEVIKMFMGSLFNVIGACIVILLATPIAAIIIPPLGLIYFFVQRFYVASSRQLKRLESVSRSPVYSHFNETLLGVSVIRAFEEQERFIHQSDLKVDENQKAYYPSIVANRWLAVRLECVGNCIVLFAALFAVISRHSLSAGLVGLSVSYSLQVTTYLNWLVRMSSEMETNIVAVERLKEYSETEKEAPWQIQETAPPSSWPQVGRVEFRNYCLRYREDLDFVLRHINVTINGGEKVGIVGRTGAGKSSLTLGLFRINESAEGEIIIDGINIAKIGLHDLRFKITIIPQDPVLFSGSLRMNLDPFSQYSDEEVWTSLELAHLKDFVSALPDKLDHECAEGGENLSVGQRQLVCLARALLRKTKILVLDEATAAVDLETDDLIQSTIRTQFEDCTVLTIAHRLNTIMDYTRVIVLDKGEIQEYGAPSDLLQQRGLFYSMAKDAGLV

SEQ ID NO: 770 - DNA, 5759 bp, Homo sapiens
ccaggcggcgttgcggccccggccccggctccctgcgccgccgccgccgccgccgccgccgccgccgccgccgccgccagcgctagcgccagcagccgggcccgatcacccgccgcccggtgcccgccgccgcccgcgccagcaaccgggcccgatcacccgccgcccggtgcccgccgccgcccgcgccaccggcatggcgctccggggcttctgcagcgccgatggctccgacccgctctgggactggaatgtcacgtggaataccagcaaccccgacttcaccaagtgctttcagaacacggtcctcgtgtgggtgccttgtttttacctctgggcctgtttccccttctacttcctctatctctcccgacatgaccgaggctacattcagatgacacctctcaacaaaaccaaaactgccttgggatttttgctgtggatcgtctgctgggcagacctcttctactctttctgggaaagaagtcggggcatattcctggccccagtgtttctggtcagcccaactctcttgggcatcaccacgctgcttgctacctttttaattcagctggagaggaggaagggagttcagtcttcagggatcatgctcactttctggctggtagccctagtgtgtgccctagccatcctgagatccaaaattatgacagccttaaaagaggatgcccaggtggacctgtttcgtgacatcactttctacgtctacttttccctcttactcattcagctcgtcttgtcctgtttctcagatcgctcacccctgttctcggaaaccatccacgaccctaatccctgcccagagtccagcgcttccttcctgtcgaggatcaccttctggtggatcacagggttgattgtccggggctaccgccagcccctggagggcagtgacctctggtccttaaacaaggaggacacgtcggaacaagtcgtgcctgttttggtaaagaactggaagaaggaatgcgccaagactaggaagcagccggtgaaggttgtgtactcctccaaggatcctgcccagccgaaagagagttccaaggtggatgcgaatgaggaggtggaggctttgatcgtcaagtccccacagaaggagtggaacccctctctgtttaaggtgttatacaagacctttgggccctacttcctcatgagcttcttcttcaaggccatccacgacctgatgatgttttccgggccgcagatcttaaagttgctcatcaagttcgtgaatgacacgaaggccccagactggcagggctacttctacaccgtgctgctgtttgtcactgcctgcctgcagaccctcgtgctgcaccagtacttccacatctgcttcgtcagtggcatgaggatcaagaccgctgtcattggggctgtctatcggaaggccctggtgatcaccaattcagccagaaaatcctccacggtcggggagattgtcaacctcatgtctgtggacgctcagaggttcatggacttggccacgtacattaacatgatctggtcagcccccctgcaagtcatccttgctctctacctcctgtggctgaatctgggcccttccgtcctggctggagtggcggtgatggtcctcatggtgcccgtcaatgctgtgatggcgatgaagaccaagacgtatcaggtggcccacatgaagagcaaagacaatcggatcaagctgatgaacgaaattctcaatgggatcaaagtgctaaagctttatgcctgggagctggcattcaaggacaaggtgctggccatcaggcaggaggagctgaaggtgctgaagaagtctgcctacctgtcagccgtgggcaccttcacctgggtctgcacgccctttctggtggccttgtgcacatttgccgtctacgtgaccattgacgagaacaacatcctggatgcccagacagccttcgtgtctttggccttgttcaacatcctccggtttcccctgaacattctccccatggtcatcagcagcatcgtgcaggcgagtgtctccctcaaacgcctgaggatctttctctcccatgaggagctggaacctgacagcatcgagcgacggcctgtcaaagacggcgggggcacgaacagcatcaccgtgaggaatgccacattcacctgggccaggagcgaccctcccacactgaatggcatcaccttctccatccccgaaggtgctttggtggccgtggtgggccaggtgggctgcggaaagtcgtccctgctctcagccctcttggctgagatggacaaagtggaggggcacgtggctatcaagggctccgtggcctatgtgccacagcaggcctggattcagaatgattctctccgagaaaacatcctttttggatgtcagctggaggaaccatattacaggtccgtgatacaggcctgtgccctcctcccagacctggaaatcctgcccagtggggatcggacagagattggcgagaagacgcggatcttggtcacgcacagcatgagctacttgccgcaggtggacgtcatcatcgtcatgagtggcggcaagatctctgagatgggctcctaccaggagctgctggctcgagacggcgccttcgctgagttcctgcgtacctatgccagcacagagcaggagcaggatgcagaggagaacggggtcacgggcgtcagcggtccagggaaggaagcaaagcaaatggagaatggcatgctggtgacggacagtgcagggaagcaactgcagagacagctcagcagctcctcctcctatagtggggacatcagcaggcaccacaacagcaccgcagaactgcagaaagctgaggccaagaaggaggagacctggaagctgatggaggctgacaaggcgcagacagggcaggtcaagctttccgtgtactgggactacatgaaggccatcggactcttcatctccttcctcagcatcttccttttcatgtgtaaccatgtgtccgcgctggcttccaactattggctcagcctctggactgatgaccccatcgtcaacgggactcaggagcacacgaaagtccggctgagcgtctatggagccctgggcatttcacaagggatcgccgtgtttggctactccatggccgtgtccatcggggggatcttggcttcccgctgtctgcacgtggacctgctgcacagcatcctgcggtcacccatgagcttctttgagcggacccccagtgggaacctggtgaaccgcttctccaaggagctggacacagtggactccatgatcccggaggtcatcaagatgttcatgggctccctgttcaacgtcattggtgcctgcatcgttatcctgctggccacgcccatcgccgccatcatcatcccgccccttggcctcatctacttcttcgtccagaggttctacgtggcttcctcccggcagctgaagcgcctcgagtcggtcagccgctccccggtctattcccatttcaacgagaccttgctgggggtcagcgtcattcgagccttcgaggagcaggagcgcttcatccaccagagtgacctgaaggtggacgagaaccagaaggcctattaccccagcatcgtggccaacaggtggctggccgtgcggctggagtgtgtgggcaactgcatcgttctgtttgctgccctgtttgcggtgatctccaggcacagcctcagtgctggcttggtgggcctctcagtgtcttactcattgcaggtcaccacgtacttgaactggctggttcggatgtcatctgaaatggaaaccaacatcgtggccgtggagaggctcaaggagtattcagagactgagaaggaggcgccctggcaaatccaggagacagctccgcccagcagctggccccaggtgggccgagtggaattccggaactactgcctgcgctaccgagaggacctggacttcgttctcaggcacatcaatgtcacgatcaatgggggagaaaaggtcggcatcgtggggcggacgggagctgggaagtcgtccctgaccctgggcttatttcggatcaacgagtctgccgaaggagagatcatcatcgatggcatcaacatcgccaagatcggcctgcacgacctccgcttcaagatcaccatcatcccccaggaccctgttttgttttcgggttccctccgaatgaacctggacccattcagccagtactcggatgaagaagtctggacgtccctggagctggcccacctgaaggacttcgtgtcagcccttcctgacaagctagaccatgaatgtgcagaaggcggggagaacctcagtgtcgggcagcgccagcttgtgtgcctagcccgggccctgctgaggaagacgaagatccttgtgttggatgaggccacggcagccgtggacctggaaacggacgacctcatccagtccaccatccggacacagttcgaggactgcaccgtcctcaccatcgcccaccggctcaacaccatcatggactacacaagggtgatcgtcttggacaaaggagaaatccaggagtacggcgccccatcggacctcctgcagcagagaggtcttttctacagcatggccaaagacgccggcttggtgtgagccccagagctggcatatctggtcagaactgcagggcctatatgccagcgcccagggaggagtcagtacccctggtaaaccaagcctcccacactgaaaccaaaacataaaaaccaaacccagacaaccaaaacatattcaaagcagcagccaccgccatccggtcccctgcctggaactggctgtgaagacccaggagagacagagatgcgaaccacccaaaacacgcacaccctgcccctggtgccctgagacagacacacagcctcacgcccccaggaatgcaagtggtttcctggtgcttcccacggaggagttttggcagccagacttctggaggaattggttgtatagaagatcctagtgaccaaattcagcctactgcctcggatctctccagccgaagtctgtggactgcaagtctttgagatgcttctggctcccatcacctctaacatccttgtctgggtctaccaggaacgcttcatttccttggggctgcagttttgtggttgaggggcctggagaaaatcattttctccccttggcagtgtcccagggccctggatggtcctcttaccaacatctggtcttccaggcactcaaaagctgggaaccagcatctcagcgccagctctaccagttctcgttttgggccagaggcagcctctgcactcccacgcctgtcctcctggaagggacctggttggactaacggctaacctggacctggaactgtagggccaggggattgtctcagggccgacgttccacctggggcttccctccccacccaccccgactccaggctttcccttttttcttttgttcaacattgtaagaacaatcaatgctgttattactgatcccaccatgattgatgtggggtaaatattaaggagatggcctcatgggaatttgaccttgactagaaatagagactgagagtgagcaaccagctggaaggtactatgccagtcctagcagaaaaatgtgttaggggcctggcccaaagcagtgttggttgcttacagtgttgattgattttgttcttttttcttaccacctcttttctttccctctcatggtacctgctcatggttatgaagctttcaaagtaaagaacacgaaatac

SEQ ID NO: 771 - protein, 1475 aa, Homo sapiens
MALRGFCSADGSDPLWDWNVTWNTSNPDFTKCFQNTVLVWVPCFYLWACFPFYFLYLSRHDRGYIQMTPLNKTKTALGFLLWIVCWADLFYSFWERSRGIFLAPVFLVSPTLLGITTLLATFLIQLERRKGVQSSGIMLTFWLVALVCALAILRSKIMTALKEDAQVDLFRDITFYVYFSLLLIQLVLSCFSDRSPLFSETIHDPNPCPESSASFLSRITFWWITGLIVRGYRQPLEGSDLWSLNKEDTSEQVVPVLVKNWKKECAKTRKQPVKVVYSSKDPAQPKESSKVDANEEVEALIVKSPQKEWNPSLFKVLYKTFGPYFLMSFFFKAIHDLMMFSGPQILKLLIKFVNDTKAPDWQGYFYTVLLFVTACLQTLVLHQYFHICFVSGMRIKTAVIGAVYRKALVITNSARKSSTVGEIVNLMSVDAQRFMDLATYINMIWSAPLQVILALYLLWLNLGPSVLAGVAVMVLMVPVNAVMAMKTKTYQVAHMKSKDNRIKLMNEILNGIKVLKLYAWELAFKDKVLAIRQEELKVLKKSAYLSAVGTFTWVCTPFLVALCTFAVYVTIDENNILDAQTAFVSLALFNILRFPLNILPMVISSIVQASVSLKRLRIFLSHEELEPDSIERRPVKDGGGTNSITVRNATFTWARSDPPTLNGITFSIPEGALVAVVGQVGCGKSSLLSALLAEMDKVEGHVAIKGSVAYVPQQAWIQNDSLRENILFGCQLEEPYYRSVIQACALLPDLEILPSGDRTEIGEKTRILVTHSMSYLPQVDVIIVMSGGKISEMGSYQELLARDGAFAEFLRTYASTEQEQDAEENGVTGVSGPGKEAKQMENGMLVTDSAGKQLQRQLSSSSSYSGDISRHHNSTAELQKAEAKKEETWKLMEADKAQTGQVKLSVYWDYMKAIGLFISFLSIFLFMCNHVSALASNYWLSLWTDDPIVNGTQEHTKVRLSVYGALGISQGIAVFGYSMAVSIGGILASRCLHVDLLHSILRSPMSFFERTPSGNLVNRFSKELDTVDSMIPEVIKMFMGSLFNVIGACIVILLATPIAAIIIPPLGLIYFFVQRFYVASSRQLKRLESVSRSPVYSHFNETLLGVSVIRAFEEQERFIHQSDLKVDENQKAYYPSIVANRWLAVRLECVGNCIVLFAALFAVISRHSLSAGLVGLSVSYSLQVTTYLNWLVRMSSEMETNIVAVERLKEYSETEKEAPWQIQETAPPSSWPQVGRVEFRNYCLRYREDLDFVLRHINVTINGGEKVGIVGRTGAGKSSLTLGLFRINESAEGEIIIDGINIAKIGLHDLRFKITIIPQDPVLFSGSLRMNLDPFSQYSDEEVWTSLELAHLKDFVSALPDKLDHECAEGGENLSVGQRQLVCLARALLRKTKILVLDEATAAVDLETDDLIQSTIRTQFEDCTVLTIAHRLNTIMDYTRVIVLDKGEIQEYGAPSDLLQQRGLFYSMAKDAGLV

SEQ ID NO: 772 - DNA, 5582 bp, Homo sapiens
ccaggcggcgttgcggccccggccccggctccctgcgccgccgccgccgccgccgccgccgccgccgccgccgccgccagcgctagcgccagcagccgggcccgatcacccgccgcccggtgcccgccgccgcccgcgccagcaaccgggcccgatcacccgccgcccggtgcccgccgccgcccgcgccaccggcatggcgctccggggcttctgcagcgccgatggctccgacccgctctgggactggaatgtcacgtggaataccagcaaccccgacttcaccaagtgctttcagaacacggtcctcgtgtgggtgccttgtttttacctctgggcctgtttccccttctacttcctctatctctcccgacatgaccgaggctacattcagatgacacctctcaacaaaaccaaaactgccttgggatttttgctgtggatcgtctgctgggcagacctcttctactctttctgggaaagaagtcggggcatattcctggccccagtgtttctggtcagcccaactctcttgggcatcaccacgctgcttgctacctttttaattcagctggagaggaggaagggagttcagtcttcagggatcatgctcactttctggctggtagccctagtgtgtgccctagccatcctgagatccaaaattatgacagccttaaaagaggatgcccaggtggacctgtttcgtgacatcactttctacgtctacttttccctcttactcattcagctcgtcttgtcctgtttctcagatcgctcacccctgttctcggaaaccatccacgaccctaatccctgcccagagtccagcgcttccttcctgtcgaggatcaccttctggtggatcacagggttgattgtccggggctaccgccagcccctggagggcagtgacctctggtccttaaacaaggaggacacgtcggaacaagtcgtgcctgttttggtaaagaactggaagaaggaatgcgccaagactaggaagcagccggtgaaggttgtgtactcctccaaggatcctgcccagccgaaagagagttccaaggtggatgcgaatgaggaggtggaggctttgatcgtcaagtccccacagaaggagtggaacccctctctgtttaaggtgttatacaagacctttgggccctacttcctcatgagcttcttcttcaaggccatccacgacctgatgatgttttccgggccgcagatcttaaagttgctcatcaagttcgtgaatgacacgaaggccccagactggcagggctacttctacaccgtgctgctgtttgtcactgcctgcctgcagaccctcgtgctgcaccagtacttccacatctgcttcgtcagtggcatgaggatcaagaccgctgtcattggggctgtctatcggaaggccctggtgatcaccaattcagccagaaaatcctccacggtcggggagattgtcaacctcatgtctgtggacgctcagaggttcatggacttggccacgtacattaacatgatctggtcagcccccctgcaagtcatccttgctctctacctcctgtggctgaatctgggcccttccgtcctggctggagtggcggtgatggtcctcatggtgcccgtcaatgctgtgatggcgatgaagaccaagacgtatcaggtggcccacatgaagagcaaagacaatcggatcaagctgatgaacgaaattctcaatgggatcaaagtgctaaagctttatgcctgggagctggcattcaaggacaaggtgctggccatcaggcaggaggagctgaaggtgctgaagaagtctgcctacctgtcagccgtgggcaccttcacctgggtctgcacgccctttctggtggccttgtgcacatttgccgtctacgtgaccattgacgagaacaacatcctggatgcccagacagccttcgtgtctttggccttgttcaacatcctccggtttcccctgaacattctccccatggtcatcagcagcatcgtgcaggcgagtgtctccctcaaacgcctgaggatctttctctcccatgaggagctggaacctgacagcatcgagcgacggcctgtcaaagacggcgggggcacgaacagcatcaccgtgaggaatgccacattcacctgggccaggagcgaccctcccacactgaatggcatcaccttctccatccccgaaggtgctttggtggccgtggtgggccaggtgggctgcggaaagtcgtccctgctctcagccctcttggctgagatggacaaagtggaggggcacgtggctatcaagacgcggatcttggtcacgcacagcatgagctacttgccgcaggtggacgtcatcatcgtcatgagtggcggcaagatctctgagatgggctcctaccaggagctgctggctcgagacggcgccttcgctgagttcctgcgtacctatgccagcacagagcaggagcaggatgcagaggagaacggggtcacgggcgtcagcggtccagggaaggaagcaaagcaaatggagaatggcatgctggtgacggacagtgcagggaagcaactgcagagacagctcagcagctcctcctcctatagtggggacatcagcaggcaccacaacagcaccgcagaactgcagaaagctgaggccaagaaggaggagacctggaagctgatggaggctgacaaggcgcagacagggcaggtcaagctttccgtgtactgggactacatgaaggccatcggactcttcatctccttcctcagcatcttccttttcatgtgtaaccatgtgtccgcgctggcttccaactattggctcagcctctggactgatgaccccatcgtcaacgggactcaggagcacacgaaagtccggctgagcgtctatggagccctgggcatttcacaagggatcgccgtgtttggctactccatggccgtgtccatcggggggatcttggcttcccgctgtctgcacgtggacctgctgcacagcatcctgcggtcacccatgagcttctttgagcggacccccagtgggaacctggtgaaccgcttctccaaggagctggacacagtggactccatgatcccggaggtcatcaagatgttcatgggctccctgttcaacgtcattggtgcctgcatcgttatcctgctggccacgcccatcgccgccatcatcatcccgccccttggcctcatctacttcttcgtccagaggttctacgtggcttcctcccggcagctgaagcgcctcgagtcggtcagccgctccccggtctattcccatttcaacgagaccttgctgggggtcagcgtcattcgagccttcgaggagcaggagcgcttcatccaccagagtgacctgaaggtggacgagaaccagaaggcctattaccccagcatcgtggccaacaggtggctggccgtgcggctggagtgtgtgggcaactgcatcgttctgtttgctgccctgtttgcggtgatctccaggcacagcctcagtgctggcttggtgggcctctcagtgtcttactcattgcaggtcaccacgtacttgaactggctggttcggatgtcatctgaaatggaaaccaacatcgtggccgtggagaggctcaaggagtattcagagactgagaaggaggcgccctggcaaatccaggagacagctccgcccagcagctggccccaggtgggccgagtggaattccggaactactgcctgcgctaccgagaggacctggacttcgttctcaggcacatcaatgtcacgatcaatgggggagaaaaggtcggcatcgtggggcggacgggagctgggaagtcgtccctgaccctgggcttatttcggatcaacgagtctgccgaaggagagatcatcatcgatggcatcaacatcgccaagatcggcctgcacgacctccgcttcaagatcaccatcatcccccaggaccctgttttgttttcgggttccctccgaatgaacctggacccattcagccagtactcggatgaagaagtctggacgtccctggagctggcccacctgaaggacttcgtgtcagcccttcctgacaagctagaccatgaatgtgcagaaggcggggagaacctcagtgtcgggcagcgccagcttgtgtgcctagcccgggccctgctgaggaagacgaagatccttgtgttggatgaggccacggcagccgtggacctggaaacggacgacctcatccagtccaccatccggacacagttcgaggactgcaccgtcctcaccatcgcccaccggctcaacaccatcatggactacacaagggtgatcgtcttggacaaaggagaaatccaggagtacggcgccccatcggacctcctgcagcagagaggtcttttctacagcatggccaaagacgccggcttggtgtgagccccagagctggcatatctggtcagaactgcagggcctatatgccagcgcccagggaggagtcagtacccctggtaaaccaagcctcccacactgaaaccaaaacataaaaaccaaacccagacaaccaaaacatattcaaagcagcagccaccgccatccggtcccctgcctggaactggctgtgaagacccaggagagacagagatgcgaaccacccaaaacacgcacaccctgcccctggtgccctgagacagacacacagcctcacgcccccaggaatgcaagtggtttcctggtgcttcccacggaggagttttggcagccagacttctggaggaattggttgtatagaagatcctagtgaccaaattcagcctactgcctcggatctctccagccgaagtctgtggactgcaagtctttgagatgcttctggctcccatcacctctaacatccttgtctgggtctaccaggaacgcttcatttccttggggctgcagttttgtggttgaggggcctggagaaaatcattttctccccttggcagtgtcccagggccctggatggtcctcttaccaacatctggtcttccaggcactcaaaagctgggaaccagcatctcagcgccagctctaccagttctcgttttgggccagaggcagcctctgcactcccacgcctgtcctcctggaagggacctggttggactaacggctaacctggacctggaactgtagggccaggggattgtctcagggccgacgttccacctggggcttccctccccacccaccccgactccaggctttcccttttttcttttgttcaacattgtaagaacaatcaatgctgttattactgatcccaccatgattgatgtggggtaaatattaaggagatggcctcatgggaatttgaccttgactagaaatagagactgagagtgagcaaccagctggaaggtactatgccagtcctagcagaaaaatgtgttaggggcctggcccaaagcagtgttggttgcttacagtgttgattgattttgttcttttttcttaccacctcttttctttccctctcatggtacctgctcatggttatgaagctttcaaagtaaagaacacgaaatac

SEQ ID NO: 773 - protein, 1416 aa, Homo sapiens
MALRGFCSADGSDPLWDWNVTWNTSNPDFTKCFQNTVLVWVPCFYLWACFPFYFLYLSRHDRGYIQMTPLNKTKTALGFLLWIVCWADLFYSFWERSRGIFLAPVFLVSPTLLGITTLLATFLIQLERRKGVQSSGIMLTFWLVALVCALAILRSKIMTALKEDAQVDLFRDITFYVYFSLLLIQLVLSCFSDRSPLFSETIHDPNPCPESSASFLSRITFWWITGLIVRGYRQPLEGSDLWSLNKEDTSEQVVPVLVKNWKKECAKTRKQPVKVVYSSKDPAQPKESSKVDANEEVEALIVKSPQKEWNPSLFKVLYKTFGPYFLMSFFFKAIHDLMMFSGPQILKLLIKFVNDTKAPDWQGYFYTVLLFVTACLQTLVLHQYFHICFVSGMRIKTAVIGAVYRKALVITNSARKSSTVGEIVNLMSVDAQRFMDLATYINMIWSAPLQVILALYLLWLNLGPSVLAGVAVMVLMVPVNAVMAMKTKTYQVAHMKSKDNRIKLMNEILNGIKVLKLYAWELAFKDKVLAIRQEELKVLKKSAYLSAVGTFTWVCTPFLVALCTFAVYVTIDENNILDAQTAFVSLALFNILRFPLNILPMVISSIVQASVSLKRLRIFLSHEELEPDSIERRPVKDGGGTNSITVRNATFTWARSDPPTLNGITFSIPEGALVAVVGQVGCGKSSLLSALLAEMDKVEGHVAIKTRILVTHSMSYLPQVDVIIVMSGGKISEMGSYQELLARDGAFAEFLRTYASTEQEQDAEENGVTGVSGPGKEAKQMENGMLVTDSAGKQLQRQLSSSSSYSGDISRHHNSTAELQKAEAKKEETWKLMEADKAQTGQVKLSVYWDYMKAIGLFISFLSIFLFMCNHVSALASNYWLSLWTDDPIVNGTQEHTKVRLSVYGALGISQGIAVFGYSMAVSIGGILASRCLHVDLLHSILRSPMSFFERTPSGNLVNRFSKELDTVDSMIPEVIKMFMGSLFNVIGACIVILLATPIAAIIIPPLGLIYFFVQRFYVASSRQLKRLESVSRSPVYSHFNETLLGVSVIRAFEEQERFIHQSDLKVDENQKAYYPSIVANRWLAVRLECVGNCIVLFAALFAVISRHSLSAGLVGLSVSYSLQVTTYLNWLVRMSSEMETNIVAVERLKEYSETEKEAPWQIQETAPPSSWPQVGRVEFRNYCLRYREDLDFVLRHINVTINGGEKVGIVGRTGAGKSSLTLGLFRINESAEGEIIIDGINIAKIGLHDLRFKITIIPQDPVLFSGSLRMNLDPFSQYSDEEVWTSLELAHLKDFVSALPDKLDHECAEGGENLSVGQRQLVCLARALLRKTKILVLDEATAAVDLETDDLIQSTIRTQFEDCTVLTIAHRLNTIMDYTRVIVLDKGEIQEYGAPSDLLQQRGLFYSMAKDAGLV

SEQ ID NO: 774 - DNA, 1318 bp, Homo sapiens
cagtttcagggcctgagtccccatgccctgctctatgggggtgcgggggtgtcatgtcttgcactttccccagcaacctgccacccccctaccctgtgagaacaagcccctctcattctgtgtcccttgactccacgacggcggctgccttgtccacgaggcagggattctcatctctggtgcagcccctgtcctcaccactctgggcttgtgctgttcttggtcccttatcttgttgtcacagggctaaccctccccacacacctggctgtcccctgccccacagctcctaggccagggcctgtccctgcccctaacacgcagcccctcggttcctcttaccctcttcttggaccctacgccatttctgggtaatcagaaagctcagagatggtctccaggtgaccccccagtctgtccctctccctgaatccagagcgctgcagtcacagtagaggcaattgctgtcattccgcggcccatgacagcctggcggcccgtacccctcccccatgatcccctgcacagacaggcccacgtgtgtccccagatgcctgaatcactgctgacggctggggacctggcggccgtgggctcctggggagccactggggagggggtggcggccgcgtctcgcctccacgggaacacctgcggacataaataggcagccagcagaggcagcagcacagagccaccaagcagtgctgcatacggggtccacctgtgtgcaccaggatgcctgacaccatgctgcccgcctgcttcctcggcctactggccttctcctccgcgtgctacttccagaactgcccgaggggcggcaagagggccatgtccgacctggagctgagacagtgcctcccctgcggccccgggggcaaaggccgctgcttcgggcccagcatctgctgcgcggacgagctgggctgcttcgtgggcacggctgaggcgctgcgctgccaggaggagaactacctgccgtcgccctgccagtccggccagaaggcgtgcgggagcgggggccgctgcgccgccttcggcgtttgctgcaacgacgagagctgcgtgaccgagcccgagtgccgcgagggctttcaccgccgcgcccgcgccagcgaccggagcaacgccacgcagctggacgggccggccggggccttgctgctgcggctggtgcagctggccggggcgcccgagcccttcgagcccgcccagcccgacgcctactgagcccgcgctgcccccaccgcgctcttccgcccgcccctgcagcacggacaataaacctccgccaatgcacggcctcgcgtctgtc

SEQ ID NO: 775 - protein, 164 aa, Homo sapiens
MPDTMLPACFLGLLAFSSACYFQNCPRGGKRAMSDLELRQCLPCGPGGKGRCFGPSICCADELGCFVGTAEALRCQEENYLPSPCQSGQKACGSGGRCAAFGVCCNDESCVTEPECREGFHRRARASDRSNATQLDGPAGALLLRLVQLAGAPEPFEPAQPDAY

SEQ ID NO: 776 - DNA, 368 bp, Homo sapiens
ctttttcgtccttttccccggttgctgcttgctgtgagtgtctctagggtgatacgtgggtgagaaaggtcctggtccgcgccagagcccagcgcgcctcgtcgccatgcctcggaaaattgaggaaatcaaggacttcctgctcacagcccgacgaaaggatgccaaatctgtcaagatcaagaaaaataaggacaacgtgaagtttaaagttcgatgcagcagatacctttacaccctggtcatcactgacaaagagaaggcagagaaactgaagcagtccctgccccccggtttggcagtgaaggaactgaaatgaaccagacacactgattggaactgtattatattaaaatactaaaaatcct

SEQ ID NO: 777 - protein, 70 aa, Homo sapiens [sequence omitted]

SEQ ID NO: 778 - DNA, 770 bp, Homo sapiens
cagcaagcgacctgtcaggcggccgtggactcagactccggagatgaagcccctgctcctggccgtcagccttggcctcattgctgccctgcaggcccaccacctcctggcttcagacgaggagattcaggatgtgtcagggacgtggtatctgaaggccatgactgtggacagggagttccctgagatgaatctggaatcggtgacacccatgaccctcacgaccctggaagggggcaacctggaagccaaggtcaccatgctgataagtggccggtgccaggaggtgaaggccgtcctggagaaaactgacgagccgggaaaatacacggccgacgggggcaagcacgtggcatacatcatcaggtcgcacgtgaaggaccactacatcttttactgtgagggcgagctgcacgggaagccggtccgaggggtgaagctcgtgggcagagaccccaagaacaacctggaagccttggaggactttgagaaagccgcaggagcccgcggactcagcacggagagcatcctcatccccaggcagagcgaaacctgctctccagggagcgattaggggcaggggacaccttggctcctcagcagccaaggacggcaccatccagcacctccgtcattcacagggacatggaaaaagctccccacccctgcagaacgcggctggctgcaccccttcctaccaccccccgccttccccctgccctgcgccccctctcctggttctccataaagagcttcagcagttaaaaaaa

SEQ ID NO: 779 - protein, 176 aa, Homo sapiens
MKPLLLAVSLGLIAALQAHHLLASDEEIQDVSGTWYLKAMTVDREFPEMNLESVTPMTLTTLEGGNLEAKVTMLISGRCQEVKAVLEKTDEPGKYTADGGKHVAYIIRSHVKDHYIFYCEGELHGKPVRGVKLVGRDPKNNLEALEDFEKAAGARGLSTESILIPRQSETCSPGSD

SEQ ID NO: 780 - DNA, 2753 bp, Homo sapiens
agaatttggactcatatcaagatgctctgaagaagaacaaccctttaggatagccactgcaacatcatgaccaaagacaaagaacctattgttaaaagcttccattttgtttgccttatgatcataatagttggaaccagaatccagttctccgacggaaatgaatttgcagtagacaagtcaaaaagaggtcttattcatgttccaaaagacctaccgctgaaaaccaaagtcttagatatgtctcagaactacatcgctgagcttcaggtctctgacatgagctttctatcagagttgacagttttgagactttcccataacagaatccagctacttgatttaagtgttttcaagttcaaccaggatttagaatatttggatttatctcataatcagttgcaaaagatatcctgccatcctattgtgagtttcaggcatttagatctctcattcaatgatttcaaggccctgcccatctgtaaggaatttggcaacttatcacaactgaatttcttgggattgagtgctatgaagctgcaaaaattagatttgctgccaattgctcacttgcatctaagttatatccttctggatttaagaaattattatataaaagaaaatgagacagaaagtctacaaattctgaatgcaaaaacccttcaccttgtttttcacccaactagtttattcgctatccaagtgaacatatcagttaatactttagggtgcttacaactgactaatattaaattgaatgatgacaactgtcaagttttcattaaatttttatcagaactcaccagaggttcaaccttactgaattttaccctcaaccacatagaaacgacttggaaatgcctggtcagagtctttcaatttctttggcccaaacctgtggaatatctcaatatttacaatttaacaataattgaaagcattcgtgaagaagattttacttattctaaaacgacattgaaagcattgacaatagaacatatcacgaaccaagtttttctgttttcacagacagctttgtacaccgtgttttctgagatgaacattatgatgttaaccatttcagatacaccttttatacacatgctgtgtcctcatgcaccaagcacattcaagtttttgaactttacccagaacgttttcacagatagtatttttgaaaaatgttccacgttagttaaattggagacacttatcttacaaaaaaatggattaaaagaccttttcaaagtaggtctcatgacgaaggatatgccttctttggaaatactggatgttagctggaattctttggaatctggtagacataaagaaaactgcacttgggttgagagtatagtggtgttaaatttgtcttcaaatatgcttactgactctgttttcagatgtttacctcccaggatcaaggtacttgatcttcacagcaataaaataaagagcgttcctaaacaagtcgtaaaactggaagctttgcaagaactcaatgttgctttcaattctttaactgaccttcctggatgtggcagctttagcagcctttctgtattgatcattgatcacaattcagtttcccacccatcggctgatttcttccagagctgccagaagatgaggtcaataaaagcaggggacaatccattccaatgtacctgtgagctaagagaatttgtcaaaaatatagaccaagtatcaagtgaagtgttagagggctggcctgattcttataagtgtgactacccagaaagttatagaggaagcccactaaaggactttcacatgtctgaattatcctgcaacataactctgctgatcgtcaccatcggtgccaccatgctggtgttggctgtgactgtgacctccctctgcatctacttggatctgccctggtatctcaggatggtgtgccagtggacccagactcggcgcagggccaggaacatacccttagaagaactccaaagaaacctccagtttcatgcttttatttcatatagtgaacatgattctgcctgggtgaaaagtgaattggtaccttacctagaaaaagaagatatacagatttgtcttcatgagaggaactttgtccctggcaagagcattgtggaaaatatcatcaactgcattgagaagagttacaagtccatctttgttttgtctcccaactttgtccagagtgagtggtgccattacgaactctattttgcccatcacaatctctttcatgaaggatctaataacttaatcctcatcttactggaacccattccacagaacagcattcccaacaagtaccacaagctgaaggctctcatgacgcagcggacttatttgcagtggcccaaggagaaaagcaaacgtgggctcttttgggctaacattagagccgcttttaatatgaaattaacactagtcactgaaaacaatgatgtgaaatcttaaaaaaatttaggaaattcaacttaagaaaccattatttacttggatgatggtgaatagtacagtcgtaagtaactgtctggaggtgcctccattatcctcatgccttcaggaaagacttaacaaaaacaatgtttcatctggggaactgagctaggcggtgaggttagcctgccagttagagacagcccagtctcttctggtttaatcattatgtttcaaattgaaacagtctcttttgagtaaatgctcagtttttcagctcctctccactctgctttcccaaatggattctgttg

SEQ ID NO: 781 - protein, 796 aa, Homo sapiens
MTKDKEPIVKSFHFVCLMIIIVGTRIQFSDGNEFAVDKSKRGLIHVPKDLPLKTKVLDMSQNYIAELQVSDMSFLSELTVLRLSHNRIQLLDLSVFKFNQDLEYLDLSHNQLQKISCHPIVSFRHLDLSFNDFKALPICKEFGNLSQLNFLGLSAMKLQKLDLLPIAHLHLSYILLDLRNYYIKENETESLQILNAKTLHLVFHPTSLFAIQVNISVNTLGCLQLTNIKLNDDNCQVFIKFLSELTRGPTLLNFTLNHIETTWKCLVRVFQFLWPKPVEYLNIYNLTIIESIREEDFTYSKTTLKALTIEHITNQVFLFSQTALYTVFSEMNIMMLTISDTPFIHMLCPHAPSTFKFLNFTQNVFTDSIFEKCSTLVKLETLILQKNGLKDLFKVGLMTKDMPSLEILDVSWNSLESGRHKENCTWVESIVVLNLSSNMLTDSVFRCLPPRIKVLDLHSNKIKSVPKQVVKLEALQELNVAFNSLTDLPGCGSFSSLSVLIIDHNSVSHPSADFFQSCQKMRSIKAGDNPFQCTCELREFVKNIDQVSSEVLEGWPDSYKCDYPESYRGSPLKDFHMSELSCNITLLIVTIGATMLVLAVTVTSLCIYLDLPWYLRMVCQWTQTRRRARNIPLEELQRNLQFHAFISYSEHDSAWVKSELVPYLEKEDIQICLHERNFVPGKSIVENIINCIEKSYKSIFVLSPNFVQSEWCHYELYFAHHNLFHEGSNNLILILLEPIPQNSIPNKYHKLKALMTQRTYLQWPKEKSKRGLFWANIRAAFNMKLTLVTENNDVKS

SEQ ID NO: 782 - DNA, 5479 bp, Homo sapiens
cggcgaacagacgttctttctcctccatgcagttacacaaaaggagggctacggaaactaaaagtttcggggcctctggctcggtgtgtggagaaaagagaaaacctggagacgggatatgaagatcaatgatgcagactgatggtcttgatgaagctgggcatttataactagattcattaaggaatacaaagaaaatacttaaagggatcaataatggtgtcttctggttgcagaatgcgaagtctgtggtttatcattgtaatcagcttcttaccaaatacagaaggtttcagcagagcagctttaccatttgggctggtgaggcgagaattatcctgtgaaggttattctatagatctgcgatgcccgggcagtgatgtcatcatgattgagagcgctaactatggtcggacggatgacaagatttgtgatgctgacccatttcagatggagaatacagactgctacctccccgatgccttcaaaattatgactcaaaggtgcaacaatcgaacacagtgtatagtagttactgggtcagatgtgtttcctgatccatgtcctggaacatacaaataccttgaagtccaatatgaatgtgtcccttacatttttgtgtgtcctgggaccttgaaagcaattgtggactcaccatgtatatatgaagctgaacaaaaggcgggtgcttggtgcaaggaccctcttcaggctgcagataaaatttatttcatgccctggactccctatcgtaccgatactttaatagaatatgcttctttagaagatttccaaaatagtcgccaaacaacaacatataaacttccaaatcgagtagatggtactggatttgtggtgtatgatggtgctgtcttctttaacaaagaaagaacgaggaatattgtgaaatttgacttgaggactagaattaagagtggcgaggccataattaactatgccaactaccatgatacctcaccatacagatggggaggaaagactgatatcgacctagcagttgatgaaaatggtttatgggtcatttacgccactgaacagaacaatggaatgatagttattagccagctgaatccatacactcttcgatttgaagcaacgtgggagactgtatacgacaaacgtgccgcatcaaatgcttttatgatatgcggagtcctctatgtggttaggtcagtttatcaagacaatgaaagtgaaacaggcaagaactcaattgattacatttataatacccgattaaaccgaggagaatatgtagacgttcccttccccaaccagtatcagtatattgctgcagtggattacaatccaagagataaccaactttacgtgtggaacaataacttcattttacgatattctctggagtttggtccacctgatcctgcccaagtgcctaccacagctgtgacaataacttcttcagctgagctgttcaaaaccataatatcaaccacaagcactacttcacagaaaggccccatgagcacaactgtagctggatcacaggaaggaagcaaagggacaaaaccacctccagcagtttctacaaccaaaattccacctataacaaatatttttcccctgccagagagattctgtgaagcattagactccaaggggataaagtggcctcagacacaaaggggaatgatggttgaacgaccatgccctaagggaacaagaggaactgcctcatatctctgcatgatttccactggaacatggaaccctaagggccccgatcttagcaactgtacctcacactgggtgaatcagctggctcagaagatcagaagcggagaaaatgctgctagtcttgccaatgaactggctaaacataccaaagggccagtgtttgctggggatgtaagttcttcagtgagattgatggagcagttggtggacatccttgatgcacagctgcaggaactgaaacctagtgaaaaagattcagctggacggagttataacaaggcaattgttgacacagtggacaaccttctgagacctgaagctttggaatcatggaaacatatgaattcttctgaacaagcacatactgcaacaatgttactcgatacattggaagaaggagcttttgtcctagctgacaatcttttagaaccaacaagggtctcaatgcccacagaaaatattgtcctggaagttgccgtactcagtacagaaggacagatccaagactttaaatttcctctgggcatcaaaggagcaggcagctcaatccaactgtccgcaaataccgtcaaacagaacagcaggaatgggcttgcaaagttggtgttcatcatttaccggagcctgggacagttccttagtacagaaaatgcaaccattaaactgggtgctgattttattggtcgtaatagcaccattgcagtgaactctcacgtcatttcagtttcaatcaataaagagtccagccgagtatacctgactgatcctgtgctttttaccctgccacacattgatcctgacaattatttcaatgcaaactgctccttctggaactactcagagagaactatgatgggatattggtctacccagggctgcaagctggttgacactaataaaactcgaacaacgtgtgcatgcagccacctaaccaattttgcaattctcatggcccacagggaaattgcatataaagatggcgttcatgaattacttcttacagtcatcacctgggtgggaattgtcatttcccttgtttgcctggctatctgcatcttcaccttctgctttttccgtggcctacagagtgaccgaaatactattcacaagaacctttgtatcaaccttttcattgctgaatttattttcctaataggcattgataagacaaaatatgcgattgcatgcccaatatttgcaggacttctacactttttctttttggcagcttttgcttggatgtgcctagaaggtgtgcagctctacctaatgttagttgaagtttttgaaagtgaatattcaaggaaaaaatattactatgttgctggttacttgtttcctgccacagtggttggagtttcagctgctattgactataagagctatggaacagaaaaagcttgctggcttcatgttgataactactttatatggagcttcattggacctgttaccttcattattctgctaaatattatcttcttggtgatcacattgtgcaaaatggtgaagcattcaaacactttgaaaccagattctagcaggttggaaaacattaagtcttgggtgcttggcgctttcgctcttctgtgtcttcttggcctcacctggtcctttgggttgctttttattaatgaggagactattgtgatggcatatctcttcactatatttaatgctttccagggagtgttcattttcatctttcactgtgctctccaaaagaaagtacgaaaagaatatggcaagtgcttcagacactcatactgctgtggaggcctcccaactgagagtccccacagttcagtgaaggcatcaaccaccagaaccagtgctcgctattcctctggcacacagagtcgtataagaagaatgtggaatgatactgtgagaaaacaatcagaatcttcttttatctcaggtgacatcaatagcacttcaacacttaatcaaggacattcactgaacaatgccagggatacaagtgccatggatactctaccgctaaatggtaattttaacaacagctactcgctgcacaagggtgactataatgacagcgtgcaagttgtggactgtggactaagtctgaatgatactgcttttgagaaaatgatcatttcagaattagtgcacaacaacttacggggcagcagcaagactcacaacctcgagctcacgctaccagtcaaacctgtgattggaggtagcagcagtgaagatgatgctattgtggcagatgcttcatctttaatgcacagcgacaacccagggctggagctccatcacaaagaactcgaggcaccacttattcctcagcggactcactcccttctgtaccaaccccagaagaaagtgaagtccgagggaactgacagctatgtctcccaactgacagcagaggctgaagatcacctacagtcccccaacagagactctctttatacaagcatgcccaatcttagagactctccctatccggagagcagccctgacatggaagaagacctctctccctccaggaggagtgagaatgaggacatttactataaaagcatgccaaatcttggagctggccatcagcttcagatgtgctaccagatcagcaggggcaatagtgatggttatataatccccattaacaaagaagggtgtattccagaaggagatgttagagaaggacaaatgcagctggttacaagtctttaatcatacagctaaggaattccaagggccacatgcgagtattaataaataaagacaccattggcctgacgcagctccctcaaactctgcttgaagagatgactcttgacctgtggttctctggtgtaaaaaagatgactgaaccttgcagttctgtgaatttttataaaacatacaaaaactttgtatatacacagagtatactaaagtgaattatttgttacaaagaaaagagatgccagccaggtattttaagattctgctgctgtttagagaaattgtgaaacaagcaaaacaaaactttccagccattttactgcagcagtctgtgaactaaatttgtaaatatggctgcaccatttttgtaggcctgcattgtattatatacaagacgtaggctttaaaatcctgtgggacaaatttactgtaccttactattcctgacaagacttggaaaagcaggagagatattctgcatcagtttgcagttcactgcaaatcttttacattaaggcaaagattgaaaacatgcttaaccactagcaatcaagccacaggccttatttcatatgtttcctcaactgtacaatgaactattctcatgaaaaatggctaaagaaattatattttgttctattgctagggtaaaataaatacatttgtgtccaactgaaatataattgtcattaaaataattttaaagagtgaagaaaatattgtgaaaagctcttggttgcacatgttatgaaatgttttttcttacactttgtcatggtaagttctactcattttcacttcttttccactgtatacagtgttctgctttgacaaagttagtctttattacttacatttaaatttcttattgccaaaagaacgtgttttatggggagaaacaaactctttgaagccagttatgtcatgccttgcacaaaagtgatgaaatctagaaaagattgtgtgtcacccctgtttattcttgaacagagggcaaagagggcactgggcacttctcacaaactttctagtgaacaaaaggtgcctattctttttt

SEQ ID NO: 783 - protein, 1403 aa, Homo sapiens
MVSSGCRMRSLWFIIVISFLPNTEGFSRAALPFGLVRRELSCEGYSIDLRCPGSDVIMIESANYGRTDDKICDADPFQMENTDCYLPDAFKIMTQRCNNRTQCIVVTGSDVFPDPCPGTYKYLEVQYECVPYIFVCPGTLKAIVDSPCIYEAEQKAGAWCKDPLQAADKIYFMPWTPYRTDTLIEYASLEDFQNSRQTTTYKLPNRVDGTGFVVYDGAVFFNKERTRNIVKFDLRTRIKSGEAIINYANYHDTSPYRWGGKTDIDLAVDENGLWVIYATEQNNGMIVISQLNPYTLRFEATWETVYDKRAASNAFMICGVLYVVRSVYQDNESETGKNSIDYIYNTRLNRGEYVDVPFPNQYQYIAAVDYNPRDNQLYVWNNNFILRYSLEFGPPDPAQVPTTAVTITSSAELFKTIISTTSTTSQKGPMSTTVAGSQEGSKGTKPPPAVSTTKIPPITNIFPLPERFCEALDSKGIKWPQTQRGMMVERPCPKGTRGTASYLCMISTGTWNPKGPDLSNCTSHWVNQLAQKIRSGENAASLANELAKHTKGPVFAGDVSSSVRLMEQLVDILDAQLQELKPSEKDSAGRSYNKAIVDTVDNLLRPEALESWKHMNSSEQAHTATMLLDTLEEGAFVLADNLLEPTRVSMPTENIVLEVAVLSTEGQIQDFKFPLGIKGAGSSIQLSANTVKQNSRNGLAKLVFIIYRSLGQFLSTENATIKLGADFIGRNSTIAVNSHVISVSINKESSRVYLTDPVLFTLPHIDPDNYFNANCSFWNYSERTMMGYWSTQGCKLVDTNKTRTTCACSHLTNFAILMAHREIAYKDGVHELLLTVITWVGIVISLVCLAICIFTFCFFRGLQSDRNTIHKNLCINLFIAEFIFLIGIDKTKYAIACPIFAGLLHFFFLAAFAWMCLEGVQLYLMLVEVFESEYSRKKYYYVAGYLFPATVVGVSAAIDYKSYGTEKACWLHVDNYFIWSFIGPVTFIILLNIIFLVITLCKMVKHSNTLKPDSSRLENIKSWVLGAFALLCLLGLTWSFGLLFINEETIVMAYLFTIFNAFQGVFIFIFHCALQKKVRKEYGKCFRHSYCCGGLPTESPHSSVKASTTRTSARYSSGTQSRIRRMWNDTVRKQSESSFISGDINSTSTLNQGHSLNNARDTSAMDTLPLNGNFNNSYSLHKGDYNDSVQVVDCGLSLNDTAFEKMIISELVHNNLRGSSKTHNLELTLPVKPVIGGSSSEDDAIVADASSLMHSDNPGLELHHKELEAPLIPQRTHSLLYQPQKKVKSEGTDSYVSQLTAEAEDHLQSPNRDSLYTSMPNLRDSPYPESSPDMEEDLSPSRRSENEDIYYKSMPNLGAGHQLQMCYQISRGNSDGYIIPINKEGCIPEGDVREGQMQLVTSL

SEQ ID NO: 784 - DNA, 2647 bp, Homo sapiens
ggggcccaggttgctgctctggccgccgagtgaggggcggggggggcccgggggcgcgcggcccgagacccccccggccgccctcctcctttctttgttcctgtggctgggggggtatcccctccctccacaacatggagccatctcctctgtctcccagtggggcagcacttcccctgccgctgtcgctggctccgcccccactacccctgccagcagctgcagtggtacatgtgtccttccctgaggtgaccagtgccctcttggagtccctcaatcagcagcgtctgcagggccagctctgcgatgtatctatcagagtgcagggccgggagttccgggctcatcgggctgtcctggctgcctcctccccttacttccatgatcaggtcctactcaaaggcatgacctccatctcgctgcccagtgtcatggacccaggcgcctttgagactgtcctagcctccgcttacactggccgcctcagcatggctgctgctgacattgtcaacttccttacagtggggtctgtgctccaaatgtggcacattgtggacaagtgcactgaactactccgagaaggccgggcctcagctaccaccaccatcactactgctgcagccacctctgtcactgtccctggtgctggggtgccatccgggagtgggggcactgtggcccctgctaccatgggctctgcgcgctcccatgcctccagccgggccagtgagaatcaatctcccagcagcagcaactacttcagccccagggagtccactgatttctcatcttcctcccaagaggcatttgcagcttctgcagtgggcagtggggagcgtcgaggaggtggccctgtattcccagcccctgtcgttggcagtggaggggccacatctggaaagctgctgctggaggcagatgagctgtgcgatgatggtggggatgggaggggggcagtggttcctggggctgggctccggagacccacctacacaccccctagcatcatgccacagaaacactgggtatacgtgaagcgaggtggtaattgcccagcgccagcacccctggttccccaagacccagatctggaggaggaagaggaggaggaagatctggtgttgacctgtgaggatgatgaagatgaagaactagggggtagctccagggttccagtggggggagggcctgaggctaccctcagcataagtgatgtccgtaccctgagtgagcccccagacaagggggaggagcaggtcaacttctgtgagtcctccaatgactttggcccatatgagggtgggggtcctgtggcaggtcttgatgactcaggggggccaactccctcttcctatgccccctcccaccctcctcgaccgctccttcccttggacatgcagggcaaccagatcctggtcttcccgtcgtcgtcttcatcctcatcctcacaggctcctggccaaccaccagggaaccaagcagaacacggggcagtgaccgtggggggcacgtcggtggggagcctgggtgtgccgggtagcgttggtggggtccctggagggactggcagtggggacgggaataagatctttctgtgccattgtgggaaggccttctcccacaagagcatgcgggaccggcacgtgaacatgcacctcaatctgcggccgtttgactgccccgtgtgcaacaaaaagttcaagatgaagcaccatctgactgagcacatgaagacgcacacaggtctcaagccctacgagtgcggagtctgcgccaagaagttcatgtggcgagacagcttcatgcgccaccgaggacactgtgagcgccggcaccgcctgggcggggtcggggccgtacctgggcctgggactcccacggggccatccttgccgtccaagagagagtctcccggagtgggcgggggcagcggcgacgaagcgagtgcggccacgcccccgtccagcagacgtgtctggtccccacccagagtccacaaggtggagatgggcttcggtggaggtggaggagcaaactgaaggggcaggctactggggtggggtagctttcgggaaagggaataaggagcacgatgcaagggcgctgtggcccccgggtgatctcccaccacacttactgtcttcctttatctctgtggacttgtatatattctggaaggggaaccacagtttcaccatcacccgcccattctactactcaacccctcccccccaaggtatttccagaactaaacccttcctttccctctgatgggtacactgaagcccctgctccacagagtagattgcacatggagggagggagagggggcgtgttgaacatcctgcagtcacagggtcaggggtcaggtggttgtagtctgtgcctgaagtctgtgtttgtgttgtcgtggagacaaggcctttgagccccacccttgtcctagaacctaccccctctcaaggatgcgctctttatttctaccctgtctctccccgccacccccgacttcccgtggaaattcccaactcggttctcatggaggagtgggtggagacaaggagggagtaagtcgtaggagtacaaggtttttattttttttaacagtgattaaaatatttattggtcatttaaaaaaaaaaaaaaa

SEQ ID NO: 785 - protein, 634 aa, Homo sapiens
MEPSPLSPSGAALPLPLSLAPPPLPLPAAAVVHVSFPEVTSALLESLNQQRLQGQLCDVSIRVQGREFRAHRAVLAASSPYFHDQVLLKGMTSISLPSVMDPGAFETVLASAYTGRLSMAAADIVNFLTVGSVLQMWHIVDKCTELLREGRASATTTITTAAATSVTVPGAGVPSGSGGTVAPATMGSARSHASSRASENQSPSSSNYFSPRESTDFSSSSQEAFAASAVGSGERRGGGPVFPAPVVGSGGATSGKLLLEADELCDDGGDGRGAVVPGAGLRRPTYTPPSIMPQKHWVYVKRGGNCPAPTPLVPQDPDLEEEEEEEDLVLTCEDDEDEELGGSSRVPVGGGPEATLSISDVRTLSEPPDKGEEQVNFCESSNDFGPYEGGGPVAGLDDSGGPTPSSYAPSHPPRPLLPLDMQGNQILVFPSSSSSSSSQAPGQPPGNQAEHGAVTVGGTSVGSLGVPGSVGGVPGGTGSGDGNKIFLCHCGKAFSHKSMRDRHVNMHLNLRPFDCPVCNKKFKMKHHLTEHMKTHTGLKPYECGVCAKKFMWRDSFMRHRGHCERRHRLGGVGAVPGPGTPTGPSLPSKRESPGVGGGSGDEASAATPPSSRRVWSPPRVHKVEMGFGGGGGAN

SEQ ID NO: 786 - DNA, 3408 bp, Homo sapiens
caaaaaggctattacctgtggggaaaaggaaaagcaagatctcattaagagccttgccatgttgaaggacggcttccgcactgacagggggtctcactcagacctgtggtccagcagcagctctctggagagttcgagtttcccgctaccgaaacagtacctggatgtgagctcccagacagacatctcgggaagcttcggcatcaacagcaacaatcagttggcagagaaggtcagattgcgccttcgatatgaagaggctaagagaaggatcgccaacctgaagatccagctggccaagcttgacagtgaggcctggcctggggtgctggactcagagagggaccggctgatccttatcaacgagaaggaggagctgctgaaggagatgcgcttcatcagcccccgcaagtggacccagggggaggtggagcagctggagatggcccggaagcggctggaaaaggacctgcaggcagcccgggacacccagagcaaggcgctgacggagaggttaaagttaaacagtaagaggaaccagcttgtgagagaactggaggaagccacccggcaggtggcaactctgcactcccagctgaaaagtctctcaagcagcatgcagtccctgtcctcaggcagcagccccggatccctcacgtccagccggggctccctggttgcatccagcctggactcctccacttcagccagcttcactgacctctactatgacccctttgagcagctggactcagagctgcagagcaaggtggagttcctgctcctggagggggccaccggcttccggccctcaggctgcatcaccaccatccacgaggatgaggtggccaagacccagaaggcagagggaggtggccgcctgcaggctctgcgttccctgtctggcaccccaaagtccatgacctccctatccccacgttcctctctctcctccccctccccaccctgttcccctctcatggctgaccccctcctggctggtgatgccttcctcaactccttggagtttgaagacccggagctgagtgccactctttgtgaactgagccttggtaacagcgcccaggaaagataccggctggaggaaccaggaacggagggcaagcagctgggccaagctgtgaatacggcccaggggtgtggcctgaaagtggcctgtgtctcagccgccgtatcggacgagtcagtggctggagacagtggtgtgtacgaggcttccgtgcagagactgggtgcttcagaagctgctgcatttgacagtgacgaatcggaagcagtgggtgcgacccgaattcagattgccctgaagtatgatgagaagaataagcaatttgcaatattaatcatccagctgagtaacctttctgctctgttgcagcaacaagaccagaaagtgaatatccgcgtggctgtccttccttgctctgaaagcacaacctgcctgttccggacccggcctctggacgcctcagacactctagtgttcaatgaggtgttctgggtatccatgtcctatccagcccttcaccagaagaccttaagagtcgatgtctgtaccaccgacaggagccatctggaagagtgcctgggaggcgcccagatcagcctggcggaggtctgccggtctggggagaggtcgactcgctggtacaaccttctcagctacaaatacttgaagaagcagagcagggagctcaagccagtgggagttatggcccctgcctcagggcctgccagcacggacgctgtgtctgctctgttggaacagacagcagtggagctggagaagaggcaggagggcaggagcagcacacagacactggaagacagctggaggtatgaggagaccagtgagaatgaggcagtagccgaggaagaggaggaggaggtggaggaggaggagggagaagaggatgttttcaccgagaaagcctcacctgatatggatgggtacccagcattaaaggtggacaaagagaccaacacggagaccccggccccatcccccacagtggtgcgacctaaggaccggagagtgggcaccccgtcccaggggccatttcttcgagggagcaccatcatccgctctaagaccttctccccaggaccccagagccagtacgtgtgccggctgaatcggagtgatagtgacagctccactctgtccaaaaagccaccttttgttcgaaactccctggagcgacgcagcgtccggatgaagcggccttcctcggtcaagtcgctgcgctccgagcgtctgatccgtacctcgctggacctggagttagacctgcaggcgacaagaacctggcacagccaactgacccaggagatctcggtgctgaaggagctcaaggagcagctggaacaagccaagagccacggggagaaggagctgccacagtggttgcgtgaggacgagcgtttccgcctgctgctgaggatgctggagaagcggatggaccgagcggagcacaagggtgagcttcagacagacaagatgatgagggcagctgccaaggatgtgcacaggctccgaggccagagctgtaaggaacccccagaagttcagtctttcagggagaagatggcatttttcacccggcctcggatgaatatcccagctctctctgcagatgacgtctaatcgccagaaaagtatttcctttgttccactgaccaggctgtgaacattgactgtggctaaagttatttatgtggtgttatatgaaggtactgagtcacaagtcctctagtgctcttgttggtttgaagatgaaccgactttttagtttgggtcctactgttgttattaaaaacagaacaaaaacaaaacacacacacacacaaaaacagaaacaaaaaaaaccagcattaaaataataagattgtatagtttgtatatttaggagtgtatttttgggaaagaaaatttaaatgaactaaagcagtattgagttgctgctcttcttaaaatcgtttagattttttttggtttgtacagctccaccttttagaggtcttactgcaataagaagtaatgcctgggggacggtaatcctaataggacgtcccgcacttgtcacagtacagctaatttttcctagttaacatattttgtacaatattaaaaaaatgcacagaaaccattgggggggattcagaggtgcatccacggatcttcttgagctgtgacgtgtttttatgtggctgcccaacgtggagcgggcagtgtgataggctgggtgggctaagcagcctagtctatgtgggtgacaggccacgctggtctcagatgcccagtgaagccactaacatgagtgaggggagggctgtggggaactccattcagttttatctccatcaataaagtggcctttcaaaaag

SEQ ID NO: 787 - protein, 888 aa, Homo sapiens
KKAITCGEKEKQDLIKSLAMLKDGFRTDRGSHSDLWSSSSSLESSSFPLPKQYLDVSSQTDISGSFGINSNNQLAEKVRLRLRYEEAKRRIANLKIQLAKLDSEAWPGVLDSERDRLILINEKEELLKEMRFISPRKWTQGEVEQLEMARKRLEKDLQAARDTQSKALTERLKLNSKRNQLVRELEEATRQVATLHSQLKSLSSSMQSLSSGSSPGSLTSSRGSLVASSLDSSTSASFTDLYYDPFEQLDSELQSKVEFLLLEGATGFRPSGCITTIHEDEVAKTQKAEGGGRLQALRSLSGTPKSMTSLSPRSSLSSPSPPCSPLMADPLLAGDAFLNSLEFEDPELSATLCELSLGNSAQERYRLEEPGTEGKQLGQAVNTAQGCGLKVACVSAAVSDESVAGDSGVYEASVQRLGASEAAAFDSDESEAVGATRIQIALKYDEKNKQFAILIIQLSNLSALLQQQDQKVNIRVAVLPCSESTTCLFRTRPLDASDTLVFNEVFWVSMSYPALHQKTLRVDVCTTDRSHLEECLGGAQISLAEVCRSGERSTRWYNLLSYKYLKKQSRELKPVGVMAPASGPASTDAVSALLEQTAVELEKRQEGRSSTQTLEDSWRYEETSENEAVAEEEEEEVEEEEGEEDVFTEKASPDMDGYPALKVDKETNTETPAPSPTVVRPKDRRVGTPSQGPFLRGSTIIRSKTFSPGPQSQYVCRLNRSDSDSSTLSKKPPFVRNSLERRSVRMKRPSSVKSLRSERLIRTSLDLELDLQATRTWHSQLTQEISVLKELKEQLEQAKSHGEKELPQWLREDERFRLLLRMLEKRMDRAEHKGELQTDKMMRAAAKDVHRLRGQSCKEPPEVQSFREKMAFFTRPRMNIPALSADDV

SEQ ID NO: 788 - DNA, 4814 bp, Homo sapiens
ggcggcgggagccctggaacggagcttcgtggagctaagcggagctgagcgcgaaaggccgaggcactttcgggaattcacagtctgcagcattgggactgcaaatgccgtggctggcgccgtaaaatacagtgaaagcgcgggaggcttttactacgtggagagtggcaagttgttctccgtaaccagaaacaggttcattcattggaagacctctggagatacattggagctgatggaggagtcactggacataaatctgttgaataatgccattcgcctaaaattccaaaattgcagtgttttacctggaggggtttatgtctctgagactcagaatcgtgtgataatcttgatgttaaccaatcaaacagtgcacaggttacttttaccacacccctcccggatgtataggagtgagttggtagttgacagtcagatgcagtcaatattcactgacattggaaaagttgatttcacagatccttgcaactatcagttaattccagcagtacctggaatatctcctaattccaccgcctctacagcctggctcagcagtgatggggaggccctgtttgccttaccatgtgcttctgggggaatctttgttcttaagctacctccttatgacatacctggtatggtgtcagtcgtggaactgaaacagagttcagtaatgcaacgattgcttacaggctggatgccaacagctatcaggggtgaccagtcgccttcagatcgtcccctcagtcttgctgttcattgtgtggagcatgatgccttcatctttgctttgtgtcaggatcataaactacgaatgtggtcttacaaggagcaaatgtgcctaatggtagctgacatgctggagtatgtccctgtgaagaaagaccttcggcttactgctggaactggacacaaattacggcttgcttattcccccaccatgggactctacctggggatatacatgcatgcaccaaaacgaggacagttctgcattttccagttggtgagcactgagagtaatcgctatagtctcgatcatatttcttcactgttcacttctcaggagacactgattgactttgccttaacttccacggatatctgggccctgtggcatgatgctgagaaccaaacagtagtgaaatacatcaactttgaacataatgttgcaggtcagtggaatccagtttttatgcagcctctgccagaggaagagattgtcatcagagatgatcaagaccccagagagatgtatctgcaaagtctttttacaccaggacaattcacaaatgaagctttatgtaaggctttacagattttctgccgaggaactgagaggaatttggatctttcctggagtgaactgaagaaagaagttactttagctgttgaaaatgagcttcaaggaagtgtaacagagtatgaattctcccaggaggagtttcgaaatttacaacaagaattctggtgcaagttctatgcctgttgtcttcagtatcaagaagccctctctcaccctcttgccctacatttgaatccacacacaaacatggtgtgcctgctgaaaaaagggtacctgtctttccttattccctcatccttagtggatcatttgtatctcctgccttatgagaaccttttgacagaagatgagacaaccatatctgatgatgtggatatcgctcgggatgtcatatgtcttataaaatgcctccggctgattgaagagtcagtaactgtggatatgtcagttataatggaaatgagttgttataacctacagtctccggaaaaggctgcagagcagattctggaagatatgatcactattgatgtagaaaatgtgatggaggatatttgtagtaaactgcaagagattaggaacccaatccatgcaattggactacttatacgggaaatggattatgaaacagaagtggaaatggaaaagggattcaatccagctcagcctttgaatattcgaatgaatcttacccagctctatggtagtaacacagcagggtatattgtgtgcagaggggtgcataaaatcgccagtactcgtttcctgatctgcagagatcttttgatcttacagcagctgttaatgaggcttggagatgctgtgatttggggaactggtcagctctttcaagctcagcaagacctactacatcgaacagctcccctactcttatcttattacctcattaaatggggaagtgagtgcttggcaactgatgttccacttgacacactggagtctaatctccaacacttatcagtactggaattaacagactctggtgctttaatggcaaataggtttgtatctagtcctcagactattgtggagttattcttccaagaagttgcaagaaaacacattatatctcacctcttctctcagccaaaggcacctctgagccaaactggattgaattggcctgaaatgattactgcaattaccagttatttattgcagcttttatggcctagcaatcctggttgtctctttctagaatgtttgatgggaaattgccaatatgtacaattgcaggattatattcaactgctacatccctggtgtcaagtcaatgttggttcctgtcgatttatgctgggaaggtgttacctagttacaggagaaggacagaaggctctggaatgtttttgtcaggcagcatctgaagtaggcaaagaggaattcttggatcgcttgattcgctcagaggatggggagatcgtgtctacccccaggctgcagtattatgacaaggttttacgactactagatgtcattggtttgcctgaactggttattcagttggctacatcagccataactgaagcaagtgatgactggaaaagtcaggctactctaaggacatgtattttcaaacatcatttggatttgggtcacaatagccaagcatatgaagccttaacccaaattcctgattccagcaggcaattagattgtttacggcagttggtggtagttctttgtgaacgctcacagctacaggatcttgtagagtttccctatgtgaatctgcataatgaggttgtgggaataattgagtcacgtgctagagctgtggaccttatgactcacaattactatgaacttctgtatgcctttcacatctatcgccacaattaccgcaaggctggcacagtgatgtttgagtatggaatgcggcttggcagagaagttcgaactctccggggacttgagaaacaaggcaactgttatctggctgctctcaattgtttacgacttattcgtccagaatatgcgtggattgtgcagccagtgtctggtgcagtgtatgatcgccctggagcatcccctaagaggaatcatgatggagaatgcacagctgcccccacaaatcgacaaattgaaatcctggaactggaagatctggagaaagagtgttccttggctcgcatccgcctcactttggctcagcatgatccatcagcggttgcagttgctggaagttcatcagcagaggaaatggtcactctcttggttcaggcgggcctctttgacactgccatatcactctgtcagacttttaagcttcccttaacgccagtctttgaagggcttgccttcaaatgcatcaaattgcaatttggaggagaggcagcacaagcagaagcctgggcctggctagcagccaatcagctctcatctgtcatcactactaaggagtctagtgctacagatgaagcatggcgactattatccacttacctggagaggtacaaagtccagaataacttgtatcaccactgtgtaatcaacaagctcttgtctcatggagtgcctctgcctaattggcttataaacagtcacaacatcgcactgtcccaaaaagttgataaggcaacacgggatttattatatcgtcggaccttgtgatttggattgtcacctagcctttgtaaccgcttggtgcctcttaggacttaagactaccctacaggaaccctgtactcaaggccgatttttgtaactgtaaatgatgtgtacaacattcaagtctgcattctgcacaagataggagggcggaagagtcagaggaccctgtgcttgctggtggtgctaacacaatttctggtgttcaaccttggtctcaaatagctgcttttgtatatgattcacgagcttttttagagtttatatttttttaaactaccgaagacattcattatctgcaaattaagactcaccttcactttccaaaatagctgagggttgttggcttgttgtagctgaccaccaaaagcagtcactgcaaatcttttaattcttccctatcaccttttgtattttaatgcaattattttggtccagaactgacctgtattttctgtattgtacacaaaagctaataattttgtgtactttttatttattttggaggttttatatgatcttcaattgagtattaaataatttgcctagattaagcctaaaatgatgaccagctaattaaagaagatattttgaatctggttctgagctaaagttgagtaaattcttagctaagaaaaaattggaaatccatcatctatattagcaacagattctcagagtaaattgttaacttctatgatttatgataatcaagctggacttgatcatacaagttagtctcataatgtattggaccaaaatgtaaacttcattggtcagatttagaagcattcatgctcacaagttttgggaaagtgaaaaataataaaatcatcttggattttattctgtatattaaaatttatctttt

SEQ ID NO: 789 - protein, 1314 aa, Homo sapiens
AAGALERSFVELSGAERERPRHFREFTVCSIGTANAVAGAVKYSESAGGFYYVESGKLFSVTRNRFIHWKTSGDTLELMEESLDINLLNNAIRLKFQNCSVLPGGVYVSETQNRVIILMLTNQTVHRLLLPHPSRMYRSELVVDSQMQSIFTDIGKVDFTDPCNYQLIPAVPGISPNSTASTAWLSSDGEALFALPCASGGIFVLKLPPYDIPGMVSVVELKQSSVMQRLLTGWMPTAIRGDQSPSDRPLSLAVHCVEHDAFIFALCQDHKLRMWSYKEQMCLMVADMLEYVPVKKDLRLTAGTGHKLRLAYSPTMGLYLGIYMHAPKRGQFCIFQLVSTESNRYSLDHISSLFTSQETLIDFALTSTDIWALWHDAENQTVVKYINFEHNVAGQWNPVFMQPLPEEEIVIRDDQDPREMYLQSLFTPGQFTNEALCKALQIFCRGTERNLDLSWSELKKEVTLAVENELQGSVTEYEFSQEEFRNLQQEFWCKFYACCLQYQEALSHPLALHLNPHTNMVCLLKKGYLSFLIPSSLVDHLYLLPYENLLTEDETTISDDVDIARDVICLIKCLRLIEESVTVDMSVIMEMSCYNLQSPEKAAEQILEDMITIDVENVMEDICSKLQEIRNPIHAIGLLIREMDYETEVEMEKGFNPAQPLNIRMNLTQLYGSNTAGYIVCRGVHKIASTRFLICRDLLILQQLLMRLGDAVIWGTGQLFQAQQDLLHRTAPLLLSYYLIKWGSECLATDVPLDTLESNLQHLSVLELTDSGALMANRFVSSPQTIVELFFQEVARKHIISHLFSQPKAPLSQTGLNWPEMITAITSYLLQLLWPSNPGCLFLECLMGNCQYVQLQDYIQLLHPWCQVNVGSCRFMLGRCYLVTGEGQKALECFCQAASEVGKEEFLDRLIRSEDGEIVSTPRLQYYDKVLRLLDVIGLPELVIQLATSAITEASDDWKSQATLRTCIFKHHLDLGHNSQAYEALTQIPDSSRQLDCLRQLVVVLCERSQLQDLVEFPYVNLHNEVVGIIESRARAVDLMTHNYYELLYAFHIYRHNYRKAGTVMFEYGMRLGREVRTLRGLEKQGNCYLAALNCLRLIRPEYAWIVQPVSGAVYDRPGASPKRNHDGECTAAPTNRQIEILELEDLEKECSLARIRLTLAQHDPSAVAVAGSSSAEEMVTLLVQAGLFDTAISLCQTFKLPLTPVFEGLAFKCIKLQFGGEAAQAEAWAWLAANQLSSVITTKESSATDEAWRLLSTYLERYKVQNNLYHHCVINKLLSHGVPLPNWLINSHNIALSQKVDKATRDLLYRRTL

SEQ ID NO: 790 - DNA, 4069 bp, Homo sapiens
ctggaatgaggagctgcagacgacgagggagctgcctcgcaagaacctgcctgagcggctgctccgagaaagggccatattcaaggtgcacagcgacttcaccgcggcagccaccaggggcgccatggccgtcattgacggcaacgtgatggccatcaaccccagcgaggagaccaagatgcagatgttcatctggaacaacatcttcttcagcctgggcttcgacgtccgagaccactacaaggacttcgggggggacgtggcggcctacgtggcgcccaccaacgacctgaatggcgtccgcacgtacaacgcggtggacgtggaggggctgtacacgctgggcacggtggtggtggattaccgcggctaccgggtcacggcccagtccatcatccccggcatcctggagcgggaccaggagcagagcgtcatctacggctccatcgacttcggcaagaccgtggtgtcacacccgcggtacctggagctgctggagcgcacgagtcggcccctcaagatcctgcggcaccaggtgctcaacgaccgtgacgaggaggtggagctctgctcctcggtcgagtgcaagggcatcattggcaacgacgggcgccactacatcctcgacctgctgcgcaccttccccccggacctcaacttcctgcccgtgcctggcgaggagctgcctgaggaatgcgcccgcgccggcttcccccgcgcccaccggcacaagctctgctgcctgcgccaggagctggtggacgccttcgtggagcacaggtacctcctctttatgaagctggccgccttgcagctgatgcagcagaacgccagccagctggagaccccctcctccctggaaaatggtggtccttcctccttggagtccaagtctgaggatcctccaggacaggaggcgggaagtgaggaggagggtagcagcgccagcggcctggccaaggtgaaggagctggcagagaccatcgccgcagacgacggcacagcagaccctcggagccgggaggtgatccgcaacgcgtgcaaggcggtcggctccatcagcagcaccgccttcgacattcgcttcaatcctgacatcttctcaccaggggttcgtttccctgagtcctgccaggatgaagttcgggaccagaagcagctgctgaaggacgcggctgccttcctgctctcctgccagatccctggcttggtgaaggactgcatggagcacgcggtcctgcccgtggacggggcaacgctggcagaggtgatgcgccagcggggcatcaacatgcgctacctgggcaaggtgctggagctggtgctgcggagcccggcccgccaccagctggaccacgtctttaaaatcggcattggagaactcatcacccgctcggccaagcacatcttcaagacgtacttacagggagtcgagctctccggcctctcagccgccatcagccacttcctgaactgcttcctgagctcctacccaaaccccgtggcccacctgcccgccgacgagctggtctccaagaagcggaataagaggaggaaaaaccggcccccgggggctgcagataacacagcctgggctgtcatgaccccccaggagctctggaagaacatctgccaggaggccaagaactactttgacttcgacctcgagtgtgagaccgtggaccaggctgtggagacctacggcctgcagaagataacgctcctgcgggagatctcgctgaaaacagggatccaggtcctgctgaaggagtacagcttcgacagtcgccacaagcccgcgttcaccgaggaggacgtgctcaacatcttccccgtggtcaagcacgtcaaccccaaggcctcggatgccttccatttcttccagagcgggcaggccaaagtgcagcagggcttcctgaaggagggctgtgagctcatcaatgaggccctgaacctgtttaacaacgtctacggagccatgcacgtggagacctgcgcctgcctgcgcctcctcgcccgcctccactacatcatgggcgactacgcagaggccctgagtaaccagcagaaggcggtgctgatgagcgagcgggtgatgggcaccgagcaccccaacaccatccaggaatacatgcacctggccctgtactgcttcgccagcagccagctgtccaccgccctgagcctgctgtaccgcgcccgctacctcatgctgctggtgttcggggaagaccaccccgagatgggctgctggacaacaacatcgggctggtgctgcacggggtgatggagtacgacctgtcgctgcgcttcctggagaacgcgctggccgtcagcaccaagtaccacgggcccaaggccctcaaggtggccctcagccaccaccttgtcgcccgagtctacgagagcaaagctgagttccggtcggccctgcagcacgagaaggagggttacaccatctacaagacgcagctgggcgaggaccatgagaagaccaaggaaagctccgagtacctcaagtgcctgacccagcaggccgtggccctgcagcgcaccatgaacgagatctaccgcaacggctccagcgccaacatcccgcccctcaagttcacggcccccagcatggccagcgtcttggagcagctgaacgtcattaacggcatcctcttcattcctctcagccaaaaagacctggagaatctgaaagccgaggtggcgcggcggcaccagctccaggaggccagcagaaacagggatagagccgaggagcccatggctaccgagcccgcgccagcgggggccccaggagacctgggctcccagcccccggctgccaaggacccttctccgagcgtgcagggatagagagggagccagacggacagccagccagcggccccgtcaccagggagcccgactgcgggagaagggggcgagcctgcgggcggaagaggaagcaaggccctcttcctccacgtctcaccccaccccacccccgtgtcctcctgggagcctggcctgcctgccccgcagaaggtgtttttgcgctggttcaatgaatagatgatgcagaggccccattggagacacgtgaatggcgtgtgcggccatcagttcccggctggggggcaggtgttgcttcggcccccgccctccggccggcgtgtgcgagtgcgcccctggctgtgagtgttgaccgttcctctcccctgtacatagcccgagccagtcctgagtgggtgactcctgagtgggtgacgcgcagacgggatttctcaggtcatttgtatggtcgacatgatggctgctgctttggctgccaccacccccgggcccagcctgtctgaaagttcagggtttaggccgaaaaacccggtggggaggggtggggagccggagctctgtggcggggctggagggctggggtgcactttagtttggggcgggacgggagccgccgttgtgactggcgtggtctggctgctgctcccgaacggaggggtcggggttggcttgctgggccctcagagcccagtgggtggctctgactcggctccctactccctgcacccagctgggcgcagccttggggcctgcggtctgaatgtatccctcccctcagttttaacctgagctgccgaacgcacagtgggccgggggcgaggctgggggaagcggggcccaattacggatcccgggagttacaggtgccgacgtgatgtcgcttctctggtgcccagctcccttcctggtctgagactagctctgggggtggcgggggcccccacacgctgctcccgctccaccctgcccgtgctgctgctctgtgcctgctgtcagagccctggtgggggaggatgtggccaccctgagacccggaggagacgggcgtctgcctgggtttgcggagagccgcttatgggtgtggtccgtccagacaccttgtttcaagggggatgggcgtgagcgggcaagcagagcatccccaccgctgagcaagaactttttcttgtttttaaaccatcacgtcctcatttcacattggaataaagtgagtttttgaaacctg

SEQ ID NO: 791 - protein, 720 aa, Homo sapiens
MAVIDGNVMAINPSEETKMQMFIWNNIFFSLGFDVRDHYKDFGGDVAAYVAPTNDLNGVRTYNAVDVEGLYTLGTVVVDYRGYRVTAQSIIPGILERDQEQSVIYGSIDFGKTVVSHPRYLELLERTSRPLKILRHQVLNDRDEEVELCSSVECKGIIGNDGRHYILDLLRTFPPDLNFLPVPGEELPEECARAGFPRAHRHKLCCLRQELVDAFVEHRYLLFMKLAALQLMQQNASQLETPSSLENGGPSSLESKSEDPPGQEAGSEEEGSSASGLAKVKELAETIAADDGTADPRSREVIRNACKAVGSISSTAFDIRFNPDIFSPGVRFPESCQDEVRDQKQLLKDAAAFLLSCQIPGLVKDCMEHAVLPVDGATLAEVMRQRGINMRYLGKVLELVLRSPARHQLDHVFKIGIGELITRSAKHIFKTYLQGVELSGLSAAISHFLNCFLSSYPNPVAHLPADELVSKKRNKRRKNRPPGAADNTAWAVMTPQELWKNICQEAKNYFDFDLECETVDQAVETYGLQKITLLREISLKTGIQVLLKEYSFDSRHKPAFTEEDVLNIFPVVKHVNPKASDAFHFFQSGQAKVQQGFLKEGCELINEALNLFNNVYGAMHVETCACLRLLARLHYIMGDYAEALSNQQKAVLMSERVMGTEHPNTIQEYMHLALYCFASSQLSTALSLLYRARYLMLLVFGEDHPEMGCWTTTSGWCCTG

SEQ ID NO: 792 - DNA, 1587 bp, Homo sapiens
tggcactaggggcagccactcagcccttcgagctgtaggggaggcgctgcgcccccggccccagccgatcgggggctcctggcgctactgccctccagagtccctcctgccgtctgacttgagtccctgctgctgcagtgcacgcccccctttcggcagccagggtggggcccagacccaacctggcccctcctgcccccaccccgcctttgggtcgctgacccccaggctgtggtgagggtctgagagctggtaccacggagcctgggcaacctcctccgcccacccatgcccaccccgcatgaggctgagaagcagatcacagggccagaggaggcggaccggcccccttcaatgtccagtcatgatacagcctctccagcggcccccagccgcaacccctgctgcctgtgctggtgctgctgctgtagctgctcctggaaccaagagcggcggcgcgcgtggcaggcctcccgggagagcaagctgcagcccctccccagctgtgaagtatgtgccacgccaagtcctgaggaggtgcagagctgggcgcagtcttttgacaagctgatgcacagcccagcgggacgcagcgtgttccgggcgttcctgcggacagagtacagcgaggagaacatgctcttctggttggcctgcgaggagctgaaggccgaggccaaccagcatgtggtagacgagaaggcgaggctcatctacgaggactacgtatccatcctgtcccccaaggaggtgagcctggactcccgtgtgcgggagggcatcaacaagaagatgcaggagccgtccgcacacacgttcgacgacgcgcagctgcagatctacacgctcatgcaccgggactcctacccccgcttcctcagctctcccacctaccgtgccctgctgctgcaggggccatcacagtcctcctccgaggcctaggccgcccccagcagcacagaccccgccgcctcctacggccgactctgggttcccttcaggtgttggtgtcggcagggctgtcagggcacatgcctggccggctggggtccccacccgcggagacggtcctagacccagtggggagtgctgtgtctcctgggtctgcccacccgtggccaagcaggaactccaggtgcagggcgggcctccaggtgcagggcgggccagaagccccctcatcggcccgcagctggctggcccagtgctcctggctgggggctcttgcgtggtgagagtaggggtccccccaggagccatgctggacccatgagcctcgctggggcctcctccccaggcagccaatgggccccagacaagcctttggtggggaacagaacctccgcatcgtgtagttttgtgacataaggagacctcctacttgagctgtctgtaccccagaatcaaacacagaactcagaaccagatttaggccctcagaatcctgcactcaaggtggcaggacccaatttctgttttatatgttcatgaactttaaacctggaaacatgtccttactaggtgttttatcaaaaaaaagttttttattattgaagatatttttaaagcaaaaaaaaaaaaaaaaaa

SEQ ID NO: 793 - protein, 217 aa, Homo sapiens
MPTPHEAEKQITGPEEADRPPSMSSHDTASPAAPSRNPCCLCWCCCCSCSWNQERRRAWQASRESKLQPLPSCEVCATPSPEEVQSWAQSFDKLMHSPAGRSVFRAFLRTEYSEENMLFWLACEELKAEANQHVVDEKARLIYEDYVSILSPKEVSLDSRVREGINKKMQEPSAHTFDDAQLQIYTLMHRDSYPRFLSSPTYRALLLQGPSQSSSEA

SEQ ID NO: 794 - DNA, 4596 bp, Homo sapiens
gcggagcctaggagtcagataccgcgagaagtagtctcccgaagaggttcggacaagcgcaggcgcactacaattcccgccctggccgcgaaggtggcacccgcagcgggaggcggggccgggccttcgggacaaagatcgcgagatttaatggcgagtcacagctacttcttcctggcagagaccggaagtgcggtccgcggagcgtctctggcgcttaccctgctttgggcctgcgttgctgctgctgctcctccgctcccccgtcgtatcgcctgccctggatcgaagtgatgggggatgccaaggaggccggagccgagggtccgccggccggggccgccgctcgaggagggctcagcctcctgtcccagggagaatccgaggaatcttctgcacagggatcagctttatttcttggaggcaatgaagtgaagagccgagctgtggtgaaatactcttctgcccctcctcgaacagcatttgcacgccttgaagagaaaacagacttgaaactcccacctgccaactggttacgagagagtgccaaactagggccagcaggaactaccattcttggcaacagcaagaaaagcaagccattttcaagctttggcatggcatatgactttattgattcagtgggaaatgatgtggatgttgtctctgactctgaaaacataaaaaaactcctgaaaattccctacagcaagtcgcacgtgagcatggcagtacaccgcataggaaggactctcttactagatgagctagatattcaagaactctttatgagatcgtctcagactggtgactggacatggttgaaagagttttatcaaagactcattgatcagaagtggcagaggaagaaaaagagcaaagagcactggtatcaaaaggcaattctttccaagtttttatattacagtatcaatggtgatggagccgctcagcctgtctcatccaccgcagaacagcaggaatcgtccagttcagatcagacaaatgattcggaaggggcttcatggcctgctcccttcgaaatgccttcttcagtttctgaagatcccagtgcttccagtcagggtcttaaaaatgattttgttcggaatattctatggacatttgaagatatccatatgttggtcggctccaacatgcccatatttggaggaggcagatacccagcagtcagcttacgtctcagggataacaacaaaccaattaatgtgctaactggaattgactattggttggacaacttgatatgcaatgtgccagagcttgtgatgtgttttcatgtaaatggaattgtacagaaatatgaaatgataaagacagaagaaattcccaatttggaaaattctaatttttctactaaagtcataaaagacattgcacagaatattttatcatttttgaaatctaattgtaccaaagaaggacatacctattggctctttaaagcaagtggcagcgatatagtgaagctctatgacctcactactctttgtgaagaaactgaagacaaataccaaaatccattcacaatgccggtagccattctcttgtacaaggttgcttgcaacatgatgatgaagaagaatcaaaataagaaacactatggaactattagaacattgcttcttaattgtctgaaattactggacaaaagtaggcatcctcaaattattgcttccgccaattacatgctttcagaactttttcaattggatgaacctaaaaaggaagaaaattcagaatctcctttaaatgagaattctgatgaaagttatagtgaagaggaggaagagatgcccgacagtgatgaaaatggatcctatagcaccagctctgatccatcagatgatagcaaagcagtagctataatcaagtctgttggagaactatcagtaccagaaaaatacaaatctattcatcaaatcagacccagttgtgcatttccagtttgccatgacacagaagagcgctgtagacttgtgcttagctatgttctagagggtttaaaatctgtcgatagcagcatcaaaaaagaaagcgaccttccagcagctgaccccagcactccaatcccgttaaaatatgaagatgaatcctcaagagggggtcccgaggggctagagaagcagatggccttgtttttggacaaaatgggctcccttcagaagggcaattattccagtcaatctggaatgatccctggctcttggcaacataaaatgaaacttcagctgattctcaagtcatcaaaggcctattatgttttgtccgatgctgccatgagtcttcagaaatacggaagagcattacgatacattaaattagctttgcaaagccatgatacttattgctgcctctgcaccaatatgctttccgaagtgctgttgtttctctctcaatatttgacactttgtggtgatatccaactaatgctggcccagaatgcaaataatagagcagcacaccttgaagagtttcattaccaaacaaaagaagaccaggagatcctgcatagccttcacagagagtccagttgccaaggatttgcatgggcaactgatttgtctacagacttagaaagtcaactctctgttagttgtaaatgttatgaggctgctaatgaaatcttgcagtttagtgacttgaaaagccaaaatccagaacactatgtacaagtattaaagagaatgggtaacattagaaatgaaattggtgtgttttacatgaatcaggctgctgcattacagagtgagagactagtgagcaaatctgtgtctgctgccgagcaacagttgtggaaaaaaagcttttcttgttttgaaaagggaattcacaactttgaatcaattgaggatgccaccaatgccgcccttttattatgtaacacgggaaggctcatgcggatttgtgcgcaggcccactgtggtgcaggggatgaactgaaacgtgaattttcaccagaagaaggcttgtattataataaggctattgattactatttgaaagcgctaaggtcattgggaacacgagacatacacccagctgtttgggattcagtgaactgggaattgtccactacttactttactatggcaactctacagcaagattatgctccgttatctagaaaagctcaggagcagattgagaaagaagtcagtgaggccatgatgaagtccctaaaatactgcgatgtggattcagtgtctgctcgacagcccctttgtcagtatcgagctgcaaccatccatcacaggctggcctccatgtaccacagctgtctgaggaatcaggttggtgatgaacaccttaggaaacaacaccgggtgctggcagatcttcattacagcaaggccgcaaagctgtttcagctgctgaaagatgctccctgcgaactgcttagagtacagctagagagagtagcatttgctgaatttcagatgaccagtcagaatagcaatgttggaaagttgaaaacactatctggggctcttgatataatggtgagaactgagcacgcattccagcttatccagaaggagcttatagaagaatttggccagcctaagagtggtgacgccgctgcagctgctgatgcttctcctagtctcaatcgagaagaagtgatgaaactcctcagtatatttgagtctcggttgtcatttcttctccttcagtccattaaactgctatcttcaactaaaaagaaaacaagcaataacatcgaagatgacacaattctcaaaaccaacaagcacatttactcccagcttttgagagcaactgcaaataaaaccgcgactcttctggaaagaatcaacgttatcgtccacctgctgggccagcttgccgccggcagtgcagcgagcagcaatgccgttcagtgactgcacagagccgtgtcccagacacgctgtcagtgccttcaacacggagccggtttgttcattcggtgctttgtttcattaaataatagggaaatatccatttaaaacaggtatatcagtggaaacacagagttattttaagtgacagacaaattacggttgagttctgtggcttcttcacttgaagtgctaacatcagaatcaaacttaaagcttccactatttatgtctttgagaagtatgtagtacctcggtattaacagacctgctgtgatgcagttacactttcacgtatttttgaagtatgtcaagctacacgggtctaagatatgattattttggataaaatgttactttggtcaagagaacttttatccagatgacattacaggttcaagtgggttaaggagacctcctgtacatctacagtgtttccttttaaattgtccagaaaaaaggtgtgttcttcataagcttcagtgcaggatttttcaaagacgagctgttgtgcaatttgctgtatttaatgcatgttctgaaaggattcacttttgactttatatgacagttgatcaagaacaggtactacccctttttttcatttcaaacttgaaactgtgaataaggtaagaaaactattttgaataaataaactatttatttaaaatgtcaaaaaaaaaaaaaaaaa

SEQ ID NO: 795 - protein, 564 aa, Homo sapiens
MIPGSWQHKMKLQLILKSSKAYYVLSDAAMSLQKYGRALRYIKLALQSHDTYCCLCTNMLSEVLLFLSQYLTLCGDIQLMLAQNANNRAAHLEEFHYQTKEDQEILHSLHRESSCQGFAWATDLSTDLESQLSVSCKCYEAANEILQFSDLKSQNPEHYVQVLKRMGNIRNEIGVFYMNQAAALQSERLVSKSVSAAEQQLWKKSFSCFEKGIHNFESIEDATNAALLLCNTGRLMRICAQAHCGAGDELKREFSPEEGLYYNKAIDYYLKALRSLGTRDIHPAVWDSVNWELSTTYFTMATLQQDYAPLSRKAQEQIEKEVSEAMMKSLKYCDVDSVSARQPLCQYRAATIHHRLASMYHSCLRNQVGDEHLRKQHRVLADLHYSKAAKLFQLLKDAPCELLRVQLERVAFAEFQMTSQNSNVGKLKTLSGALDIMVRTEHAFQLIQKELIEEFGQPKSGDAAAAADASPSLNREEVMKLLSIFESRLSFLLLQSIKLLSSTKKKTSNNIEDDTILKTNKHIYSQLLRATANKTATLLERINVIVHLLGQLAAGSAASSNAVQ

SEQ ID NO: 796 - DNA, 4664 bp, Homo sapiens
gccgctgagggagcccttccccgccagcgcgtgcccttccactccgccccgaggtcgcagcggcccgctctcccgccagcgccccctcctcgcggccacgcagcagcccgcgtctcgctctccccacccagtgcagtggccgccgcctcttccgccgccgggctcggggcctccgcagcgacaacatggaggccgtgaagaccttcaatagcgagttgtattccctgaatgactataaaccacccatttcgaaagcgaaaatgacccaaattactaaggcagccatcaaagctattaagttctataaacatgtggtacagagtgttgagaagtttattcagaaatgtaaaccagaatacaaagtacctggactttatgttattgactccattgtgcgacaatcccgacatcagtttggtcaagaaaaggatgtgtttgcacccagatttagtaataacatcattagcactttccagaatttatatcgttgccctggggatgacaagagtaaaatagtgagagtactaaacttatggcagaagaataatgtatttaagagtgagattattcagccccttttggatatggcagccgggattccgcctccagttgtcacacctgttttggccagcactaccactgctatgagcaatactccaggaactcctgtgacacctgttactccggccaatgtggtccaaggcttacctgatccgtgggtatctcagataacaaatacagatacacttgcggctgtagctcagatcttgcaaagtcctcaaggccagcagcttcaacaattaatacaaaccttacagatacaacaacagaagccccagccttccattctgcaggccctagatgctggtcttgttgttcagttgcaagctcttacggcacaacttacagctgcagctgcagctgccaacactcttactcccttagaacagggagtctcctttaacaagaagttgatggataggtttgattttggggaagactctgagcatagtgaagaacccaaaaaggaaattccagcttcacaactttctcacgtttcagaatctgtgaacaattccatttttcatcagatagcagaacaactacaacagcaaaacctagaacatctcagacagcagctcttggagcagcaacagcctcaaaaggccactcctcaggatagtcaggaaggaacctttgggtcagagcattcagcgtcaccatcacaagggagtagtcagcagcattttcttgaacctgaagtcaatttggatgattccatagatattcagcaacaggatatggatatagatgaagggcaagatggagtggaagaggaggtctttgaacaagaagctaagaaagtggcggttcgctcaagatcaagaacacattcacgatctcgttcaagatcaccaagaaaacgaaggtctaggtcacggtctggctctagaaagcgtaaacacagaaagcgatcacgctcccgctcaagagaaagaaagaggaaatcatcacggtcgtattcaagtgaaaggagagccagagaaagggagaaagaacgacagaaaaagggattacctccaattagatctaaaacactaagtgtatgtagtactactctctgggttgggcaagtggacaagaaggcaacacagcaagacttaaccaacctgtttgaagagtttggacagattgaatccattaatatgattcctccccggggctgtgcttatgtctgcatggttcatcgacaagatgcatttcgagctcttcagaaactcagttctggatcatataaaattgggtccaaggtcattaagattgcttgggctttaaacaaaggtgtaaaaacagaatacaaacaattctgggatgtggatcttggagttacatatataccatgggaaaaagttaaagtggatgacttggaaggttttgcagaaggaggcatgattgatcaggagactgtaaatactgagtgggaaactgtgaaaagctcagaacctgttaaagagacggtccagacaactcagagcccaactccagttgaaaaggagacagtggtcacaacccaggcagaggttttccctcctcctgttgctatgttgcagattccagtggcgccagccgtgcctacagttagtttagtcccaccagcatttcctgtgtcgatgccggttcctcctcctggattcagtccaatccctccacctccttttttaagagcaagttttaacccttcacaaccaccacctggtttcatgccgcctccagttcccccacctgttgtgccaccccctacgattccaccagtagtaccaacatctttagtgcagccgtcattatccatgacaccggaaactgtgaaagatgttggatttggtagccttgttataccaggcggttctgttgccagcaatcttgctacttccgctctgccagctggaaatgtttttaatgctccaactaaacaggcagagcctgaagaaaaagtacctcatcttatagaccaccagatttcttctggtgaaaacaccagatcagtgattccaaatgatatttcaagtaatgctgcaattttaggaggacagccgccaaatgtgacaagcaattctggaattctgggagtccaaagaccaaatgtatcaagtaattctgaaattcttggggtccggccatctaatgtttccagtagttctgggattattgcagcccaaccaccaaatattctaaataactctggaatattgggaatacagccacccagtgtgtcaaatagttctggacttttgggagtgctacccccaaatatacctaacaattctggacttgtaggagtacagccaccaaatgttccaaatactcctggacttctgggaacacagccaccagctggacctcaaaacttaccccctttaagtatccctaatcaaaggatgcccacaatgccaatgttagacattcgtccgggactaataccacaggcacctgggccaagattccctttaatacagcctggaattccaccccaacggggaatcccacccccatcggtacttgattcagctcttcatccaccaccccgtggaccttttcctccaggagatatttttagtcaaccagaaagaccttttttagctcctggaagacaaagcgtagacaatgttactaacccagaaaaaaggataccacttgggaatgataacattcaacaggaaggagatagagattaccggtttcctcctatagaaaccagggaaagcattagtagacctccccctgtggatgttagagatgtggttgggcggcctatagatccaagagaaggtcctggacggcctccactagatggtagggatcattttggaagacctcctgtagatataagagagaatcttgtgaggccaggtatagatcatcttggtcgaagagaccactttggctttaatccagagaagccctgggggcatagaggagattttgatgagagagagcatcgggttctaccggtctatggtggtccaaaaggcttacatgaagaaagaggtagatttcggtctggaaactatcgatttgatcctagaagtggtccttggaaccgaggatttggacaagaagttcacagagattttgatgaccgcagaagaccctgggagaggcaaagggatagggatgacagagattttgatttctgcagagaaatgaatggaaatcgtcttggacgagacagaattcaaaacacttgggttccccctcctcatgctcgggtttttgattattttgaaggggccacttctcaacgaaaaggtgataatgtgcctcaggttaatggtgaaaatacagagagacatgctcagccaccacctataccagtacagaatgatcctgaactttatgaaaaactgacatcttcaaatgaaataaacaaggagaagagtgacacagttgctgatatagaaagtgaaccagtggtagaaagcacagaaactgaggggacataatcatcactcagtaggtaaaagataccttttgtaaagttgtcatctctctgtaatagataatggctgactggaccatagttgttcacttttgtctgccagaattaagttaatctgatgttcatgttcacctttctcttaaaataattgtacaactgacttgtatagacattgttcttaatatgaacatggtaggtaaactttttttttatttttttctgataaaatacaaatgttggccccagattcttttaacgtcaaggaaatgaataacagcttgtcagagacttcctatggaagaaagaattttttagatactatcattaggttggatatggtaatagatatatttcagaatagcaagtggtggtatatcttatccatatctttaggctgctgcagaattttaaggttatagataaagctgtgatattttatgcaaagactggctctaggtatttgaggagcacaatacagagattttaaaaagtgattttgtaaaatctacactatggtctctgtttctccaaagtaagtgtttgtgatttgttcctcatactgcagtgagtaaaaaagaaacaagaaaacaacaacataaatattaaagtacgtttcaatgttgggtgaattttgtttttagatgccaataaaacttatttgtttgat

SEQ ID NO: 797 - protein, 1271 aa, Homo sapiens
MEAVKTFNSELYSLNDYKPPISKAKMTQITKAAIKAIKFYKHVVQSVEKFIQKCKPEYKVPGLYVIDSIVRQSRHQFGQEKDVFAPRFSNNIISTFQNLYRCPGDDKSKIVRVLNLWQKNNVFKSEIIQPLLDMAAGIPPPVVTPVLASTTTAMSNTPGTPVTPVTPANVVQGLPDPWVSQITNTDTLAAVAQILQSPQGQQLQQLIQTLQIQQQKPQPSILQALDAGLVVQLQALTAQLTAAAAAANTLTPLEQGVSFNKKLMDRFDFGEDSEHSEEPKKEIPASQLSHVSESVNNSIFHQIAEQLQQQNLEHLRQQLLEQQQPQKATPQDSQEGTFGSEHSASPSQGSSQQHFLEPEVNLDDSIDIQQQDMDIDEGQDGVEEEVFEQEAKKVAVRSRSRTHSRSRSRSPRKRRSRSRSGSRKRKHRKRSRSRSRERKRKSSRSYSSERRAREREKERQKKGLPPIRSKTLSVCSTTLWVGQVDKKATQQDLTNLFEEFGQIESINMIPPRGCAYVCMVHRQDAFRALQKLSSGSYKIGSKVIKIAWALNKGVKTEYKQFWDVDLGVTYIPWEKVKVDDLEGFAEGGMIDQETVNTEWETVKSSEPVKETVQTTQSPTPVEKETVVTTQAEVFPPPVAMLQIPVAPAVPTVSLVPPAFPVSMPVPPPGFSPIPPPPFLRASFNPSQPPPGFMPPPVPPPVVPPPTIPPVVPTSLVQPSLSMTPETVKDVGFGSLVIPGGSVASNLATSALPAGNVFNAPTKQAEPEEKVPHLIDHQISSGENTRSVIPNDISSNAAILGGQPPNVTSNSGILGVQRPNVSSNSEILGVRPSNVSSSSGIIAAQPPNILNNSGILGIQPPSVSNSSGLLGVLPPNIPNNSGLVGVQPPNVPNTPGLLGTQPPAGPQNLPPLSIPNQRMPTMPMLDIRPGLIPQAPGPRFPLIQPGIPPQRGIPPPSVLDSALHPPPRGPFPPGDIFSQPERPFLAPGRQSVDNVTNPEKRIPLGNDNIQQEGDRDYRFPPIETRESISRPPPVDVRDVVGRPIDPREGPGRPPLDGRDHFGRPPVDIRENLVRPGIDHLGRRDHFGFNPEKPWGHRGDFDEREHRVLPVYGGPKGLHEERGRFRSGNYRFDPRSGPWNRGFGQEVHRDFDDRRRPWERQRDRDDRDFDFCREMNGNRLGRDRIQNTWVPPPHARVFDYFEGATSQRKGDNVPQVNGENTERHAQPPPIPVQNDPELYEKLTSSNEINKEKSDTVADIESEPVVESTETEGT

SEQ ID NO: 798 - DNA, 4960 bp, Homo sapiens
agcggggaggcgcctcccagcctgctatgggatggatgaagaagagaaccactatgtctcgcagctcagggaagtctacagcagctgcgacaccacggggactggctttctggaccgccaggagctgacccagctctgccttaagcttcacctggagcagcagctgcccgtcctcctgcagacgcttctcggaaacgaccatttcgccagggttaactttgaggaatttaaggaaggttttgtggctgtgttgtcttcaaatgctggtgttcgcccctcagatgaagacagtagttctttggaatcagctgcctccagtgccatccctccaaagtatgtgaatggttctaagtggtatggccgtcggagccggcctgagctatgtgacgctgccacagaagccagacgcgtgccggagcagcaaacccaggccagcctgaaaagtcacctctggcgctcagcgtctctggagagcgtggagagtcccaagtcagatgaagaggccgagagcactaaagaagctcagaatgaattatttgaagcacaaggacagctgcagacctgggattctgaggactttgggagcccccagaagtcctgcagcccctcctttgacaccccagagagccagatccggggcgtgtgggaggagctgggggtgggcagcagcggacacctgagcgagcaggagctggctgtggtctgccagagcgtcgggctccagggactcgagaaagaggaactcgaagacctgtttaacaaactggatcaagacggagacggcaaagtgagtcttgaggaattccagcttggcctcttcagtcatgagcccgcgctacttctagagtcttccactcgggttaaaccgagcaaggcttggtctcattaccaggtcccagaggagagcggctgccacaccaccacaacctcatccctcgtgtccctgtgctccagcctgcgcctcttctccagcattgacgatggttctggcttcgcttttcctgatcaggtcctggccatgtggacccaggaggggattcagaatggcagggagatcttgcagagcctggacttcagcgtggacgagaaggtgaaccttctggagctgacctgggcccttgacaacgagctcatgacagtggacagtgccgtccagcaggcagccctggcctgctaccaccaggagctgagctaccagcaagggcaggtggagcagctggcaagggagcgtgacaaggcaaggcaggacctggagagggccgagaagaggaacctggagtttgtgaaagagatggacgactgccactccaccctggagcagctcacggagaagaaaatcaagcatctggagcaggggtaccgggaaaggctgagcctcctgcggtctgaggtggaggcggagcgagagctgttctgggagcaggcccacaggcagagggccgcgctggagtgggacgtggggcgcctgcaggctgaggaggctggcctccgcgagaagctgaccctggccctgaaggaaaacagtcgcctacagaaggagattgtggaagtggtggaaaagctttcggattcggagaggctggccctgaagctgcagaaggacctggagtttgtgctgaaggacaagctggagccacagagtgcagagctcctggcccaggaggagcggttcgcagcagtcctgaaggaatacgagctcaagtgccgggacctgcaggaccgcaacgatgagctgcaagctgagctggaaggcctgtgggcgcggctgcccaagaaccggcacagcccctcatggagcccggatgggcgcagacggcagctccctggactcggcccagcaggcatttcattcctgggtaattctgctccagtgagtatagaaacggagctgatgatggagcaggtaaaggagcattaccaagacctcaggacccagctggagaccaaggtaaattactacgaaagggaaattgcggcactgaaaaggaactttgagaaggagaggaaggacatggagcaggctcgccggcgcgaggtcagcgtgctggagggtcagaaggccgacctggaggagctccacgagaagtctcaggaggtcatctggggcctgcaggagcagctgcaggacacagcccgcggccccgagcctgagcagatgggcctggcaccctgctgcacccaggcactgtgtggcctggccctgcggcatcacagccacctgcagcagatcaggagagaggctgaggcggagctgagtggagagctgtcggggctgggagccctgcccgctcgcagagacctgaccttggagctggaggagccgccgcagggacccctgccacgcgggagccagaggtcggagcagctggagctggagagggcactgaagctgcagccctgtgcgagcgagaagcgcgcccagatgtgcgtatcgttggccctcgaggaggaggagttggagcttgcccgcgggaagcgagtggacgggccctccctggaagcagagatgcaggccctgccgaaagatgggctggtggcaggaagtggccaggagggcacacgtggcctcctaccactgcgtccgggctgtggggagcggccactggcctggctggccccaggtgatggcagagagtctgaggaggcggcaggagccgggcctcgccgcaggcaagcccaggacacagaagctacgcagagcccggcccccgcccctgccccggcatcccacggcccctcagagaggtggtcacgcatgcagccctgtggagtggatggggatattgtcccaaaggagccagagcctttcggcgcgagcgcagcggggctggagcagcctggagcccgggagctgcctctgctgggaacagagagagacgcctcgcaaacccagccacggatgccacccctgaggccggccgcttcgtgcgggggacaggctgagaggctacaggccattcaggaagagcgagcacgaagctggagcaggggcacccaggagcaggcctcggagcagcaggcccgggccgagggcgccctggagcctgggtgtcacaagcacagcgtggaggttgccaggagagggtccttgccatcccacctccagctcgcagacccgcagggttcctggcaggagcagcttgctgccccagaagagggggagaccaaaatagcgctggagagagagaaggatgacatggaaaccaaacttctacatctggaagacgtcgtccgggctctggagaaacatgtagatttgagagagaacgacagactggagttccatagactttctgaagaaaacactttgttgaaaaacgatctgggaagggttcggcaagagcttgaagctgcagaaagtactcacgatgcacagaggaaggaaattgaggttttaaagaaagacaaggaaaaggcctgctctgagatggaggtgctcaacagacagaatcagaactacaaggatcaattatcccagctcaatgtcagggttcttcaactgggacaggaggcttctacccaccaggcccaaaacgaggagcatcgtgtgaccattcagatgttaacacagagcctggaggaggtggttcgcagtgggcagcagcagagtgaccaaatccaaaaacttagagttgaacttgaatgcctgaatcaggaacatcagagcctgcagctgccatggtcagagctgacccagacccttgaggaaagtcaagaccaggtgcagggagctcacctgaggctgaggcaggcccaggcccagcacttgcaggaggtccggctggtgccccaggaccgtgtggccgagctgcatcgcctgctcagccttcagggagagcaggccaggaggcgcctggatgcacagcgggaagaacatgagaaacagctgaaagccacagaagagcgggtggaagaggcggagatgattctgaagaatatggaaatgctcctccaagagaaagtggataagctgaaggagcagtttgaaaagaacacgaagtccgacctgctgctgaaggagctgtacgtggagaacgcccacctggtgagagcacttcaggccaccgaggagaagcagcgaggcgccgagaaacaaagccgcctcttggaagaaaaagttcacgctctcaacaaactcgtcagtaggattgcccccgcagccctctctgtgtaaagacagattattttctaggattcattcgaaagcacatcttttaaattaagccactgtgctgccttagattccgtgggtcatgagccatgagtcctgggacatctgaggattgggattctttgttcaccccgcagatagttaatgaatggtctgccctgggcaagatggaggtgggggctgggggaatatgcatgttgcagaagccggcgtttttattagcggtcctgagtaatttcccttggcaaaattcccagttttgccactcgctggagccagatcctgggagctgtcagcaaggagcaggtaagtgagcagttatggacagcactttccatgtggtgcttccgaccctggctgtcagagtgaaatgtaaagtcagggctctgtacagttttgccatttcactgttctgctttaagcttagcttattagaactcttggtggagggtgcgtacacacattccagaaaaggcttcactcgctgggaacgtcaacccagcgagaaaggaggggaagccccttctccggggaccttatctgtggactcagggatgatggtgtttattgcaaatgcacaatctttttcccattgaaatgtcatcacactggaaattgtactatatgtaaaaaaaaaaaaaaagtatagttttatatttgaaatgtatgcaaattatggccatatggctgattggaatgtactactgtaatataaaaagtcactgtatttgcaataaattcttttctattaaaattgaaaaaaaaaaaaaaaagaaaaaaaaaaaaaaa

SEQ ID NO: 799 - protein, 173 aa, Homo sapiens
MERVLLCAASQQPHQSCLPFPMQVQGAHLRLRQAQAQHLQEVRLVPQDRVAELHRLLSLQGEQARRRLDAQREEHEKQLKATEERVEEAEMILKSMEMLLQEKVDKLKEQFEKNTKSDLLLKELYVENAHLVRALQATEEKQRGAEKQSRLLEEKVRALNKLVGRIAPAALSV

SEQ ID NO: 800 - DNA, 1488 bp, Homo sapiens
cttgggagagcttaatgaaaagagaacggagaggaggtgtgggttaggaaccaagaggtagccctgggggcagcagaaggctgagaggagtaggaagatcaggagctagagggagactggagggttccgggaaaagagcagaggaaagaggaaagacacagagagacgggagagagaagaagagtgggtttgaagggcggatctcagtccctggctgctttggcatttggggaactgggactccctgtggggaggagaggaaagctggaagtcctggagggacagggtcccagaaggaggggacagaggagctgagagaggggggcagggcgttgggcaggggtccctcggaggcctcctggggatgggggctgcagctcgtctgagcgcccctcgagcgctggtactctgggctgcactgggggcagcagctcacatcggaccagcacctgaccccgaggactggtggagctacaaggataatctccagggaaacttcgtgccagggcctcctttctggggcctggtgaatgcagcgtggagtctgtgtgctgtggggaagcggcagagccccgtggatgtggagctgaagagggttctttatgacccctttctgcccccattaaggctcagcactggaggagagaagctccggggaaccttgtacaacaccggccgacatgtctccttcctgcctgcaccccgacctgtggtcaatgtgtctggaggtcccctcctttacagccaccgactcagtgaactgcggctgctgtttggagctcgcgacggagccggctcggaacatcagatcaaccaccagggcttctctgctgaggtgcagctcattcacttcaaccaggaactctacgggaatttcagcgctgcctcccgcggccccaatggcctggccattctcagcctctttgtcaacgttgccagtacctctaacccattcctcagtcgcctccttaaccgcgacaccatcactcgcatctcctacaagaatgatgcctactttcttcaagacctgagcctggagctcctgttccctgaatccttcggcttcatcacctatcagggctctctcagcaccccgccctgctccgagactgtcacctggatcctcattgaccgggccctcaatatcacctcccttcagatgcactccctgagactcctgagccagaatcctccatctcagatcttccagagcctcagcggtaacagccggcccctgcagcccttggcccacagggcactgaggggcaacagggacccccggcaccccgagaggcgctgccgaggccccaactaccgcctgcatgtggatggtgtcccccatggtcgctgagactccccttcgaggattgcacccgcccgtcctaagcctccccacaaggcgaggggagttacccctaaaacaaagctattaaagggacagaatacttcctgtttaaaaaaaaaaaaaaaaaaaaaaaaaaaaaaaaa

SEQ ID NO: 801 - protein, 328 aa, Homo sapiens
MGAAARLSAPRALVLWAALGAAAHIGPAPDPEDWWSYKDNLQGNFVPGPPFWGLVNAAWSLCAVGKRQSPVDVELKRVLYDPFLPPLRLSTGGEKLRGTLYNTGRHVSFLPAPRPVVNVSGGPLLYSHRLSELRLLFGARDGAGSEHQINHQGFSAEVQLIHFNQELYGNFSAASRGPNGLAILSLFVNVASTSNPFLSRLLNRDTITRISYKNDAYFLQDLSLELLFPESFGFITYQGSLSTPPCSETVTWILIDRALNITSLQMHSLRLLSQNPPSQIFQSLSGNSRPLQPLAHRALRGNRDPRHPERRCRGPNYRLHVDGVPHGR

SEQ ID NO: 802 - DNA, 3812 bp, Homo sapiens
gggcctactctgccgccgccgccgcccgcccgctccagccgccgccgccgccgccaccgccctccaggctccgggacccggcccgcgccaccgcccccgtgcgcgccccgccgccgccgccttcgccttcgccttttgtttcctccgctccggcgcccccgccccggctcgcgctttgcaggggacgcagcgcgcgcccccagcgggcccgggaaaagccgcggcgcgcgcgcgcgcctgcgcggcggacccctccttctcctccccgcgtgcgcgtgcccttcttggctgcgcgccggcgccgcctggcgggcgggaggggaggtggcaggcgcgtttgcaggaggggcgcacctcttcgctcgcgcacccccccggaaggtagaccgggaaggggaggcgggcgggcggagaggagagagtggcgcgcagtccagcgagggcgggggttggctatgtggggggtggtgcaccccgcagtctagacagtctgatccgggctgggggcgtgtacactcggcgcacctgcgagactacagagcctcgggccggcacgtgtggggagtgtggacacgtctgctgcgccccgcttctcgctgctgaggggaagggagggggcgggcaggtgcagcggccgggctagtgggagggggcggcggccatggagcgggtgaacgacgcttcgtgcggcccgtctggctgctacacataccaggtgagcagacacagcacggagatgctgcacaacctgaaccagcagcgcaaaaacggcgggcgcttctgcgacgtgctcttgcgggtaggcgacgagagcttcccagcgcaccgcgccgtgctggccgcctgcagcgagtactttgagtcggtgttcagcgcccagttgggcgacggcggagctgcggacgggggtccggctgatgtagggggcgcgacggcagcaccaggcggcggggccgggggcagccgggagctggagatgcacactatcagctccaaggtatttggggacattctggacttcgcctacacttcccgcatcgtggtgcgcttggagagctttcccgaactcatgacggccgccaagttcctgctgatgaggtcggttatcgagatctgccaggaagtcatcaaacagtccaacgtacagatcctggtaccccctgcccgcgccgatataatgctctttcgcccccctgggacctcggacttgggcttccctttggacatgaccaacggggcagccttggcagccaacagcaatggcatcgccggcagcatgcagccagaggaggaggcagctcgggcggctggtgcagccattgcaggccaagcctctttgcctgtgttacctggggtggaccgcttgcccatggtggctggacccctatccccccaactgctgacttccccattccccagtgtggcatccagtgcccctcccctgactggcaagcgaggccggggccgcccaaggaaggccaacctgctggactcaatgtttgggtccccagggggcctgagggaggcaggcatccttccatgcggtctatgtggtaaggtgttcactgatgccaaccggctccggcagcacgaggcccagcacggtgtcaccagcctccagctgggctacatcgaccttcctcctccgaggctgggtgagaatgggctacccatctctgaagaccccgacggcccccgaaagaggagccggaccaggaagcaggtggcttgtgagatctgcggcaagatcttccgtgatgtgtatcatcttaaccggcacaagctgtcccactctggggagaagccctactcctgccctgtgtgtgggttgcggttcaagagaaaagaccgcatgtcctaccatgtgcggtcccatgatgggtccgtgggcaagccttacatctgccagagctgtgggaaaggcttctccaggcctgatcacttgaacggacatatcaagcaggtgcacacttctgagcggcctcacaagtgtcagacctgcaatgcttcttttgccacccgagaccgtctgcgctcccacctggcctgtcatgaagacaaggtgccctgccaggtgtgtgggaagtacttgcgggcagcatacatggcagaccacctgaagaagcacagcgaggggcccagcaacttctgcagtatctgtaaccgaggtttctcctctgcctcctacttaaaggtccatgttaaaacccaccacggtgttccccttccccaggtctccaggcaccaggagcccatcctgaatgggggagcagcgttccactgcgccaggacctatggcaacaaagaaggccagaaatgctcacatcaggatccgattgagagctctgactcctatggtgacctctcagatgccagcgacctgaagacgccagagaagcagagtgccaatggctctttctcctgcgacatggcagtccccaaaaacaaaatggagtctgatggggagaagaagtacccatgccctgaatgtgggagcttcttccgctctaagtcctacttgaacaaacacatccagaaggtgcatgtccgggctctcgggggccccctgggggacctgggccctgcccttggctcacctttctctcctcagcagaacatgtctctcctcgagtcctttgggtttcagattgttcagtcggcatttgcgtcatctttagtagatcctgaggttgaccagcagcccatggggcctgaagggaaatgaggcagctgctgtgtccccacggaaacaaccatctggggactgctgggaaatgctgtgaatgcggagggaagtgatgtttgggttctgtagctgagagatttttattcatttttaactgccccccaaccccactccaactccttctccaccacccattctcccaatggtctttagaaatagattttcatctgatattctgcagaaatatcaatgagacttggtatgggacaggggcagaaaacactacataggcctccaaggcaaaaccagtcccagtttctttaatgggaagaagctggaattcctggtgctcaattcttagtgaccccaatcctatacccaaatctatgatattctgggacctcagtgattttggtcccctcccacttctctagttcgtcatcctcccttcccatatccttcaaaagaaccacactagggtctccacctacttatacaatgcggatgcccaactgtttttaaggaagccagaagcatcccatggaccatggggtgagtgtcctccaagagccccctgagctcagccctctgcctggagggctccagacctttctgagccctgcttggaggcgagcattttcactgctaggacaagctcagctgttgaggacacccccaccccaaatttcagttcttacgtgattttaaccattcaacatgctgttgggttttaattctctaattattattattattgttattattttttaggaccagttgtagtgaattgctactgaaagctatcccaggtgatacagagctctttgtaaaccgcagtcacacattagggttagtattaaactttgtttagatgtaccataattaacttggctagttgattgtttgaagtctatggaagaaatagttttatgcaaaattttaaaaaatgccagtctggtcagggaagtagggggtttcaatgctgttgggaaccaggaaggtgggacagccggcaggtagggacattgtgtacctcagttgtgtcacatgtgagcaagcccaggttgaccttgtgatgtgaattgatctgatcagactgtattaaaaatgttagtacattactcta

SEQ ID NO: 803 - protein, 687 aa, Homo sapiens
MERVNDASCGPSGCYTYQVSRHSTEMLHNLNQQRKNGGRFCDVLLRVGDESFPAHRAVLAACSEYFESVFSAQLGDGGAADGGPADVGGATAAPGGGAGGSRELEMHTISSKVFGDILDFAYTSRIVVRLESFPELMTAAKFLLMRSVIEICQEVIKQSNVQILVPPARADIMLFRPPGTSDLGFPLDMTNGAALAANSNGIAGSMQPEEEAARAAGAAIAGQASLPVLPGVDRLPMVAGPLSPQLLTSPFPSVASSAPPLTGKRGRGRPRKANLLDSMFGSPGGLREAGILPCGLCGKVFTDANRLRQHEAQHGVTSLQLGYIDLPPPRLGENGLPISEDPDGPRKRSRTRKQVACEICGKIFRDVYHLNRHKLSHSGEKPYSCPVCGLRFKRKDRMSYHVRSHDGSVGKPYICQSCGKGFSRPDHLNGHIKQVHTSERPHKCQTCNASFATRDRLRSHLACHEDKVPCQVCGKYLRAAYMADHLKKHSEGPSNFCSICNRGFSSASYLKVHVKTHHGVPLPQVSRHQEPILNGGAAFHCARTYGNKEGQKCSHQDPIESSDSYGDLSDASDLKTPEKQSANGSFSCDMAVPKNKMESDGEKKYPCPECGSFFRSKSYLNKHIQKVHVRALGGPLGDLGPALGSPFSPQQNMSLLESFGFQIVQSAFASSLVDPEVDQQPMGPEGK

SEQ ID NO: 804 - DNA, 3674 bp, Homo sapiens
gggcctactctgccgccgccgccgcccgcccgctccagccgccgccgccgccgccaccgccctccaggctccgggacccggcccgcgccaccgcccccgtgcgcgccccgccgccgccgccttcgccttcgccttttgtttcctccgctccggcgcccccgccccggctcgcgctttgcaggggacgcagcgcgcgcccccagcgggcccgggaaaagccgcggcgcgcgcgcgcgcctgcgcggcggacccctccttctcctccccgcgtgcgcgtgcccttcttggctgcgcgccggcgccgcctggcgggcgggaggggaggtggcaggcgcgtttgcaggaggggcgcacctcttcgctcgcgcacccccccggaaggtagaccgggaaggggaggcgggcgggcggagaggagagagtggcgcgcagtccagcgagggcgggggttggctatgtggggggtggtgcaccccgcagtctagacagtctgatccgggctgggggcgtgtacactcggcgcacctgcgagactacagagcctcgggccggcacgtgtggggagtgtggacacgtctgctgcgccccgcttctcgctgctgaggggaagggagggggcgggcaggtgcagcggccgggctagtgggagggggcggcggccatggagcgggtgaacgacgcttcgtgcggcccgtctggctgctacacataccaggtgagcagacacagcacggagatgctgcacaacctgaaccagcagcgcaaaaacggcgggcgcttctgcgacgtgctcttgcgggtaggcgacgagagcttcccagcgcaccgcgccgtgctggccgcctgcagcgagtactttgagtcggtgttcagcgcccagttgggcgacggcggagctgcggacgggggtccggctgatgtagggggcgcgacggcagcaccaggcggcggggccgggggcagccgggagctggagatgcacactatcagctccaaggtatttggggacattctggacttcgcctacacttcccgcatcgtggtgcgcttggagagctttcccgaactcatgacggccgccaagttcctgctgatgaggtcggttatcgagatctgccaggaagtcatcaaacagtccaacgtacagatcctggtaccccctgcccgcgccgatataatgctctttcgcccccctgggacctcggacttgggcttccctttggacatgaccaacggggcagccttggcagccaacagcaatggcatcgccggcagcatgcagccagaggaggaggcagctcgggcggctggtgcagccattgcaggccaagcctctttgcctgtgttacctggggtggaccgcttgcccatggtggctggacccctatccccccaactgctgacttccccattccccagtgtggcatccagtgcccctcccctgactggcaagcgaggccggggccgcccaaggaaggccaacctgctggactcaatgtttgggtccccagggggcctgagggaggcaggcatccttccatgcggtctatgtggtaaggtgttcactgatgccaaccggctccggcagcacgaggcccagcacggtgtcaccagcctccagctgggctacatcgaccttcctcctccgaggctgggtgagaatgggctacccatctctgaagaccccgacggcccccgaaagaggagccggaccaggaagcaggtggcttgtgagatctgcggcaagatcttccgtgatgtgtatcatcttaaccggcacaagctgtcccactctggggagaagccctactcctgccctgtgtgtgggttgcggttcaagagaaaagaccgcatgtcctaccatgtgcggtcccatgatgggtccgtgggcaagccttacatctgccagagctgtgggaaaggcttctccaggcctgatcacttgaacggacatatcaagcaggtgcacacttctgagcggcctcacaagtgtcagacctgcaatgcttcttttgccacccgagaccgtctgcgctcccacctggcctgtcatgaagacaaggtgccctgccaggtgtgtgggaagtacttgcgggcagcatacatggcagaccacctgaagaagcacagcgaggggcccagcaacttctgcagtatctgtaaccgagaaggccagaaatgctcacatcaggatccgattgagagctctgactcctatggtgacctctcagatgccagcgacctgaagacgccagagaagcagagtgccaatggctctttctcctgcgacatggcagtccccaaaaacaaaatggagtctgatggggagaagaagtacccatgccctgaatgtgggagcttcttccgctctaagtcctacttgaacaaacacatccagaaggtgcatgtccgggctctcgggggccccctgggggacctgggccctgcccttggctcacctttctctcctcagcagaacatgtctctcctcgagtcctttgggtttcagattgttcagtcggcatttgcgtcatctttagtagatcctgaggttgaccagcagcccatggggcctgaagggaaatgaggcagctgctgtgtccccacggaaacaaccatctggggactgctgggaaatgctgtgaatgcggagggaagtgatgtttgggttctgtagctgagagatttttattcatttttaactgccccccaaccccactccaactccttctccaccacccattctcccaatggtctttagaaatagattttcatctgatattctgcagaaatatcaatgagacttggtatgggacaggggcagaaaacactacataggcctccaaggcaaaaccagtcccagtttctttaatgggaagaagctggaattcctggtgctcaattcttagtgaccccaatcctatacccaaatctatgatattctgggacctcagtgattttggtcccctcccacttctctagttcgtcatcctcccttcccatatccttcaaaagaaccacactagggtctccacctacttatacaatgcggatgcccaactgtttttaaggaagccagaagcatcccatggaccatggggtgagtgtcctccaagagccccctgagctcagccctctgcctggagggctccagacctttctgagccctgcttggaggcgagcattttcactgctaggacaagctcagctgttgaggacacccccaccccaaatttcagttcttacgtgattttaaccattcaacatgctgttgggttttaattctctaattattattattattgttattattttttaggaccagttgtagtgaattgctactgaaagctatcccaggtgatacagagctctttgtaaaccgcagtcacacattagggttagtattaaactttgtttagatgtaccataattaacttggctagttgattgtttgaagtctatggaagaaatagttttatgcaaaattttaaaaaatgccagtctggtcagggaagtagggggtttcaatgctgttgggaaccaggaaggtgggacagccggcaggtagggacattgtgtacctcagttgtgtcacatgtgagcaagcccaggttgaccttgtgatgtgaattgatctgatcagactgtattaaaaatgttagtacattactcta

SEQ ID NO: 805 - protein, 641 aa, Homo sapiens
MERVNDASCGPSGCYTYQVSRHSTEMLHNLNQQRKNGGRFCDVLLRVGDESFPAHRAVLAACSEYFESVFSAQLGDGGAADGGPADVGGATAAPGGGAGGSRELEMHTISSKVFGDILDFAYTSRIVVRLESFPELMTAAKFLLMRSVIEICQEVIKQSNVQILVPPARADIMLFRPPGTSDLGFPLDMTNGAALAANSNGIAGSMQPEEEAARAAGAAIAGQASLPVLPGVDRLPMVAGPLSPQLLTSPFPSVASSAPPLTGKRGRGRPRKANLLDSMFGSPGGLREAGILPCGLCGKVFTDANRLRQHEAQHGVTSLQLGYIDLPPPRLGENGLPISEDPDGPRKRSRTRKQVACEICGKIFRDVYHLNRHKLSHSGEKPYSCPVCGLRFKRKDRMSYHVRSHDGSVGKPYICQSCGKGFSRPDHLNGHIKQVHTSERPHKCQTCNASFATRDRLRSHLACHEDKVPCQVCGKYLRAAYMADHLKKHSEGPSNFCSICNREGQKCSHQDPIESSDSYGDLSDASDLKTPEKQSANGSFSCDMAVPKNKMESDGEKKYPCPECGSFFRSKSYLNKHIQKVHVRALGGPLGDLGPALGSPFSPQQNMSLLESFGFQIVQSAFASSLVDPEVDQQPMGPEGK

SEQ ID NO: 806 - DNA, 3021 bp, Homo sapiens
gggcctactctgccgccgccgccgcccgcccgctccagccgccgccgccgccgccaccgccctccaggctccgggacccggcccgcgccaccgcccccgtgcgcgccccgccgccgccgccttcgccttcgccttttgtttcctccgctccggcgcccccgccccggctcgcgctttgcaggggacgcagcgcgcgcccccagcgggcccgggaaaagccgcggcgcgcgcgcgcgcctgcgcggcggacccctccttctcctccccgcgtgcgcgtgcccttcttggctgcgcgccggcgccgcctggcgggcgggaggggaggtggcaggcgcgtttgcaggaggggcgcacctcttcgctcgcgcacccccccggaaggtagaccgggaaggggaggcgggcgggcggagaggagagagtggcgcgcagtccagcgagggcgggggttggctatgtggggggtggtgcaccccgcagtctagacagtctgatccgggctgggggcgtgtacactcggcgcacctgcgagactacagagcctcgggccggcacgtgtggggagtgtggacacgtctgctgcgccccgcttctcgctgctgaggggaagggagggggcgggcaggtgcagcggccgggctagtgggagggggcggcggccatggagcgggtgaacgacgcttcgtgcggcccgtctggctgctacacataccaggtgagcagacacagcacggagatgctgcacaacctgaaccagcagcgcaaaaacggcgggcgcttctgcgacgtgctcttgcgggtaggcgacgagagcttcccagcgcaccgcgccgtgctggccgcctgcagcgagtactttgagtcggtgttcagcgcccagttgggcgacggcggagctgcggacgggggtccggctgatgtagggggcgcgacggcagcaccaggcggcggggccgggggcagccgggagctggagatgcacactatcagctccaaggtatttggggacattctggacttcgcctacacttcccgcatcgtggtgcgcttggagagctttcccgaactcatgacggccgccaagttcctgctgatgaggtcggttatcgagatctgccaggaagtcatcaaacagtccaacgtacagatcctggtaccccctgcccgcgccgatataatgctctttcgcccccctgggacctcggacttgggcttccctttggacatgaccaacggggcagccttggcagccaacagcaatggcatcgccggcagcatgcagccagaggaggaggcagctcgggcggctggtgcagccattgcaggccaagcctctttgcctgtgttacctggggtggaccgcttgcccatggtggctggacccctatccccccaactgctgacttccccattccccagtgtggcatccagtgcccctcccctgactggcaagcgaggccggggccgcccaaggaaggccaacctgctggactcaatgtttgggtccccagggggcctgagggaggcaggcatccttccatgcggtctatgtggtaaggtgttcactgatgccaaccggctccggcagcacgaggcccagcacggtgtcaccagcctccagctgggctacatcgaccttcctcctccgaggctgggtgagaatgggctacccatctctgaagaccccgacggcccccgaaagaggagccggaccaggaagcaggtggcttgtgagatctgcggcaagatcttccgtgatgtgtatcatcttaaccggcacaagctgtcccactctggggagaagccctactcctgccctgtgtgtgggttgcggttcaagagaaaagaccgcatgtcctaccatgtgcggtcccatgatgggtccgtgggcaagccttacatctgccagagctgtgggaaaggcttctccaggcctgatcacttgaacggacatatcaagcaggtgcacacttctgagcggcctcacaagtgtcaggtgtgggttgggagcagcagcggcctgccgcccctggaacctcttcctagcgacctgccatcatgggactttgcccagcctgctttgtggaggtcgtcccattcggttcctgacaccgccttttccctttctctaaaaaaatcattcccagcccttgaaaacctgggcccagcacactccagcaacactctcttctgcccagccccgccgggatatctgaggcagggctggaccaccccagagggcagcagggcctttacccagtggcctgttggctagcctgggcctccctggagagggttgacagtggaagggaacaggaggggcatttggcctgagacccctgcttttgggagaggctagcagggtggttcctgcccagcatgcccagctcctccctgggtgactcggagtctttcccatgtcagagcccccaaatgggggtagcaaggagcacctttctggaaccccctatagcatccaagtttctttctgggctctcttgccttttcccccctttcacagatggcacccctgggcatctgtccttgcctaggtgattttggaggttggtgccttcctgggaactagccaccagcttatctgcttcccttcccctggcatcacttcccataggcctggggtttctagactggggcctggccacccctttccccactccacgagtgagtcggcctccagagaagactggcacaattccaactagagtcaacccatgctgccctctgcccttcccactcagatctagatcctgctttcatttctggctagtgaagtagacttttgtgtttttgaggtttattagcaggtctgctcaggaaccaaactaatgagtagctttatattgggccaccccaatatatggctttgggggctgaaaaagcagatgtagaccccctccctcggatccttattggtgtgccctttagcactccgcagactctgcggggtgaacaggagtgatgataaaatttttcattctaaaaaaaaaaaaaaaaaaaaaa

SEQ ID NO: 807 - protein, 537 aa, Homo sapiens
MERVNDASCGPSGCYTYQVSRHSTEMLHNLNQQRKNGGRFCDVLLRVGDESFPAHRAVLAACSEYFESVFSAQLGDGGAADGGPADVGGATAAPGGGAGGSRELEMHTISSKVFGDILDFAYTSRIVVRLESFPELMTAAKFLLMRSVIEICQEVIKQSNVQILVPPARADIMLFRPPGTSDLGFPLDMTNGAALAANSNGIAGSMQPEEEAARAAGAAIAGQASLPVLPGVDRLPMVAGPLSPQLLTSPFPSVASSAPPLTGKRGRGRPRKANLLDSMFGSPGGLREAGILPCGLCGKVFTDANRLRQHEAQHGVTSLQLGYIDLPPPRLGENGLPISEDPDGPRKRSRTRKQVACEICGKIFRDVYHLNRHKLSHSGEKPYSCPVCGLRFKRKDRMSYHVRSHDGSVGKPYICQSCGKGFSRPDHLNGHIKQVHTSERPHKCQVWVGSSSGLPPLEPLPSDLPSWDFAQPALWRSSHSVPDTAFSLSLKKSFPALENLGPAHSSNTLFCPAPPGYLRQGWTTPEGSRAFTQWPVG

SEQ ID NO: 808 - DNA, 3747 bp, Homo sapiens
gggcctactctgccgccgccgccgcccgcccgctccagccgccgccgccgccgccaccgccctccaggctccgggacccggcccgcgccaccgcccccgtgcgcgccccgccgccgccgccttcgccttcgccttttgtttcctccgctccggcgcccccgccccggctcgcgctttgcaggggacgcagcgcgcgcccccagcgggcccgggaaaagccgcggcgcgcgcgcgcgcctgcgcggcggacccctccttctcctccccgcgtgcgcgtgcccttcttggctgcgcgccggcgccgcctggcgggcgggaggggaggtggcaggcgcgtttgcaggaggggcgcacctcttcgctcgcgcacccccccggaaggtagaccgggaaggggaggcgggcgggcggagaggagagagtggcgcgcagtccagcgagggcgggggttggctatgtggggggtggtgcaccccgcagtctagacagtctgatccgggctgggggcgtgtacactcggcgcacctgcgagactacagagcctcgggccggcacgtgtggggagtgtggacacgtctgctgcgccccgcttctcgctgctgaggggaagggagggggcgggcaggtgcagcggccgggctagtgggagggggcggcggccatggagcgggtgaacgacgcttcgtgcggcccgtctggctgctacacataccaggtgagcagacacagcacggagatgctgcacaacctgaaccagcagcgcaaaaacggcgggcgcttctgcgacgtgctcttgcgggtaggcgacgagagcttcccagcgcaccgcgccgtgctggccgcctgcagcgagtactttgagtcggtgttcagcgcccagttgggcgacggcggagctgcggacgggggtccggctgatgtagggggcgcgacggcagcaccaggcggcggggccgggggcagccgggagctggagatgcacactatcagctccaaggtatttggggacattctggacttcgcctacacttcccgcatcgtggtgcgcttggagagctttcccgaactcatgacggccgccaagttcctgctgatgaggtcggttatcgagatctgccaggaagtcatcaaacagtccaacgtacagatcctggtaccccctgcccgcgccgatataatgctctttcgcccccctgggacctcggacttgggcttccctttggacatgaccaacggggcagccttggcagccaacagcaatggcatcgccggcagcatgcagccagaggaggaggcagctcgggcggctggtgcagccattgcaggccaagcctctttgcctgtgttacctggggtggaccgcttgcccatggtggctggacccctatccccccaactgctgacttccccattccccagtgtggcatccagtgcccctcccctgactggcaagcgaggccggggccgcccaaggaaggccaacctgctggactcaatgtttgggtccccagggggcctgagggaggcaggcatccttccatgcggtctatgtggtaaggtgttcactgatgccaaccggctccggcagcacgaggcccagcacggtgtcaccagcctccagctgggctacatcgaccttcctcctccgaggctgggtgagaatgggctacccatctctgaagaccccgacggcccccgaaagaggagccggaccaggaagcaggtggcttgtgagatctgcggcaagatcttccgtgatgtgtatcatcttaaccggcacaagctgtcccactctggggagaagccctactcctgccctgtgtgtgggttgcggttcaagagaaaagaccgcatgtcctaccatgtgcggtcccatgatgggtccgtgggcaagccttacatctgccagagctgtgggaaaggcttctccaggcctgatcacttgaacggacatatcaagcaggtgcacacttctgagcggcctcacaagtgtcagacctgcaatgcttcttttgccacccgagaccgtctgcgctcccacctggcctgtcatgaagacaaggtgccctgccaggtgtgtgggaagtacttgcgggcagcatacatggcagaccacctgaagaagcacagcgaggggcccagcaacttctgcagtatctgtaaccgaggtctccaggcaccaggagcccatcctgaatgggggagcagcgttccactgcgccaggacctatggcaacaaagaaggccagaaatgctcacatcaggatccgattgagagctctgactcctatggtgacctctcagatgccagcgacctgaagacgccagagaagcagagtgccaatggctctttctcctgcgacatggcagtccccaaaaacaaaatggagtctgatggggagaagaagtacccatgccctgaatgtgggagcttcttccgctctaagtcctacttgaacaaacacatccagaaggtgcatgtccgggctctcgggggccccctgggggacctgggccctgcccttggctcacctttctctcctcagcagaacatgtctctcctcgagtcctttgggtttcagattgttcagtcggcatttgcgtcatctttagtagatcctgaggttgaccagcagcccatggggcctgaagggaaatgaggcagctgctgtgtccccacggaaacaaccatctggggactgctgggaaatgctgtgaatgcggagggaagtgatgtttgggttctgtagctgagagatttttattcatttttaactgccccccaaccccactccaactccttctccaccacccattctcccaatggtctttagaaatagattttcatctgatattctgcagaaatatcaatgagacttggtatgggacaggggcagaaaacactacataggcctccaaggcaaaaccagtcccagtttctttaatgggaagaagctggaattcctggtgctcaattcttagtgaccccaatcctatacccaaatctatgatattctgggacctcagtgattttggtcccctcccacttctctagttcgtcatcctcccttcccatatccttcaaaagaaccacactagggtctccacctacttatacaatgcggatgcccaactgtttttaaggaagccagaagcatcccatggaccatggggtgagtgtcctccaagagccccctgagctcagccctctgcctggagggctccagacctttctgagccctgcttggaggcgagcattttcactgctaggacaagctcagctgttgaggacacccccaccccaaatttcagttcttacgtgattttaaccattcaacatgctgttgggttttaattctctaattattattattattgttattattttttaggaccagttgtagtgaattgctactgaaagctatcccaggtgatacagagctctttgtaaaccgcagtcacacattagggttagtattaaactttgtttagatgtaccataattaacttggctagttgattgtttgaagtctatggaagaaatagttttatgcaaaattttaaaaaatgccagtctggtcagggaagtagggggtttcaatgctgttgggaaccaggaaggtgggacagccggcaggtagggacattgtgtacctcagttgtgtcacatgtgagcaagcccaggttgaccttgtgatgtgaattgatctgatcagactgtattaaaaatgttagtacattactcta

SEQ ID NO: 809 - protein, 537 aa, Homo sapiens
MERVNDASCGPSGCYTYQVSRHSTEMLHNLNQQRKNGGRFCDVLLRVGDESFPAHRAVLAACSEYFESVFSAQLGDGGAADGGPADVGGATAAPGGGAGGSRELEMHTISSKVFGDILDFAYTSRIVVRLESFPELMTAAKFLLMRSVIEICQEVIKQSNVQILVPPARADIMLFRPPGTSDLGFPLDMTNGAALAANSNGIAGSMQPEEEAARAAGAAIAGQASLPVLPGVDRLPMVAGPLSPQLLTSPFPSVASSAPPLTGKRGRGRPRKANLLDSMFGSPGGLREAGILPCGLCGKVFTDANRLRQHEAQHGVTSLQLGYIDLPPPRLGENGLPISEDPDGPRKRSRTRKQVACEICGKIFRDVYHLNRHKLSHSGEKPYSCPVCGLRFKRKDRMSYHVRSHDGSVGKPYICQSCGKGFSRPDHLNGHIKQVHTSERPHKCQTCNASFATRDRLRSHLACHEDKVPCQVCGKYLRAAYMADHLKKHSEGPSNFCSICNRGLQAPGAHPEWGSSVPLRQDLWQQRRPEMLTSGSD

SEQ ID NO: 810 - DNA, 1634 bp, Homo sapiens
gacgccgcccgaccctgcgactacgctgcggactcccgcccgctcccgctcgctcccgcggtcctcgctcgcctcgcgccggtagttttgggcctacacctcccctccccccgccagccgccaaagacttgaccacgtaacgagcccaactcccccgaacgccgcccgccgctcgccatggatgccggtgtgactgaaagtggactaaatgtgactctcaccattcggcttcttatgcacggaaaggaagtaggaagcatcattgggaagaaaggggagtcggttaagaggatccgcgaggagagtggcgcgcggatcaacatctcggaggggaattgtccggagagaatcatcactctgaccggccccaccaatgccatctttaaggctttcgctatgatcatcgacaagctggaggaagatatcaacagctccatgaccaacagtaccgcggccagcaggcccccggtcaccctgaggctggtggtgccggccacccagtgcggctccctgattgggaaaggcgggtgtaagatcaaagagatccgcgagagtacgggggcgcaggtccaggtggcgggggatatgctgcccaactccaccgagcgggccatcaccatcgctggcgtgccgcagtctgtcaccgagtgtgtcaagcagatttgcctggtcatgctggagacgctctcccagtctccgcaagggagagtcatgaccattccgtaccagcccatgccggccagctccccagtcatctgcgcgggcggccaagatcggtgcagcgacgctgtgggctacccccatgccacccatgacctggagggaccacctctagatgcctactcgattcaaggacaacacaccatttctccgctcgatctggccaagctgaaccaggtggcaagacaacagtctcactttgccatgatgcacggcgggaccggattcgccggaattgactccagctctccagaggtgaaaggctattgggcaagtttggatgcatctactcaaaccacccatgaactcaccattccaaataacttaattggctgcataatcgggcgccaaggcgccaacattaatgagatccgccagatgtccggggcccagatcaaaattgccaacccagtggaaggctcctctggtaggcaggttactatcactggctctgctgccagtattagtctggcccagtatctaatcaatgccaggctttcctctgagaagggcatggggtgcagctagaacagtgtaggttccctcaataacccctttctgctgttctcccatgatccaactgtgtaatttctggtcagtgattccaggttttaaataatttgtaagtgttcagtttctacacaactttatcatccgctaagaatttaaaaatcacattctctgttcagctgttaatgctgggatccatatttagttttataagcttttccctgtttttagttttgttttgggttttttggctcatgaattttatttctgtttgtcgataagaaatgtaagagtggaatgttaataaatttcagtttagttctgtaatgtcaagaatttaagaattaaaaaacggattggttaaaaaatgcttcatatttgaaaaagctgggaattgctgtctt

SEQ ID NO: 811 - protein, 356 aa, Homo sapiens
MDAGVTESGLNVTLTIRLLMHGKEVGSIIGKKGESVKRIREESGARINISEGNCPERIITLTGPTNAIFKAFAMIIDKLEEDINSSMTNSTAASRPPVTLRLVVPATQCGSLIGKGGCKIKEIRESTGAQVQVAGDMLPNSTERAITIAGVPQSVTECVKQICLVMLETLSQSPQGRVMTIPYQPMPASSPVICAGGQDRCSDAVGYPHATHDLEGPPLDAYSIQGQHTISPLDLAKLNQVARQQSHFAMMHGGTGFAGIDSSSPEVKGYWASLDASTQTTHELTIPNNLIGCIIGRQGANINEIRQMSGAQIKIANPVEGSSGRQVTITGSAASISLAQYLINARLSSEKGMGCS

SEQ ID NO: 812 - DNA, 5940 bp, Homo sapiens
cttgccggcttccttgcaaagcccggtgcaagggcctctttcaaaatgaacccactggtgtgcctagcagtcggtagaagaagcgggagggcgtccggtctgcacgcccgccgcgaggttacaatgctgaacgcatgagatggaagataccaacgggaggccgaggggatccacggcgcccgcgcgggctccggcttcctcctgctctcggcgccgctgggcgaccgcccatgacccgctcttgcgggctctgtccggttgacaggcgaccctgtggcccggggaagcgcgggagggcgccggcggaaagttgaagagcgtttttctcgccgccgcgtgcattaggagctcgacgagtccgccctgggcttcctggtggggctgggcgggcgggggaggggccgcgcagcagcagcggaagccagacctcggcgataagaggctgcacagcgacatgcaacagtcttttcactgcagctgaatgagttgtggcgcccacaatgctcccatgacaaggagctgacaagttccattttccgtcgcgggcatcttggaatcatgactcccacaatgccttgggcacttggtcgacagtggggccgcctctgaaaaaaaaaatgtgagaggttggtactaagaagtgcctttcctgacgtctctgctgcttggaaccgcttctagagcagtctctgcttttgccttgcttgctgccagctagactgtgacgacagcacatccaccctccacctctagcccagacacccccatttctacttataatcaagagaaaagctctaagtatctggcattgccctaggctgctttagtgttaaaagaaaagtttgctgaaaaagtaagatatcttctgccaggaaatcaaggaggaaaaaaaaaatcattttctcgattttgctctaaactgctgcatctgtctatgccaaactaatcaataccgattgcaccaccaaactccattgcaaattcagctgtgaggagattccctttcagacaactttgctgaaagcagcttggaaattcggtgtcgaagggtctgccacgttttcatgcttgcattttgggctccaaattggcactgggaaggggttactgagagcacaaggctgataccaggccctacttttaaacgttcatctacttacaatcctagtatttctctaaaaaccaaaacctctttgaattaacagtttcatgctgtgaatttctagtgggagatcttttccttgatattgacgacacaattttccatgtacttttaaagcagggagtggggaaaagtattttgaggggacattttcatcatcagttcagcttttttttttggttgttgctcttttttgggggggttgggtttgttggtttcactgaaacatttaactacctgtaaaatctaaacatggctgttagtgtcacaccaattcgggacacaaaatggctaacactggaagtatgtagagagttccagagggggacttgctcacggccagacacggaatgtaaatttgcacatccttcgaaaagctgccaagttgaaaatggacgagtaatcgcctgctttgattcattgaaaggccgttgctccagggagaactgcaaatatcttcatccacccccacatttaaaaacgcagttggagataaatggacgcaataacttgattcagcagaagaacatggccatgttggcccagcaaatgcaactagccaatgccatgatgcctggtgccccattacaacccgtgccaatgttttcagttgcaccaagcttagccaccaatgcatcagcagccgcctttaatccctatctgggacctgtttctccaagcctggtcccggcagagatcttgccgactgcaccaatgttggttacagggaatccgggtgtccctgtacctgcagctgctgcagctgctgcacagaaattaatgcgaacagacagacttgaggtatgtcgagagtaccaacgtggcaattgcaaccgaggagaaaatgattgtcggtttgctcatcctgctgacagcacaatgattgacaccaatgacaacacagtcactgtgtgtatggattacatcaaagggagatgctctcgggaaaagtgcaaatactttcatccccctgcacatttgcaagccaagatcaaggctgcccaataccaggtcaaccaggctgcagctgcacaggctgcagccaccgcagctgccatgggaattcctcaagctgtacttcccccattaccaaagaggcctgctcttgaaaaaaccaacggtgccaccgcagtctttaacactggtattttccaataccaacaggctctagccaacatgcagttacaacagcatacagcatttctcccaccagttcccatggtgcacggtgctacgccagccactgtgtccgcagcaacaacatctgccacaagtgttcccttcgctgcaacagccacagccaaccagatacccataatatctgccgaacatctgactagccacaagtatgttacccagatgtagaattttcatcactaaacaatcatgctaaagaggaaaggacagtgtgcttggttagagtaaaggacgaggtcattagccatattgtatatatcgtcaagcaacacacacaaaagttcctcagccacaagacatccacatattgcatgttaaccagaagaaaagacaacattttccggaaatccactgcacactgttgcctatacactttgtacatttaattgatatttgtgctgaggtgatattcctgtctaaaagaacaacattgtctttcttttctagcacagagttatgcattcaaagatgcatacctagttagtttcctatatattcatgccatcttgaaaagacagactatggtgtaaccatgattctattatgtattggtacgtctgtagaccaagatataattttttaaaaataagtttatttctttcaaggtttacaaataacaaaggtgcaccttgtatttaaaattgccattatagatgagagcgtgcatgcacagtcatttttgtttaagagtaatatttttaatgtaatagattgtaagacgtggtgagggagggatctgacagagatgaatgtgccaagcaaaaccacaactgtgtatattttaaagcacatcatggctttaagtaccatgttgttaaggattctcatgaagtgccatagactgtacatcaaattagagtattatttcttcagtgttattgttttcagagccacattttgttgcatatttgctagtactaatcagtcaaagggcaccattctttttttttttttttgaaaccaaagctgtctcagaaatggccaatttaactttacagtaacaatagacagcacaacacaaactctctcaatacagataaactcacacatactggagatatatatataatagatatatataaaattattttaatgcattgtagtgtaatatttatgcatactatactgtataacatgttattcaaaagggattgccatttctgagacacagtaacaaaaaaatgaggaaattattttgcttctatttatagcctctgtcaaaagtcaaaagactataaatgctttgcaaaaatggtttcacgtttgcttaaatgcttcatcacagtcacattcaaaatagtgactctaaacaaagaagaaagcagcactgtcatcagatgcatgataaaccaaaatatgaaaatgggaaatgtttaattaacctagtaattgggtgggttaagtacatgggtgaattttatatgtgatttttgttttgttttgttttgttcagattaactgcttatagccttagaaagccttttacaaaattaaaaaaaaaatagatgtgcattcagtttttaagaatggaatcatccaaaggaattcctttttttgaggtttggatgttgcagctagtaaaggatatttttgctctgttcagcagttctaaaaattgctgaagtaggggccaggtcactggtagttatagtatggaatgggagaagtgaaagttcagttatagaactttccatacttccaagtttactgcaagtttttatgcttgagagagatgctttctaatataagactgatgtgttgattttactgattgtactgtacatctattaaagccttagattattacattacgggttggaacccataccaatgtaatttcaatcgtgttaagaaagtaatggtgacttcacatgttattgtagttagttacattatagaatattacttatttttcttgttaaaatgtagtttttcatttcctacatttattagattttcattttctattaacaattgaataccatttcagtttatagacttgttttattagattttaccaatgaatttttcaaaatacaaaaaaaagtagtttttccttcataacatactcagttttgaattacatgtagtgtcacatgaatattcgtattgttaactaaatgatttatattttactgatttaatattacagtgtaagaatgtcagtcattgttagttcttgtctagttttcattaaaagaacaaagatcttttatatggatatcttataaatatataatcattgctaagtaagaagttaagttgttgctatcgcaacaatcctggcagacaattgagtaatattttgatgatttattttgtttgtaattagttattataagaagatctagatcctagatattagaataaaatttattttctactgtatccatttcaaatgttaaaatattgtttaatatttttgaaatccctgagtatcaggccttgttataaataagctgcataatcaataaatagaacaagggactttttgttgataatccaaatactcaaagtttacgtaatgaaaattatagcgtgtgtgcaaactcttgagggttgattatgctgcaatttagcatgttggaacgtctagggagaaggttgactttttgcacttctgtatatagtcaaaagagagaaacctgtataatagtaagatcttattttgaataaaaacgtctataattacaaggagttttgttaaggctaatacaatgacagactgagcaaaattgcttgcaaaagtggcacagagttagcactccataccccttcaaacatgttgctttgctttcttgtggacagcttgtagtttgccaggattttttcagctggaaagatacgccatcctttcaaaccctcatgactgacaaaaactccatggggccaaatctgcctgaagatcattaccaaaaatagcaggtacttctaccattaaggtgaaatcatggatcagatattccttacatttttcaaaactactgcatgtttaaaacttcaacaaaaaaagagagaaagaactatactaagaacatatattattcagatcagtttctgccaatttcagtggtttattgttcacaaaaaaatcttcaaaacaagtattgactttcacaaaatttaaatcataaacaggcaaaccaaacagcacactgtagctatagttgttatgtgattgttttttaattgctgtaggatcctgttctttcagcaggtgaaaaataaaacgcagttcaaatttcatggttttaattttcaactcagaagcactcaaaaatgcaaaatgtgataatgggcacttgtttaaaagaattagtgtatccagccttcactccagctggttaaaaatgttgcacttatcagcaaccctaccactttcatctgctgaaaggacaaatgtgcttggttttactattatgtaatcacaacttactttctgcttgtagttgcttaaaattatgtattttgtcttgggctgcaatttgttttatgcttattttattattactgcagtagttgactttgctgtatggaaaaataaagtgaaattgccctaataaaacttctctttcttaagt

SEQ ID NO: 813 - protein, 370 aa, Homo sapiens
MAVSVTPIRDTKWLTLEVCREFQRGTCSRPDTECKFAHPSKSCQVENGRVIACFDSLKGRCSRENCKYLHPPPHLKTQLEINGRNNLIQQKNMAMLAQQMQLANAMMPGAPLQPVPMFSVAPSLATNASAAAFNPYLGPVSPSLVPAEILPTAPMLVTGNPGVPVPAAAAAAAQKLMRTDRLEVCREYQRGNCNRGENDCRFAHPADSTMIDTNDNTVTVCMDYIKGRCSREKCKYFHPPAHLQAKIKAAQYQVNQAAAAQAAATAAAMGIPQAVLPPLPKRPALEKTNGATAVFNTGIFQYQQALANMQLQQHTAFLPPVPMVHGATPATVSAATTSATSVPFAATATANQIPIISAEHLTSHKYVTQM

SEQ ID NO: 814 - DNA, 841 bp, Homo sapiens
acccctcgtggcggtcccgcccgtccccgcgcaggcgcgctcgggctgccgctggctcttcgcacgcggccatggccgactccgagctgcagctggttgagcagcggatccgcagcttccccgacttccccaccccaggcgtggtattcagggacatctcgcccgtcctgaaggaccccgcctccttccgcgccgccatcggcctcctggcgcgacacctgaaggcgacccacgggggccgcatcgactacatcgcaggcctagactcccgaggcttcctctttggcccctccctggcccaggagcttggactgggctgcgtgctcatccgaaagcgggggaagctgccaggccccactctgtgggcctcctattccctggagtacgggaaggctgagctggagattcagaaagacgccctggagccaggacagagggtggtcgtcgtggatgatctgctggccactggtggaaccatgaacgctgcctgtgagctgctgggccgcctgcaggctgaggtcctggagtgcgtgagcctggtggagctgacctcgcttaagggcagggagaagctggcacctgtacccttcttctctctcctgcagtatgagtgaccacagggcctcccagcccaacatctccagctggatcccagggaaatatcagccttgggcaactgcagtgaccaggggcaccggctgcccacagggaacacattcctttgctggggttcagcgcctctcctggggctggaagtgccaaagcctggggcaaagctgtgtttcagccacactgaacccaattacacacagcgggagaacgcagtaaacagctttcccac

SEQ ID NO: 815 - protein, 180 aa, Homo sapiens
MADSELQLVEQRIRSFPDFPTPGVVFRDISPVLKDPASFRAAIGLLARHLKATHGGRIDYIAGLDSRGFLFGPSLAQELGLGCVLIRKRGKLPGPTLWASYSLEYGKAELEIQKDALEPGQRVVVVDDLLATGGTMNAACELLGRLQAEVLECVSLVELTSLKGREKLAPVPFFSLLQYE

SEQ ID NO: 816 - DNA, 584 bp, Homo sapiens
ttttttttttttaaaacccgaaggcattagaatttattaaatgatgcaataacaacagaattctttatttacaatagcattatttaacatcaaataagcaaatagcatcagcaaagcaatattaacttgcataaatgtatttaaaatttctctgaatatatctacctttgcataaactgctcacactagaaatacaaacatcaatgcaggtgaacaaagtgatgttcagagtcaactccattttgaaaataaatcacaacctgaaacactgtaagctttctcctgaagaaccatagttaatatattgcttaattttacccttgtataatcttttcatatacacacatctcagatgcaacttcatgaggaactgtacaaataaaactcacaaatgacaaaggaaaaaaatgacagttaaatgtctgaagaaatgtatcatcatcactattcaaacaacataaaggttaagtgatgatgcacttattcaaaaattgtacacaattcactatacaaatataatacatcggacagctatgtaggaatatacaagacttaaaaacagatctaaggcattatgctagatt

SEQ ID NO: 817 - DNA, 2963 bp, Homo sapiens
cgcttcgctgcctggcggcctttccccgagccgagcccgcttcccgaggccgccagtcgtcgcctgcccgcgcctgcgcagcgtcccgggccgagagggccacggcggcggccatggcgcaccgctgtttgcggctgtggggccggggcggctgctggccccgcggcctacagcagctcctcgtgcctggcggcgtgggcccgggcgagcagccctgcctccggacgctttaccgatttgttacaactcaagcaagggccagcagaaattctcttttgacagatataattgctgcttatcaaagattctgttctcgacccccaaaaggatttggaaaatactttcctaatggaaaaaatggaaaaaaagctagtgaacctaaagaagttatgggagagaaaaaagaatcaaagccagctgctaccacacgctcttctggaggaggaggtggtggcggtggaaaacgaggtggcaagaaagatgattctcactggtggtccaggtttcagaagggtgacattccatgggacgacaaggatttcaggatgttcttcctctggactgctctgttctggggtggagtcatgttttacttgctgctcaagagatccgggagagaaatcacttggaaggactttgtcaataactatctttcaaaaggagtagtagacagattggaagtcgtcaacaagcgttttgttcgagtgacctttacaccaggaaaaactcctgttgatgggcaatacgtttggtttaatattggcagtgtggacacctttgaacggaatctggaaactttacagcaggaattgggcatagaaggagaaaatcgggtgcctgttgtctacattgctgaaagtgatggctcttttctgctgagcatgctgcctacggtgctcatcatcgccttcttgctctacaccatcagaagagggcctgctggcattggccggacaggccgagggatgggcggactcttcagtgtcggagaaaccactgccaaggtcttaaaggatgaaattgatgtgaagttcaaagatgtggctggctgtgaggaggccaagctagagatcatggaatttgtgaatttcttgaaaaacccaaagcagtatcaagacctaggagcaaaaatcccaaagggtgccattctcactggtcctccaggcactgggaagacgctgctagctaaggccacagccggagaagccaatgtccccttcatcaccgttagtggatctgagtttttggagatgttcgttggtgtgggccctgctagagtccgagacttatttgcccttgctcggaagaatgccccttgcatcctcttcatcgatgaaatcgatgcggtgggaaggaagagaggaagaggcaactttggagggcagagtgagcaggagaacacactcaaccagctgctggtggagatggatggttttaatacaacaacaaatgtcgtcattttggccggcaccaatcgaccagatatcctggaccccgcgctacttaggccggggcgtttcgacaggcagatctttattggaccaccagacataaaaggaagagcttctattttcaaagttcatctccgaccgctaaaactggacagtaccctggagaaggataaattggcaagaaaactggcatctttaactccagggttttcaggtgctgatgttgctaatgtctgtaatgaagctgcgttgattgctgcaaggcatctgtcagattccataaatcagaaacactttgaacaggcaattgagcgagtgattggtggcttagagaagaaaacgcaggttctgcagcctgaggagaagaagactgtggcataccacgaagcaggccatgcggttgccggctggtatctggagcacgcagacccgcttttaaaggtatccatcatcccacgtggcaaaggactaggttatgctcagtatttaccaaaagaacaatacctctataccaaagagcagctcttggataggatgtgtatgactttaggtggtcgagcctctgaagaaatcttctttggaagaattacaactggtgctcaagatgacttgagaaaagtaactcagagtgcatatgcccaaattgttcagtttggcatgaatgaaaaggttgggcaaatctcctttgacctcccacgtcagggggacatggtattggagaaaccttacagtgaagccactgcaagattgatagatgatgaagtacgaatacttattaatgatgcttataaaagaacagtagctcttctcacagaaaagaaagctgacgtggagaaggttgctcttctgttgttagaaaaagaagtattagataagaatgatatggttgaacttttgggccccagaccatttgcggaaaaatctacctatgaagaatttgtggaaggcactggcagcttggatgaggacacctcacttccagaaggccttaaggactggaacaaggagcgggaaaaggagaaagaggagcccccgggtgagaaagttgccaactagaggcccagagggaggccatctcagtctctccactgtggtttcagctggtgcattatttcagctgtggctttcagaagaatgggaatgctgcgctgattttagccagccactggcccagctgaaatgatggggaaaggagtccttagtcctttcagcctcagaggtcacagtgggtggcaggtgactttccggaggccttgagggaaatgcacactgtcccatagcctcattgggctcccagacgtgctggaaaggttgagcccagagtggccgaggctggaccctgtggcaccaagtggggtcggctgaccgtgtggcagggatcgttgcactggactcttggcgtgtgggaagggatgctttctctttgtcgcccactcttcattcctgtttctcctcagttcccctgtgcagatgggctgtgaaattaaattggagtcttgataagaacatttt

SEQ ID NO: 818 - protein, 797 aa, Homo sapiens
MAHRCLRLWGRGGCWPRGLQQLLVPGGVGPGEQPCLRTLYRFVTTQARASRNSLLTDIIAAYQRFCSRPPKGFGKYFPNGKNGKKASEPKEVMGEKKESKPAATTRSSGGGGGGGGKRGGKKDDSHWWSRFQKGDIPWDDKDFRMFFLWTALFWGGVMFYLLLKRSGREITWKDFVNNYLSKGVVDRLEVVNKRFVRVTFTPGKTPVDGQYVWFNIGSVDTFERNLETLQQELGIEGENRVPVVYIAESDGSFLLSMLPTVLIIAFLLYTIRRGPAGIGRTGRGMGGLFSVGETTAKVLKDEIDVKFKDVAGCEEAKLEIMEFVNFLKNPKQYQDLGAKIPKGAILTGPPGTGKTLLAKATAGEANVPFITVSGSEFLEMFVGVGPARVRDLFALARKNAPCILFIDEIDAVGRKRGRGNFGGQSEQENTLNQLLVEMDGFNTTTNVVILAGTNRPDILDPALLRPGRFDRQIFIGPPDIKGRASIFKVHLRPLKLDSTLEKDKLARKLASLTPGFSGADVANVCNEAALIAARHLSDSINQKHFEQAIERVIGGLEKKTQVLQPEEKKTVAYHEAGHAVAGWYLEHADPLLKVSIIPRGKGLGYAQYLPKEQYLYTKEQLLDRMCMTLGGRASEEIFFGRITTGAQDDLRKVTQSAYAQIVQFGMNEKVGQISFDLPRQGDMVLEKPYSEATARLIDDEVRILINDAYKRTVALLTEKKADVEKVALLLLEKEVLDKNDMVELLGPRPFAEKSTYEEFVEGTGSLDEDTSLPEGLKDWNKEREKEKEEPPGEKVAN

SEQ ID NO: 819 - DNA, 3219 bp, Homo sapiens
cccacgcgtccgcccacgcgtccgcccacgcgtccgcttacattttatgtgtttttttaaattctgcactttgacagtggtagcaaaataaaagtaatccaaaagttatttttctattgagaagagagaagaggtgggttttatttttttccttttgattccaatcttttctcccagtgacaaagcataaatcatggacaccagagaataaggtggacctcaggaatccggaaaagactgagaagcttacattcttcctctagagggaagagtggggtgtttatagccatctctggaacctaaaacaaaaaacatgagttgtgtgccatggaaaggagacaaggccaaatctgaatcattggagctgccccaggcagcacccccacaaatctaccatgagaaacagcgcagggagctttgtgccctccacgccctcaataacgtcttccaggacagcaatgccttcacccgggatacgctgcaagagattttccagaggttgtctccaaacaccatggtgacacctcacaagaagagcatgctgggaaatggcaactacgatgtgaatgtcattatggcagcacttcagaccaaaggctatgaagctgtttggtgggacaagcgcagggatgtcggtgtcattgccctcactaacgtcatgggcttcatcatgaatctgccctccagcctatgctggggtccactgaaactgcccctcaaaaggcagcactggatctgtgttcgagaggtgggaggggcctactacaacctcgactccaaactcaagatgcccgagtggattggaggcgagagcgagctcaggaagtttctaaaacatcatttgcgaggaaagaactgtgaactcctgctggtggtaccagaagaggtagaggctcatcagagttggaggaccgatgtgtaacagttctgcccaacctccctctcgcctcagccccttcagtcctctgtgacgtgctgtggcctctacagtgggtctgcccttgccacttccccaaacatctcatcaagtttttccccttcagatctgacagtgcaataggacagacgtgtggactgttataagaactactcagtgttttgttcctgggcaaggaaggtaggagttctgtgcacttaaggccagtggtcacaaacccttgttttatttaagagacagaggagaaagtggagcggggagggaatcctagcttattttcccttttctatgaggacttgacacaggttctgctgagttgtcactgctgctccagactcacctagagatgctgcctccactttccatcctgtctgggtctgaaaacagtgggtctgcagatagtgcccacaaaccccatgtgactggtttgaaggacccagagcataaaggtctctcaggaaaccatgtccaaaaccctagcagcggtacagcatgctgtctccaacccttatccccaggtttaagggtggtttatggccatacgtggaggttttttgttgttgtttttgagactgagtttcactcttgttgcccaggctggagtgcaatggcaccatctcggctcactgcaacctccacctcctggttcaagcgattctcaggcctcagcttcccaagtagttgggattacaggcgcctgccaccacacctggctaattttgtatttttagtagagatggggtttctccatgttggtcaggctggtctcaaactcccgacctcaagtgatctgcccgccttggcctcccaaagtgctgggattacaggcgtgagccaccgcacccggcagagttttataatgaaaaattaactaatattctagtatgaagtgaggaggatactgaacaggatgtggctaaagccaacctgggacagccatggggtggcttggtttcttcactccagtgttgtccctaccatttcgcagcattgatttaggaggctctgggacaaaagagaagccaaagagcagttttcccagttcactcactctggcaaaatcaggaaaaaaaagtctgcttttgacatcaaattccactaatttggggcagcgttgggtgaggaaagtattgtgaagacaggcttcttggagtaggggcagccacaattcagtagacactctaggctcggaggctgccactgtagttgccaagctcaggttgggtggttctgtgctgtatggatggaataggacctgggctggtcatcttcatgtcgtttcctctctgtatcaatggaagttcaacccgcccctacctcttcagatagttgtaggccacttttctcttgtaactttggaaaacaaaagaggagaaataagtatcataccatatgcgtgtctccaaagtggatgtggttgcctcaaggcaggtggcaggcaggggtgacctgctggccctcagatcaatggtcgtggcaggtctgagagctgtcccactggccagacttctctccagcagcaaagccagcctggggcttgcatgttgatcctgagcaagcttaacggggtgaagctgggctttctcccccctgtgactggagtgcatgttgacaccagcactttttctgcacatgtatcttcaatccaacaaggccgtttttttaatgctgagtaacaggccaccaagcggctactgcgttatatcttctcagcaactggccgcagtctcttctgcaccattttctacaccagacctgcttggcaccacagggagctcttttcctgccctgcacaatgacattccaaccaccaccagccagacattacagccaaccttgctgattgtcacaagcaggaccttggggccactggcactgtcagatagtaagccatttcttgggtagaggaggaaactcctctccacaaatccacttgggcctgtgcaaatggcacttgaaagagtccccatgcacttggagtccatgagccaatgggatatgcaaagacgcttaaacatttcagggctggtttctctgttcatatccaattctggtgcttaggaacagggacccatgctgatgcccaagggcaaaaagccccacttcctttaaggaagtgaacaggcctgaccctgatgcccaataacgggcaaccctaggctttttgtttttcttgcttttattcctttttgttgttggccttgtgctgcgtttgtttacaaaagatgtattttgtttaaccaaatattaaaaatggaaaactccaaaaaaaaaaaaaaaaa

SEQ ID NO: 820 - protein, 202 aa, Homo sapiens
MSCVPWKGDKAKSESLELPQAAPPQIYHEKQRRELCALHALNNVFQDSNAFTRDTLQEIFQRLSPNTMVTPHKKSMLGNGNYDVNVIMAALQTKGYEAVWWDKRRDVGVIALTNVMGFIMNLPSSLCWGPLKLPLKRQHWICVREVGGAYYNLDSKLKMPEWIGGESELRKFLKHHLRGKNCELLLVVPEEVEAHQSWRTDV

SEQ ID NO: 821 - DNA, 2648 bp, Homo sapiens
caccgcgggaaaccaaaatggcgaggggctgtattgaagtgggctgtgtttgaggccggtgtaagaacgctcattctacccccaacccttgtctccaaggacctcggtttgtgcgtgcatatgtgccgggtacccggtggggcgggtgcccagtaagtgctcggactcgcaggggaagcgcccacggggacggattggttgttttttcctgtatgaagcggttggcaccactgaagtgaccgaatgagagactctacaggggcaggtaattcactggtccacaagcggtctcctttacgtcgaaaccaaaagaccccaacatccttgaccaagctgtctttacaggatggacataaagccaaaaagccagcatgtaaatttgaagagggtcaggatgtcctagctagatggtcagatggcttgttttatcttggcactatcaaaaagataaacatattgaaacagagctgcttcatcatatttgaagacagttctaaatcctgggttctctggaaggacattcaaacaggagccactggaagtggggaaatggtctgtacaatatgtcaagaagagtattcagaagctcccaatgaaatggttatatgtgacaagtgtggccaaggatatcatcagttgtgtcacacacctcatattgattccagtgtgattgattcagatgaaaaatggctctgtcggcagtgtgtttttgcaacaacaacaaagaggggtggtgcacttaagaaaggaccaaatgccaaagcattgcaagtcatgaagcagacattaccctatagtgtggcagaccttgaatgggatgcaggtcataaaaccaatgtccagcagtgttactgctattgtggaggccctggagactggtatttgaagatgctacagtgctgcaaatgtaagcagtggtttcatgaggcttgtgtgcaatgccttcaaaagccaatgctatttggagacagattttatacgtttatatgctctgtctgcagttctggaccagaatacctcaaacgtctaccattacagtgggtagatatagcacacctatgcctttacaacctaagtgttattcataagaagaaatactttgattctgaacttgagcttatgacatacattaatgaaaactgggatagattgcaccctggagagctggcagacacaccgaaatctgaaagatatgagcatgttctggaggcattaaatgattacaagaccatgtttatgtctgggaaagaaataaagaagaagaagcatttgtttgggttgcgaattcgtgttcctcctgtgccaccaaatgtggctttcaaagcagagaaagaacctgaaggaacatctcatgaatttaaaattaaaggcagaaaggcatccaaacctatatctgattcaagggaagtaagcaatggcatagaaaaaaaaggaaagaaaaaatctgtaggtcgtccacctggcccatatacaagaaaaatgattcaaaaaactgctgagccacttttggataaggaatcaatttcagagaatcctactttggatttaccttgttctatagggagaactgagggaactgcacattcatccaatacctcagatgtggatttcacgggtgcttccagtgcaaaagaaactacctcgtctagcatttccaggcattatggattatctgactccagaaaaagaacgcgtacaggaagatcttggcctgctgcaataccacatttgaggagaagaagaggtcgtcttccaagaagagcactccagactcagaactcagaaattgtaaaagatgatgaaggcaaagaagattatcagtttgatgaactcaacacagagattctgaataacttagcagatcaggagttacaactcaatcatctaaagaactccattaccagttattttggtgctgcaggtagaatagcatgtggcgaaaaataccgagttttggcacgtcgggtgacacttgatggaaaggtgcagtatcttgtggaatgggaaggagcaactgcatcctgactgtaggactgaacattatgttcactgcactctgattttctgtaggtacagttcaaagccctaaagggagtctggcttttactatctttcttaaaaaaaaaaaaaaagagtcaaaaaaattcaaaaaaggggatgatactagccttaacatgtacctgtcaatgttatggatattgtcataaaaaggtatcttttaaaaatcagaacagagacttaattttttaaatcttaagatttgtagaatgtttctaggataggatattaaaaatgattgaaacccatgcatggtgttagacaatttttctaattattccattgagtcagttttttgtgattagtgattatcagagcaaacatcatgtagatagcacaagtatttggagaaacgttgtttgttttgattagtgattatcagagcaaacatcatgtagatagcacaagtatttggagaaacgttgtttgttttgttaccaaaatgttggaaaaatttatttcaataccttttagatttcataaagtgcagtgtatataatgcctactgaaagactgtaaaatattgaaattttctttcaagcaaagtgtaaaaaaatatattgagcctgtaaattgcaaaaaaaaaaaaa

SEQ ID NO: 822 - protein, 593 aa, Homo sapiens
MRDSTGAGNSLVHKRSPLRRNQKTPTSLTKLSLQDGHKAKKPACKFEEGQDVLARWSDGLFYLGTIKKINILKQSCFIIFEDSSKSWVLWKDIQTGATGSGEMVCTICQEEYSEAPNEMVICDKCGQGYHQLCHTPHIDSSVIDSDEKWLCRQCVFATTTKRGGALKKGPNAKALQVMKQTLPYSVADLEWDAGHKTNVQQCYCYCGGPGDWYLKMLQCCKCKQWFHEACVQCLQKPMLFGDRFYTFICSVCSSGPEYLKRLPLQWVDIAHLCLYNLSVIHKKKYFDSELELMTYINENWDRLHPGELADTPKSERYEHVLEALNDYKTMFMSGKEIKKKKHLFGLRIRVPPVPPNVAFKAEKEPEGTSHEFKIKGRKASKPISDSREVSNGIEKKGKKKSVGRPPGPYTRKMIQKTAEPLLDKESISENPTLDLPCSIGRTEGTAHSSNTSDVDFTGASSAKETTSSSISRHYGLSDSRKRTRTGRSWPAAIPHLRRRRGRLPRRALQTQNSEIVKDDEGKEDYQFDELNTEILNNLADQELQLNHLKNSITSYFGAAGRIACGEKYRVLARRVTLDGKVQYLVEWEGATAS

SEQ ID NO: 823 - DNA, 5857 bp, Homo sapiens
cggcgcaggcggcggcgtccgaggagatttaatccagagactgacttcactatagaacccacagttgtatcaatggttggggaaagatagtggcaacaggcaaaggagaaacagctctgacatacaaagaaaatgagtatgctaaagccaagtgggcttaaggcccccaccaagatcctgaagcctggaagcacagctctgaagacacctacggctgttgtagctccagtagaaaaaaccatatccagtgaaaaagcatcaagcactccatcatctgagactcaggaggaatttgtggatgactttcgagttggggagcgagtttgggtgaatggaaataagcctggatttatccagtttcttggagaaacccagtttgcaccaggccagtgggctggaattgttttagatgaacccataggcaagaacgatggttcggtggcaggagttcggtatttccagtgtgaacctttaaagggcatatttacccgaccttcaaagttaacaaggaaggtgcaagcagaagatgaagctaatggcctgcagacaacgcccgcctcccgagctacttcaccgctgtgcacttctacggccagcatggtgtcttcctccccctccaccccttcaaacatccctcagaaaccatcacagccagcagcaaaggaaccttcagctacgcctccgatcagcaaccttacaaaaactgccagtgaatctatctccaacctttcagaggctggctcaatcaagaaaggagaaagagagctcaaaatcggagacagagtattggttggtggcactaaggctggtgtagtccggtttcttggggagaccgactttgccaagggggagtggtgtggcgtggagttagatgagccacttgggaagaatgatggcgctgttgctggaacaaggtattttcagtgtcaacccaaatatggcttgttcgctcctgtccacaaagttaccaagattggcttcccttccactacaccagccaaagccaaggccaacgcagtgaggcgagtgatggcgaccacgtccgccagcctgaagcgcagcccttctgcctcttccctcagctccatgagctcagtggcctcctctgtgagcagcaggcccagtcggacaggactattgactgaaacctcctcccgttacgccaggaagatctccggtaccactgccctccaggaggccctgaaggagaagcagcagcacattgagcagctgctggcggaacgggatctggagagggcggaggtggccaaggccacgagccacgtgggggagatagagcaggagctagctctggcccgggacggacatgaccagcatgtcctggaattggaagccaaaatggaccagctgcgaacaatggtggaagctgctgacagggagaaggtggagcttctcaaccagcttgaagaggagaaaaggaaggttgaggaccttcagttccgggttgaagaagaatcaattaccaaaggtgatcttgagacgcagaccaaactggagcatgcccgcattaaggagcttgaacagagcctgctctttgaaaagaccaaagctgacaaactccagagggagttagaagacactagggtggctacagtttcagaaaagtcacgtataatggaactggagaaagacctagcattgagagtacaggaagtagctgagctccgaagaaggctagagtccaataagcctgctggggatgtggacatgtcactttcccttttgcaagagataagctctttgcaagaaaagttagaagtcacccgtactgaccaccagagagaaataacttctctgaaggagcattttggagcccgggaagaaactcatcagaaggagataaaggctctgtataccgccacggaaaagctttccaaagagaacgagtcattgaaaagcaagctggagcatgccaacaaagagaactcagatgtgatagctctatggaagtccaaactggagactgccatcgcatcccaccagcaggcgatggaagaactgaaggtatctttcagcaaagggcttggaacagagacggcagaatttgctgaactaaaaacacaaatagagaaaatgagactagattaccaacacgaaatagaaaatttgcagaatcaacaagactctgaacgggctgcccatgctaaagagatggaagccttgagggctaaactgatgaaagttattaaagaaaaggaaaacagtctggaagccatcaggtcgaaactggacaaagcagaagaccagcatctcgtagaaatggaagacacgttaaacaaattacaggaagctgaaataaaggtaaaggagctagaggtactgcaagccaaatgcaatgaacaaaccaaggttattgataattttacatcacagctcaaggctactgaagaaaagctcttggatcttgatgcacttcggaaagccagttccgaaggtaaatcggaaatgaagaaacttagacagcagcttgaggcagctgagaaacagattaaacatttagagattgaaaagaatgctgaaagtagcaaggctagtagcattaccagagagctccaggggagagagctaaagcttactaaccttcaggaaaatttgagtgaagtcagtcaagtgaaagagactttggaaaaagaacttcagattttgaaagaaaagtttgctgaagcttcagaggaggcagtctctgttcagagaagtatgcaagaaactgtaaataagttacaccaaaaggaggaacagtttaacatgctgtcttctgacttggagaagctgagagaaaacttagcagatatggaggcaaaatttagagagaaagatgagagagaagagcagctgataaaggcaaaggaaaaactggaaaatgacattgcagaaataatgaagatgtcaggagataactcttctcagctgacaaaaatgaacgatgaattacgtctgaaagaaagagatgtagaagaattacagctaaaacttacaaaggctaatgaaaatgcaagttttctgcaaaaaagtattgaggacatgactgtcaaagctgaacagagccagcaagaagcagctaaaaagcatgaggaagaaaagaaagaattggagaggaaattgtcggacctggaaaagaaaatggaaacaagccacaaccagtgtcaggagctgaaagccaggtatgagagagccacttctgagacaaaaaccaagcatgaagaaatcctacagaacctccagaagacgctgctggacacagaggacaagctgaagggcgcacgggaggagaacagtggcttgctgcaggagctggaggagctgagaaagcaagccgacaaagccaaagctgctcaaacagcggaagatgccatgcagataatggaacagatgaccaaagagaagactgagactctggcctccttggaggacaccaagcaaacaaatgcaaaactacagaatgaattggacacacttaaagaaaacaacttgaaaaatgtggaagagctgaacaaatcaaaagaactcctgactgtagagaatcaaaaaatggaagaatttaggaaagaaatagaaaccctaaagcaggcagcagctcagaagtcccagcagctttcagcgttgcaagaagagaacgttaaacttgctgaggagctggggagaagcagggacgaagtcacaagtcatcaaaagctggaagaagaaagatctgtgctcaataatcagttgttagaaatgaaaaaaagagaatccaagttcataaaagacgcagatgaagagaaagcttccttgcagaaatccatcagtataactagtgccttactcacagaaaaggatgccgagctggagaaactgagaaatgaggtcacagtgctcaggggagaaaacgcctctgccaagtccttgcattcagttgttcagactctagagtctgataaggtgaagctcgagctcaaggtaaagaacttggagcttcaactcaaagaaaacaagaggcagctcagcagctcctcaggtaatacagacactcaggcagacgaggatgaaagagcccaggagagtcagattgatttcctaaattcagtaatagtggaccttcaaaggaagaatcaagacctcaagatgaaggtggagatgatgtcagaagcagccctgaatgggaacggggatgacctaaacaattatgacagtgatgatcaggagaaacagtccaagaagaaacctcgcctcttctgtgacatttgtgactgctttgatctccacgacacagaggattgtcctacccaggcacagatgtcagaggaccctccccattccacacaccatggcagtcggggtgaggaacgcccatactgtgaaatctgtgagatgtttggacactgggccaccaactgcaatgacgacgaaaccttctgatgaagcctccagtggagaactgggcttgctcagacgcactcgcattgacacaacgtaacaccagcattgtgtgtgcagacttcaggagaactcatgttattttttaaccccgtcaacaaatctaggaaaatattttgatcttcaacaaattgccctttagtctccccgtatgagttagaataataaatatttagtaggtgagttttcacctcgaattttgttttcttgatttttacgtttgaagacattgcaccagatgccattacatttattggccccccgaccttgtagaaaaacccctaccctcacaataccttatttaagtaactttaaattatgccgttacttttcatatttgcacctaagatatttccaggctgcatttgtatatttagattttttggttaagctttgacactggaatgagttgaaaaaatgtgccattttgcattttcatctactcatttaaagtattttattcttattcaaagaaatatctgagctctttgcactacctgttatcagtagtgcctttacttcaggcttgataatacttaggtgtgattataaaatcatgaagcaggtaaagggaggggcaagccccaaactgctgtggggacattttataatctatatgctgcacccacttaatctactgtggtgttttgtttattagttttgcataatttcagcttctatatattgtatgtatatattttttaaaaatctatattttgggaaaaaaacatacacaatgtgtctttctttttggacatttacctttttgaaaaagaaaacacttaaaatgatcattaggacataacagactaggccagacatagcatcttgtggctttgcaaccattttcatttgtttgttttccttttatttcttcaccagatttaaataaaaggaggaattttctccaatttttttttccttctctggcaggtatccccagcagtcaattaacaataagccagtataaaacacctaaataaccaatctacaatctcccttcacaagtttttttactgtttttagatgaatgtacgatgagaaattcaacgttaataattctggattttcttatcacaaaaaagaaaatgaaggacctcaaagcacctgaacagtttatcgaccagtttgaatctatttatcttcatttgaatgtcttctagatatgtaaaaagtcataaaatgtatcttccatgctacatgtacaataagaacttctataattgtatatatgcctttgatgtattttcccctcaagattatcaactgtgtgttcgacagtgaatattcaatctggtaccagttgaaatttttggttataaatgtaatacgaattgtttcacaaacagaaaacatgtaaagcagtattaaaatttggccaaacaagtgttctgtatctacttttaataaatggttattcttt

SEQ ID NO: 824 - protein, 1427 aa, Homo sapiens
MSMLKPSGLKAPTKILKPGSTALKTPTAVVAPVEKTISSEKASSTPSSETQEEFVDDFRVGERVWVNGNKPGFIQFLGETQFAPGQWAGIVLDEPIGKNDGSVAGVRYFQCEPLKGIFTRPSKLTRKVQAEDEANGLQTTPASRATSPLCTSTASMVSSSPSTPSNIPQKPSQPAAKEPSATPPISNLTKTASESISNLSEAGSIKKGERELKIGDRVLVGGTKAGVVRFLGETDFAKGEWCGVELDEPLGKNDGAVAGTRYFQCQPKYGLFAPVHKVTKIGFPSTTPAKAKANAVRRVMATTSASLKRSPSASSLSSMSSVASSVSSRPSRTGLLTETSSRYARKISGTTALQEALKEKQQHIEQLLAERDLERAEVAKATSHVGEIEQELALARDGHDQHVLELEAKMDQLRTMVEAADREKVELLNQLEEEKRKVEDLQFRVEEESITKGDLETQTKLEHARIKELEQSLLFEKTKADKLQRELEDTRVATVSEKSRIMELEKDLALRVQEVAELRRRLESNKPAGDVDMSLSLLQEISSLQEKLEVTRTDHQREITSLKEHFGAREETHQKEIKALYTATEKLSKENESLKSKLEHANKENSDVIALWKSKLETAIASHQQAMEELKVSFSKGLGTETAEFAELKTQIEKMRLDYQHEIENLQNQQDSERAAHAKEMEALRAKLMKVIKEKENSLEAIRSKLDKAEDQHLVEMEDTLNKLQEAEIKVKELEVLQAKCNEQTKVIDNFTSQLKATEEKLLDLDALRKASSEGKSEMKKLRQQLEAAEKQIKHLEIEKNAESSKASSITRELQGRELKLTNLQENLSEVSQVKETLEKELQILKEKFAEASEEAVSVQRSMQETVNKLHQKEEQFNMLSSDLEKLRENLADMEAKFREKDEREEQLIKAKEKLENDIAEIMKMSGDNSSQLTKMNDELRLKERDVEELQLKLTKANENASFLQKSIEDMTVKAEQSQQEAAKKHEEEKKELERKLSDLEKKMETSHNQCQELKARYERATSETKTKHEEILQNLQKTLLDTEDKLKGAREENSGLLQELEELRKQADKAKAAQTAEDAMQIMEQMTKEKTETLASLEDTKQTNAKLQNELDTLKENNLKNVEELNKSKELLTVENQKMEEFRKEIETLKQAAAQKSQQLSALQEENVKLAEELGRSRDEVTSHQKLEEERSVLNNQLLEMKKRESKFIKDADEEKASLQKSISITSALLTEKDAELEKLRNEVTVLRGENASAKSLHSVVQTLESDKVKLELKVKNLELQLKENKRQLSSSSGNTDTQADEDERAQESQIDFLNSVIVDLQRKNQDLKMKVEMMSEAALNGNGDDLNNYDSDDQEKQSKKKPRLFCDICDCFDLHDTEDCPTQAQMSEDPPHSTHHGSRGEERPYCEICEMFGHWATNCNDDETF

SEQ ID NO: 825 - DNA, 624 bp, Homo sapiens
cacctgctgccgcccgcgccatggctggcaaagcacacaggctgagcgctgaggagagggaccagctgctgccaaacctgagggctgtggggtggaatgagctggaaggccgtgatgccatcttcaagcagtttcatttcaaagacttcaacagggcctttgggttcatgacaagagtggccctgcaggctgagaaactggaccaccatcctgaatggtttaacgtgtacaacaaggtccacatcacgctgagcacccatgagtgtgccggcctttcagaacgggacataaacctggccagcttcatcgaacaagtagcagtgtccatgacatagaccctgcccttcctctttgaattcttccgggggaaggggtgactgaactgggagtccagggagggagctgaggagcccttaccctcccaccactcccctcccaagacccagccgccgccgttgagggctgagtccttgctgtgggatgtgccagtgtccccaccaacaccaggaatttagaccttttccctgcaccactctcttcatcctgggggctctgttacactaatttgaataaactctcccctttctttgcaacttcccagcaacaataatgattttcttgcca

SEQ ID NO: 826 - protein, 104 aa, Homo sapiens
MAGKAHRLSAEERDQLLPNLRAVGWNELEGRDAIFKQFHFKDFNRAFGFMTRVALQAEKLDHHPEWFNVYNKVHITLSTHECAGLSERDINLASFIEQVAVSMT

SEQ ID NO: 827 - DNA, 6744 bp, Homo sapiens
ggacctcgcaggccaagaattcggcacgaggggcgccggctcccggggcacggacggccgggcgcgcgcctctgcgaggggcgtccgggtccgagtcggcggtccgggccggcgcgaggtgcgtgcgggcgggccgcgggggtcccggacggacacaagcgcacacactcccggaagatcgcttaccctccgggggtaaaagagatcaccgacaagatcaccacggacgagatgatcaaacgcctgaagatggtagtgaaaacctttatggatatggatcaggactcagaagatgaaaaacagcagtatctcccactagccttgcatcttgcatctgaattcttcctcaggaaccccaataaagatgtgcgtctccttgtagcatgttgtttggctgatatctttcgtatctatgccccagaagctccatatacttcccatgataaacttaaggacatatttttgtttattaccagacaattaaaaggtttggaggatacaaagagtccacagtttaatagatacttttatttattagagaatttagcttgggttaaatcatataacatctgctttgaattggaagattgcaatgaaatttttattcagctttttagaactctcttctcagtgatcaacaatagccacaataagaaggtacaaatgcacatgctagatttgatgagttctatcatcatggaaggtgatggagttactcaagaattattgggctccattcttattaacctcattcctgcacataagaacttaaataaacagtcctttgaccttgcaaaagtgctattgaaaagaacagtccagactattgaggcatgcattgccaattttttcaatcaagtcctggtgctgggaagatcatcagtaagtgatttgtcagaacatgtatttgatctgattcaggaactttttgctatagatcctcatttattattatccgtcatgccacagcttgaattcaaactaaagagcaatgatggagaagagcgattagctgttgttcgacttctagctaaattgtttggctccaaagattctgatttggcaacacagaatcgtcctctttggcaatgttttcttggacgatttaatgatattcatgttcctgtgagattagaaagtgtgaaatttgccagtcattgtttaatgaatcacccagatttagcgaaggatctcacagaatatttaaaggttagatcacatgatccagaagaagctattcgtcatgatgtcattgttactataataacagctgccaagagggacctggccttagtaaatgatcagctgcttggctttgtaagggaaagaacactggataaacggtggcgagtaagaaaagaagctatgatgggtctggctcagctttataagaaatactgtcttcatggtgaagcaggaaaggaagctgcagagaaagtcagctggataaaggacaaacttctgcatatttattatcagaacagcattgacgacaaactgttggtagagaaaatctttgctcagtatcttgtcccccacaacctggaaacagaagagagaatgaaatgcttatattacttatatgctagtttggatccaaatgctgtaaaagctctcaacgaaatgtggaagtgtcagaacatgcttcggagccatgtacgcgaactattggatttgcacaagcagcctacatcagaggctaactgttctgccatgtttggaaaactgatgaccatagcaaagaatttgcctgaccccgggaaagcacaagattttgtgaagaaatttaaccaggttctcggcgatgatgagaaacttcggtctcagttggagttattaattagcccaacctgttcttgcaaacaagcagatatttgtgtgagagaaatagcccggaaacttgcaaatcctaagcaaccaacaaatccttttctagagatggtcaaatttctgttggaaagaatcgcacctgtgcacattgattcagaagccataagtgcactagtgaaattgatgaataagtcaatagaggggacagcagatgatgaagaggagggtgtaagtccagatacagctatccgttcaggacttgaacttcttaaggttctgtcttttacacatcctacctcgttccactctgcagagacatatgagtccttgttacagtgcctaagaatggaggatgacaaggtagcagaagctgctattcaaatttttagaaatacaggtcacaaaatagaaacagaccttccccagatacgatcgaccttaattcccattttacatcaaaaagcaaagaggggtactccacaccaagcaaaacaggctgtgcactgtatacacgccatattcacaaataaagaagtccagcttgcacagatttttgagccactcagtaggagtctgaatgctgatgtgccagaacaacttataactccattagtttcattgggccacatttctatgttagcaccagatcagtttgcttccccaatgaaatctgtagtagcaaattttattgtgaaagatctgctaatgaatgacaggtcaacaggtgaaaagaatggaaaactgtggtctccagatgaagaggtttcccctgaagtactagcaaaggtacaggcaattaaacttctggtaaggtggctgttgggtatgaaaaacaaccagtctaaatctgccaattcaacccttcggttattatcagcgatgttggttagtgagggtgacctgacagagcaaaagaggatcagtaaatctgatatgtctcgcttgcgattagctgctggtagtgccataatgaagcttgctcaggaaccttgttaccatgaaattattaccccagaacagtttcagctctgtgcacttgttattaatgatgagtgttaccaagtaaggcagatatttgctcagaagctgcataaggcacttgtgaagttactgctcccattggagtatatggcgatctttgccttgtgtgccaaagatcctgtgaaggagagaagagcacacgcacgacaatgtttactgaaaaatatcagtatacgcagggaatacattaagcagaatcctatggctactgagaaattattatcactgttgcctgaatatgtagttccatacatgattcacctgctagcccatgatccagattttacaagatcacaagatgttgatcagcttcgtgatatcaaagagtgcctatggttcatgcttgaagttttaatgacaaagaatgaaaacaatagccatgcctttatgaagaagatggcagagaacatcaagttaaccagagatgcccagtctccagatgaatccaagacaaatgaaaaactgtatacagtatgtgatgtggctctctgtgttataaatagtaaaagtgctttgtgcaatgcagattcaccaaaggacccagtcctcccaatgaaattttttacacaacctgaaaaggacttctgtaacgataagagttatatttcagaagagacaagagtacttctgttaacaggaaagccaaagcctgctggagtactaggtgcagtaaataagcctttatcagcaacgggaaggaaaccctatgttagaagcactggcactgagactggaagcaatattaatgtaaattcagagctgaacccttcaaccggaaatcgatcaagggaacagagttcagaggcagcagaaactggagttagtgaaaatgaagagaaccctgtgaggattatttcagtcacacctgtaaagaatattgacccagtaaagaataaggaaattaattctgatcaggctacccagggcaacatcagcagtgaccgaggaaagaaaagaacagtaacagcagctggtgcagagaatatccaacaaaaaacagatgagaaagtagatgaatcgggacctcccgccccttccaaacccaggagaggacgtcgacccaagtctgaatctcagggcaatgctaccaaaaatgatgatctaaataaacctattaacaagggaaggaagagagctgcagtgggtcaggagagccctgggggtttggaagcaggtaatgccaaagcacccaaactgcaagatttagccaaaaaggcagcaccagcagaaagacaaattgacttacaaaggtaaaaatgcatttgcaaagggagaaaatgaaggccaaacagaagcaggctccagcttctgcaaaaacttggattcacaaatgtccctgaacagaaaatgaagctcacttcagaacacacactctctgccttgaaaactaaagagactattacttccttttcacatgaccacaagtcctctgatggaaatgtacagcagaaactcttgagagagaggctaaaagcaactctgttctcccccttcccctagacttttcttacgaaaagtcaataattaagcaaattgcttaacacttggttccagttcctgcctatctggagtttaaatgcgtaatacaccattaatttccacgctgcagtttttattttaaagaaagtaacaagatgtctttacactgacactgaaaattcatccattttagagccaggaattcccatgttacacaggaaaaaatagaagtctactgaattaattttttaaaagaaaagagatcagattaaatatttctttgtttttccttttggaaacttttatgtataattctttctgcctgcctacttttctgcaaaaatgagatgtacagatttcggttccctgctatgaaaagtgatgtggtagcaattttataaatgttgctttctgatttttatcagagtgagaaaattaaaattattgatttgcaagtagtaaacagttcatattttgatttcccctcattttagtttaatataatttgcaataaatgtacatattgttgtttgtttcataaagcatatcactttaaaatggtttttactcctgtgattatgttggaatatttggaattttaaaggagtaaagactgtccagcatttggttttataatgtttgtcaccagatttttattaatgtaaaaaatcaatttttaaaaaatagttggactttggcagcttttaaggaaagttggaggtgttttaggattgctatcaattttcagcattgtgctatttggaaataagtgttttgcttttgtctgatggtctgggctcatttttatgtttattttagaaaactgttgcatcaatatattatgtttcttggcattgttcagcataggtaatgtgtgcactttatgtgtacacataatcatatttaagttttttgcataaaataaatgcttctagatgtcatggcagtctttttaatctttttatcatatgctttcttgtgaattttttcatgttaaagagctaaagtcataacatgattacagtcaactctccattatctatataaaatagtgactaagcctcaggtttttaattttgtgataacaaaataacgaaggcatgtaagacctgattctggaggaacatgaaatttgtcttttctcatgtccagagttctatcctgcccccactgtccactgtagggtcatccgcaaagccctagcagaatgtgctcactccatttccttacacgtttctagcatgggtcagaggaaacaacatttgtgttataacttcgtcttgataggctgtagtgtacatgggatgtaaaacaaacaagtgtatcaaaggtggatgattctgttagagtgaagtttgagagtaaatgtcacttacgtttctcatagatgatcaagagttggctgtgtattgactgaaagatgggtaattattttaaatatgcatttacacacatttaggtatcagaagatgcttagggaacaatggataccaatgatagaaaatgatacctttacaggggcagaaaaatccccactcttccttattgcctcttcagaaccctttagaaagtataaaatattgcctccaacatgctgaaaaagagtatctatgcataagtatcagagaagtccctcaagcaatcagtaggtgtgttctatttagagagagtttaaagttctcttagcatcagacaacttgattcctaaggtttccagtgtgtcaccaacaaaaagtgcattgatagggacctttgtctcttcctccctttgattaattgcccggcatcacagtttactagattaccaagtgttacatcatattaaataaaatgtagcagaaccatctgcatcaatatattcctgtttagatttttgcaggagagaagttaaaaggatttgctccttgtatgatgtaagtggcccaccccaattttgtaacatgatgcaagtgtctggcactaagggaagcaagagtagggttgtggaaagaccaagctgatggggagggacttgtttacgggaatttttttagttttccttttcaaaggaaaacattaaaatcccttaggaatttggtattcacatctcagagaactacaacacaaaagtgcagacttatatttgagaattaatgttaaccctttgtgtctagtttgaagcttcttgtatttgtctaaaacaacaagccagaattttgtatctcctttgataaaaagtgtgtataatgtaaagtagttttgcatattcttgtgctgcacatgggctgaatttttaaattttttttaaaaacttgaagcagaaccttgtaatttgtgtaaatgacaagtgtaaaatcctaccataaaatgctaaaaatatgcactgtttcaaataaaaccaagaaatgcagcatt

SEQ ID NO: 828 - protein, 1297 aa, Homo sapiens
MIKRLKMVVKTFMDMDQDSEDEKQQYLPLALHLASEFFLRNPNKDVRLLVACCLADIFRIYAPEAPYTSHDKLKDIFLFITRQLKGLEDTKSPQFNRYFYLLENLAWVKSYNICFELEDCNEIFIQLFRTLFSVINNSHNKKVQMHMLDLMSSIIMEGDGVTQELLGSILINLIPAHKNLNKQSFDLAKVLLKRTVQTIEACIANFFNQVLVLGRSSVSDLSEHVFDLIQELFAIDPHLLLSVMPQLEFKLKSNDGEERLAVVRLLAKLFGSKDSDLATQNRPLWQCFLGRFNDIHVPVRLESVKFASHCLMNHPDLAKDLTEYLKVRSHDPEEAIRHDVIVTIITAAKRDLALVNDQLLGFVRERTLDKRWRVRKEAMMGLAQLYKKYCLHGEAGKEAAEKVSWIKDKLLHIYYQNSIDDKLLVEKIFAQYLVPHNLETEERMKCLYYLYASLDPNAVKALNEMWKCQNMLRSHVRELLDLHKQPTSEANCSAMFGKLMTIAKNLPDPGKAQDFVKKFNQVLGDDEKLRSQLELLISPTCSCKQADICVREIARKLANPKQPTNPFLEMVKFLLERIAPVHIDSEAISALVKLMNKSIEGTADDEEEGVSPDTAIRSGLELLKVLSFTHPTSFHSAETYESLLQCLRMEDDKVAEAAIQIFRNTGHKIETDLPQIRSTLIPILHQKAKRGTPHQAKQAVHCIHAIFTNKEVQLAQIFEPLSRSLNADVPEQLITPLVSLGHISMLAPDQFASPMKSVVANFIVKDLLMNDRSTGEKNGKLWSPDEEVSPEVLAKVQAIKLLVRWLLGMKNNQSKSANSTLRLLSAMLVSEGDLTEQKRISKSDMSRLRLAAGSAIMKLAQEPCYHEIITPEQFQLCALVINDECYQVRQIFAQKLHKALVKLLLPLEYMAIFALCAKDPVKERRAHARQCLLKNISIRREYIKQNPMATEKLLSLLPEYVVPYMIHLLAHDPDFTRSQDVDQLRDIKECLWFMLEVLMTKNENNSHAFMKKMAENIKLTRDAQSPDESKTNEKLYTVCDVALCVINSKSALCNADSPKDPVLPMKFFTQPEKDFCNDKSYISEETRVLLLTGKPKPAGVLGAVNKPLSATGRKPYVRSTGTETGSNINVNSELNPSTGNRSREQSSEAAETGVSENEENPVRIISVTPVKNIDPVKNKEINSDQATQGNISSDRGKKRTVTAAGAENIQQKTDEKVDESGPPAPSKPRRGRRPKSESQGNATKNDDLNKPINKGRKRAAVGQESPGGLEAGNAKAPKLQDLAKKAAPAERQIDLQR

SEQ ID NO: 829 - DNA, 10182 bp, Homo sapiens
ccggaaaatggccgccgccgccgccgccgcgccgagcggaggaggaggaggaggcgaggaggagagactgctccataaaaatacagactcaccagttcctgctttgatgtgacatgtgactccccagaatacaccttgcttctgtagaccagctccaacaggattccatggtagctgggatgttagggctcagggaagaaaagtcagaagaccaggacctccagggcctcaaggacaaacccctcaagtttaaaaaggtgaagaaagataagaaagaagagaaagagggcaagcatgagcccgtgcagccatcagcccaccactctgctgagcccgcagaggcaggcaaagcagagacatcagaagggtcaggctccgccccggctgtgccggaagcttctgcctcccccaaacagcggcgctccatcatccgtgaccggggacccatgtatgatgaccccaccctgcctgaaggctggacacggaagcttaagcaaaggaaatctggccgctctgctgggaagtatgatgtgtatttgatcaatccccagggaaaagcctttcgctctaaagtggagttgattgcgtacttcgaaaaggtaggcgacacatccctggaccctaatgattttgacttcacggtaactgggagagggagcccctcccggcgagagcagaaaccacctaagaagcccaaatctcccaaagctccaggaactggcagaggccggggacgccccaaagggagcggcaccacgagacccaaggcggccacgtcagagggtgtgcaggtgaaaagggtcctggagaaaagtcctgggaagctccttgtcaagatgccttttcaaacttcgccagggggcaaggctgaggggggtggggccaccacatccacccaggtcatggtgatcaaacgccccggcaggaagcgaaaagctgaggccgaccctcaggccattcccaagaaacggggccgaaagccggggagtgtggtggcagccgctgccgccgaggccaaaaagaaagccgtgaaggagtcttctatccgatctgtgcaggagaccgtactccccatcaagaagcgcaagacccgggagacggtcagcatcgaggtcaaggaagtggtgaagcccctgctggtgtccaccctcggtgagaagagcgggaaaggactgaagacctgtaagagccctgggcggaaaagcaaggagagcagccccaaggggcgcagcagcagcgcctcctcaccccccaagaaggagcaccaccaccatcaccaccactcagagtccccaaaggcccccgtgccactgctcccacccctgcccccacctccacctgagcccgagagctccgaggaccccaccagcccccctgagccccaggacttgagcagcagcgtctgcaaagaggagaagatgcccagaggaggctcactggagagcgacggctgccccaaggagccagctaagactcagcccgcggttgccaccgccgccacggccgcagaaaagtacaaacaccgaggggagggagagcgcaaagacattgtttcatcctccatgccaaggccaaacagagaggagcctgtggacagccggacgcccgtgaccgagagagttagctgactttacacggagcggattgcaaagcaaaccaacaagaataaaggcagctgttgtctcttctccttatgggtagggctctgacaaagcttcccgattaactgaaataaaaaatatttttttttctttcagtaaacttagagtttcgtggcttcagggtgggagtagttggagcattggggatgtttttcttaccgacaagcacagtcaggttgaagacctaaccagggccagaagtagctttgcacttttctaaactaggctccttcaacaaggcttgctgcagatactactgaccagacaagctgttgaccaggcacctcccctcccgcccaaacctttcccccatgtggtcgttagagacagagcgacagagcagttgagaggacactcccgttttcggtgccatcagtgccccgtctacagctcccccagctccccccacctcccccactcccaaccacgttgggacagggaggtgtgaggcaggagagacagttggattctttagagaagatggatatgaccagtggctatggcctgtgcgatcccacccgtggtggctcaagtctggccccacaccagccccaatccaaaactggcaaggacgcttcacaggacaggaaagtggcacctgtctgctccagctctggcatggctaggaggggggagtcccttgaactactgggtgtagactggcctgaaccacaggagaggatggcccagggtgaggtggcatggtccattctcaagggacgtcctccaacgggtggcgctagaggccatggaggcagtaggacaaggtgcaggcaggctggcctggggtcaggccgggcagagcacagcggggtgagagggattcctaatcactcagagcagtctgtgacttagtggacaggggagggggcaaagggggaggagaagaaaatgttcttccagttactttccaattctcctttagggacagcttagaattatttgcactattgagtcttcatgttcccacttcaaaacaaacagatgctctgagagcaaactggcttgaattggtgacatttagtccctcaagccaccagatgtgacagtgttgagaactacctggatttgtatatatacctgcgcttgttttaaagtgggctcagcacatagggttcccacgaagctccgaaactctaagtgtttgctgcaattttataaggacttcctgattggtttctcttctccccttccatttctgccttttgttcatttcatcctttcacttctttcccttcctccgtcctcctccttcctagttcatcccttctcttccaggcagccgcggtgcccaaccacacttgtcggctccagtccccagaactctgcctgccctttgtcctcctgctgccagtaccagccccaccctgttttgagccctgaggaggccttgggctctgctgagtccgacctggcctgtctgtgaagagcaagagagcagcaaggtcttgctctcctaggtagccccctcttccctggtaagaaaaagcaaaaggcatttcccaccctgaacaacgagccttttcacccttctactctagagaagtggactggaggagctgggcccgatttggtagttgaggaaagcacagaggcctcctgtggcctgccagtcatcgagtggcccaacaggggctccatgccagccgaccttgacctcactcagaagtccagagtctagcgtagtgcagcagggcagtagcggtaccaatgcagaactcccaagacccgagctgggaccagtacctgggtccccagcccttcctctgctcccccttttccctcggagttcttcttgaatggcaatgttttgcttttgctcgatgcagacagggggccagaacaccacacatttcactgtctgtctggtccatagctgtggtgtaggggcttagaggcatgggcttgctgtgggtttttaattgatcagttttcatgtgggatcccatctttttaacctctgttcaggaagtccttatctagctgcatatcttcatcatattggtatatccttttctgtgtttacagagatgtctcttatatctaaatctgtccaactgagaagtaccttatcaaagtagcaaatgagacagcagtcttatgcttccagaaacacccacaggcatgtcccatgtgagctgctgccatgaactgtcaagtgtgtgttgtcttgtgtatttcagttattgtccctggcttccttactatggtgtaatcatgaaggagtgaaacatcatagaaactgtctagcacttccttgccagtctttagtgatcaggaaccatagttgacagttccaatcagtagcttaagaaaaaaccgtgtttgtctcttctggaatggttagaagtgagggagtttgccccgttctgtttgtagagtctcatagttggactttctagcatatatgtgtccatttccttatgctgtaaaagcaagtcctgcaaccaaactcccatcagcccaatccctgatccctgatcccttccacctgctctgctgatgacccccccagcttcacttctgactcttccccaggaagggaaggggggtcagaagagagggtgagtcctccagaactcttcctccaaggacagaaggctcctgcccccatagtggcctcgaactcctggcactaccaaaggacacttatccacgagagcgcagcatccgaccaggttgtcactgagaagatgtttattttggtcagttgggtttttatgtattatacttagtcaaatgtaatgtggcttctggaatcattgtccagagctgcttccccgtcacctgggcgtcatctggtcctggtaagaggagtgcgtggcccaccaggcccccctgtcacccatgacagttcattcagggccgatggggcagtcgtggttgggaacacagcatttcaagcgtcactttatttcattcgggccccacctgcagctccctcaaagaggcagttgcccagcctctttcccttccagtttattccagagctgccagtggggcctgaggctccttagggttttctctctatttccccctttcttcctcattccctcgtctttcccaaaggcatcacgagtcagtcgcctttcagcaggcagccttggcggtttatcgccctggcaggcaggggccctgcagctctcatgctgcccctgccttggggtcaggttgacaggaggttggagggaaagccttaagctgcaggattctcaccagctgtgtccggcccagttttggggtgtgacctcaatttcaattttgtctgtacttgaacattatgaagatgggggcctctttcagtgaatttgtgaacagcagaattgaccgacagctttccagtacccatggggctaggtcattaaggccacatccacagtctcccccacccttgttccagttgttagttactacctcctctcctgacaatactgtatgtcgtcgagctccccccaggtctacccctcccggccctgcctgctggtgggcttgtcatagccagtgggattgccggtcttgacagctcagtgagctggagatacttggtcacagccaggcgctagcacagctcccttctgttgatgctgtattcccatatcaaaagacacaggggacacccagaaacgccacatcccccaatccatcagtgccaaactagccaacggccccagcttctcagctcgctggatggcggaagctgctactcgtgagcgccagtgcgggtgcagacaatcttctgttgggtggcatcattccaggcccgaagcatgaacagtgcacctgggacagggagcagccccaaattgtcacctgcttctctgcccagcttttcattgctgtgacagtgatggcgaaagagggtaataaccagacacaaactgccaagttgggtggagaaaggagtttctttagctgacagaatctctgaattttaaatcacttagtaagcggctcaagcccaggagggagcagagggatacgagcggagtcccctgcgcgggaccatctggaattggtttagcccaagtggagcctgacagccagaactctgtgtcccccgtctaaccacagctccttttccagagcattccagtcaggctctctgggctgactgggccaggggaggttacaggtaccagttctttaagaagatctttgggcatatacatttttagcctgtgtcattgccccaaatggattcctgtttcaagttcacacctgcagattctaggacctgtgtcctagacttcagggagtcagctgtttctagagttcctaccatggagtgggtctggaggacctgcccggtgggggggcagagccctgctccctccgggtcttcctactcttctctctgctctgacgggatttgttgattctctccattttggtgtctttctcttttagatattgtatcaatctttagaaaaggcatagtctacttgttataaatcgttaggatactgcctcccccagggtctaaaattacatattagaggggaaaagctgaacactgaagtcagttctcaacaatttagaaggaaaacctagaaaacatttggcagaaaattacatttcgatgtttttgaatgaatacgagcaagcttttacaacagtgctgatctaaaaatacttagcacttggcctgagatgcctggtgagcattacaggcaaggggaatctggaggtagccgacctgaggacatggcttctgaacctgtcttttgggagtggtatggaaggtggagcgttcaccagtgacctggaaggcccagcaccaccctccttcccactcttctcatcttgacagagcctgccccagcgctgacgtgtcaggaaaacacccagggaactaggaaggcacttctgcctgaggggcagcctgccttgcccactcctgctctgctcgcctcggatcagctgagccttctgagctggcctctcactgcctccccaaggccccctgcctgccctgtcaggaggcagaaggaagcaggtgtgagggcagtgcaaggagggagcacaacccccagctcccgctccgggctccgacttgtgcacaggcagagcccagaccctggaggaaatcctacctttgaattcaagaacatttggggaatttggaaatctctttgcccccaaacccccattctgtcctacctttaatcaggtcctgctcagcagtgagagcagatgaggtgaaaaggccaagaggtttggctcctgcccactgatagcccctctccccgcagtgtttgtgtgtcaagtggcaaagctgttcttcctggtgaccctgattatatccagtaacacatagactgtgcgcataggcctgctttgtctcctctatcctgggcttttgttttgctttttagttttgcttttagtttttctgtcccttttatttaacgcaccgactagacacacaaagcagttgaatttttatatatatatctgtatattgcacaattataaactcattttgcttgtggctccacacacacaaaaaaagacctgttaaaattatacctgttgcttaattacaatatttctgataaccatagcataggacaagggaaaataaaaaaagaaaaaaaagaaaaaaaaacgacaaatctgtctgctggtcacttcttctgtccaagcagattcgtggtcttttcctcgcttctttcaagggctttcctgtgccaggtgaaggaggctccaggcagcacccaggttttgcactcttgtttctcccgtgcttgtgaaagaggtcccaaggttctgggtgcaggagcgctcccttgacctgctgaagtccggaacgtagtcggcacagcctggtcgccttccacctctgggagctggagtccactggggtggcctgactcccccagtccccttcccgtgacctggtcagggtgagcccatgtggagtcagcctcgcaggcctccctgccagtagggtccgagtgtgtttcatccttcccactctgtcgagcctgggggctggagcggagacgggaggcctggcctgtctcggaacctgtgagctgcaccaggtagaacgccagggaccccagaatcatgtgcgtcagtccaaggggtcccctccaggagtagtgaagactccagaaatgtccctttcttctcccccatcctacgagtaattgcatttgcttttgtaattcttaatgagcaatatctgctagagagtttagctgtaacagttctttttgatcatctttttttaataattagaaacaccaaaaaaatccagaaacttgttcttccaaagcagagagcattataatcaccagggccaaaagcttccctccctgctgtcattgcttcttctgaggcctgaatccaaaagaaaaacagccataggccctttcagtggccgggctacccgtgagcccttcggaggaccagggctggggcagcctctgggcccacatccggggccagctccggcgtgtgttcagtgttagcagtgggtcatgatgctctttcccacccagcctgggataggggcagaggaggcgaggaggccgttgccgctgatgtttggccgtgaacaggtgggtgtctgcgtgcgtccacgtgcgtgttttctgactgacatgaaatcgacgcccgagttagcctcacccggtgacctctagccctgcccggatggagcggggcccacccggttcagtgtttctggggagctggacagtggagtgcaaaaggcttgcagaacttgaagcctgctccttcccttgctaccacggcctcctttccgtttgatttgtcactgcttcaatcaataacagccgctccagagtcagtagtcaatgaatatatgaccaaatatcaccaggactgttactcaatgtgtgccgagcccttgcccatgctgggctcccgtgtatctggacactgtaacgtgtgctgtgtttgctccccttccccttccttctttgccctttacttgtctttctggggtttttctgtttgggtttggtttggtttttatttctccttttgtgttccaaacatgaggttctctctactggtcctcttaactgtggtgttgaggcttatatttgtgtaatttttggtgggtgaaaggaattttgctaagtaaatctcttctgtgtttgaactgaagtctgtattgtaactatgtttaaagtaattgttccagagacaaatatttctagacactttttctttacaaacaaaagcattcggagggagggggatggtgactgagatgagaggggagagctgaacagatgacccctgcccagatcagccagaagccacccaaagcagtggagcccaggagtcccactccaagccagcaagccgaatagctgatgtgttgccactttccaagtcactgcaaaaccaggttttgttccgcccagtggattcttgttttgcttcccctccccccgagattattaccaccatcccgtgcttttaaggaaaggcaagattgatgtttccttgaggggagccaggaggggatgtgtgtgtgcagagctgaagagctggggagaatggggctgggcccacccaagcaggaggctgggacgctctgctgtgggcacaggtcaggctaatgttggcagatgcagctcttcctggacaggccaggtggtgggcattctctctccaaggtgtgccccgtgggcattactgtttaagacacttccgtcacatcccaccccatcctccagggctcaacactgtgacatctctattccccaccctccccttcccagggcaataaaatgaccatggagggggcttgcactctcttggctgtcacccgatcgccagcaaaacttagatgtgagaaaaccccttcccattccatggcgaaaacatctccttagaaaagccattaccctcattaggcatggttttgggctcccaaaacacctgacagcccctccctcctctgagaggcggagagtgctgactgtagtgaccattgcatgccgggtgcagcatctggaagagctaggcagggtgtctgccccctcctgagttgaagtcatgctcccctgtgccagcccagaggccgagagctatggacagcattgccagtaacacaggccaccctgtgcagaagggagctggctccagcctggaaacctgtctgaggttgggagaggtgcacttggggcacagggagaggccgggacacacttagctggagatgtctctaaaagccctgtatcgtattcaccttcagtttttgtgttttgggacaattactttagaaaataagtaggtcgttttaaaaacaaaaattattgattgcttttttgtagtgttcagaaaaaaggttctttgtgtatagccaaatgactgaaagcactgatatatttaaaaacaaaaggcaatttattaaggaaatttgtaccatttcagtaaacctgtctgaatgtacctgtatacgtttcaaaaacaccccccccccactgaatccctgtaacctatttattatataaagagtttgccttataaattt

SEQ ID NO: 830 - protein, 486 aa, Homo sapiens
MVAGMLGLREEKSEDQDLQGLKDKPLKFKKVKKDKKEEKEGKHEPVQPSAHHSAEPAEAGKAETSEGSGSAPAVPEASASPKQRRSIIRDRGPMYDDPTLPEGWTRKLKQRKSGRSAGKYDVYLINPQGKAFRSKVELIAYFEKVGDTSLDPNDFDFTVTGRGSPSRREQKPPKKPKSPKAPGTGRGRGRPKGSGTTRPKAATSEGVQVKRVLEKSPGKLLVKMPFQTSPGGKAEGGGATTSTQVMVIKRPGRKRKAEADPQAIPKKRGRKPGSVVAAAAAEAKKKAVKESSIRSVQETVLPIKKRKTRETVSIEVKEVVKPLLVSTLGEKSGKGLKTCKSPGRKSKESSPKGRSSSASSPPKKEHHHHHHHSESPKAPVPLLPPLPPPPPEPESSEDPTSPPEPQDLSSSVCKEEKMPRGGSLESDGCPKEPAKTQPAVATAATAAEKYKHRGEGERKDIVSSSMPRPNREEPVDSRTPVTERVS

SEQ ID NO: 831 - DNA, 701 bp, Homo sapiens
gggcgggcgcgctgctccttccgcctcgcggaccccggaagcgcgcgtggccgccatggcgcggaatgtggtgtaccccctgtaccggctgggtggcccacaacttcgggtgttccgaaccaacttcttcattcagctggtgcggcccggtgtggcccagcccgaggacaccgtgcagttccggatccccatggaaatgacaagggtggacctcaggaattacctcgagggcatctataacgtgcccgtggctgctgtgcggacacgggtgcagcatggctctaacaagagaagagatcacagaaacgtgaggatcaagaagccggactacaaggtcgcctacgtgcagctggcccatggacagaccttcacgttcccagatctgtttcccgagaaagacgagagccctgaaggcagcactgccgacgacctctacagcatgctcgaggaggagaggcagcagaggcagagcagcgacccgcggcggggcggcgtccccagctggttcgggctgtgacggggtggccagcagggacgcgccccaggtgggcagctgtggcagagcagcgacccgcggcggggcggcatccccagctggttcgggccgtgacggggcggccagcagggacgcgccccaggtgggcagctgtggcagagcagtcccgacacctaaataaaagtcttgctgcaggagaaagaaa

SEQ ID NO: 832 - protein, 153 aa, Homo sapiens
MARNVVYPLYRLGGPQLRVFRTNFFIQLVRPGVAQPEDTVQFRIPMEMTRVDLRNYLEGIYNVPVAAVRTRVQHGSNKRRDHRNVRIKKPDYKVAYVQLAHGQTFTFPDLFPEKDESPEGSAADDLYSMLEEERQQRQSSDPRRGGVPSWFGL

SEQ ID NO: 833 - DNA, 3878 bp, Homo sapiens
cggcacgagcgcgcgtccaccggctccccggctcgcgccgctccatgtagccccggctccccgggcggccgcggaggagggggcgaccacaagatggcggacctctcgctgcttcaggaggacctgcaggaggacgcagacggatccctggactttgtctcacaagatgaaatgttgacgcccctggggagattggacaagtatgctgcaagtgagaacatatttaacagacaaatggtggcccggagtttgctcgataccttgagggaagtctgcgatgatgaaagagattgtattgctgttttggaaagaattagcagattggccgatgattcagaaccaactgtgagagcggagctgatggaacaggtgcctcacatcgcactgttttgtcaagaaaaccggccttcaataccatatgctttttcaaaattcttactacctattgtggttagataccttgcagatcagaataatcaggtgaggaaaacaagtcaggcagctttgctggctctgttggagcaggagctcattgaacgatttgatgtggagaccaaagtgtgccctgtcctcatagagctgacagccccagatagcaatgatgatgtgaaaacagaagctgtggctataatgtgcaaaatggctcccatggttgggaaggatattacagagcgtcttatcctccctaggttttgtgagatgtgctgcgattgcagaatgtttcacgttcgaaaggtctgtgctgccaattttggagatatttgcagtgtagttggccagcaagctactgaagaaatgttgctgcccagatttttccagctttgttctgataatgtatggggagtccgaaaggcttgtgctgaatgcttcatggcggtttcatgtgcaacatgtcaagaaatccgacggaccaaattatcagcactttttattaatttgatcagtgatccttcacgttgggttcgccaagcagcttttcagtctctgggacctttcatatctacttttgctaatccatctagctcaggccagtattttaaagaagaaagcaaaagttcagaagagatgtcagtagaaaacaaaaataggaccagagatcaagaagccccagaggatgtacaagtcaggccagaggatactccttcagatctcagtgttagtaattccagtgtcatactggaaaacacgatggaagaccatgctgctgaggcatccgggaagcctctaggtgaaattagtgttccactggacagctctttactttgtactttgtcctcagaatctcaccaggaagcagctagtaatgagaatgataaaaaacctggtaactacaaatctatgttacgaccagaggttggcaccacttcacaagattcagctctcttagatcaggaattgtataactccttccatttctggaggactcctcttcctgaaatagatctagacatagagcttgaacagaactctgggggaaaacccagcccagagggaccagaggaagaatctgagggccctgtgcccagttctccaaacatcaccatggccaccagaaaggaactggaagaaatgatagaaaatctagagccccacattgatgatccagatgttaaagcacaagtggaagtgctgtccgctgcactacgtgcttccagcctggatgcacatgaagagaccatcagtatagaaaagagaagtgatttgcaagatgaactggatataaatgagctaccaaattgtaaaataaatcaagaagattctgtgcctttaatcagcgatgctgttgagaatatggactccactcttcactatattcacagcgattcagacttgagcaacaatagcagttttagccctgatgaggaaaggagaactaaagtacaagatgttgtacctcaggcgttgttagatcagtatttatctatgactgacccttctcgtgcacagacggttgacactgaaattgctaagcactgtgcatatagcctccctggtgtggccttgacactcggaagacagaattggcactgcctgagagagacgtatgagactctggcctcagacatgcagtggaaagttcgacgaactctagcattctccatccacgagcttgcagttattcttggagatcaattgacagctgcagatctggttccaatttttaatggatttttaaaagacctcgatgaagtcaggataggtgttcttaaacacttgcatgattttctgaagcttcttcatattgacaaaagaagagaatatctttatcaacttcaggagtttttggtgacagataatagtagaaattggcggtttcgagctgaactggctgaacagctgattttacttctagagttatatagtcccagagatgtttatgactatttacgtcccattgctctgaatctgtgtgcagacaaagtttcttctgttcgttggatttcctacaagttggtcagcgagatggtgaagaagctgcacgcggcaacaccaccaacgttcggagtggacctcatcaatgagcttgtggagaactttggcagatgtcccaagtggtctggtcggcaagcctttgtctttgtctgccagactgtcattgaggatgactgccttcccatggaccagtttgctgtgcatctcatgccgcatctgctaaccttagcaaatgacagggttcctaacgtgcgagtgctgcttgcaaagacattaagacaaactctactagaaaaagactatttcttggcctctgccagctgccaccaggaggctgtggagcagaccatcatggctcttcagatggaccgtgacagcgatgtcaagtattttgcaagcatccaccctgccagtaccaaaatctccgaagatgccatgagcacagcgtcctcaacctactagaaggcttgaatctcggtgtctttcctgcttccatgagagccgaggttcagtgggcattcgccacgcatgtgacctgggatagctttcgggggaggagagaccttcctctcctgcggacttcattgcaggtgcaagttgcctacacccaataccagggatttcaagagtcaagagaaagtacagtaaacactattatcttatcttgactttaaggggaaataatttctcagaggattataattgtcaccgaagccttaaatccttctgtcttcctgactgaatgaaacttgaattggcagagcattttccttatggaagggatgagattcccagagacctgcattgctttctcctggttttatttaacaatcgacaaatgaaattcttacagcctgaaggcagacgtgtgcccagatgtgaaagagaccttcagtatcagccctaactcttctctcccaggaaggacttgctgggctctgtggccagctgtccagcccagccctgtgtgtgaatcgtttgtgacgtgtgcaaatgggaaaggaggggtttttacatctcctaaaggacctgatgccaacacaagtaggattgacttaaactcttaagcgcagcatattgctgtacacatttacagaatggttgctgagtgtctgtgtctgattttttcatgctggtcatgacctgaaggaaatttattagacgtataatgtatgtctggtgtttttaacttgatcatgatcagctctgaggtgcaacttcttcacatactgtacatacctgtgaccactcttgggagtgctgcagtctttaatcatgctgtttaaactgttgtggcacaagttctcttgtccaaataaaatttattaataagatctatagagagagatatatacacttttgattgttttctagatgtctaccaataaatgcaatttgtgacctgtaaaaaaaaaaaaaaagaaaactcgaggagggcccgggcc

SEQ ID NO: 834 - protein, 933 aa, Homo sapiens
MADLSLLQEDLQEDADGSLDFVSQDEMLTPLGRLDKYAASENIFNRQMVARSLLDTLREVCDDERDCIAVLERISRLADDSEPTVRAELMEQVPHIALFCQENRPSIPYAFSKFLLPIVVRYLADQNNQVRKTSQAALLALLEQELIERFDVETKVCPVLIELTAPDSNDDVKTEAVAIMCKMAPMVGKDITERLILPRFCEMCCDCRMFHVRKVCAANFGDICSVVGQQATEEMLLPRFFQLCSDNVWGVRKACAECFMAVSCATCQEIRRTKLSALFINLISDPSRWVRQAAFQSLGPFISTFANPSSSGQYFKEESKSSEEMSVENKNRTRDQEAPEDVQVRPEDTPSDLSVSNSSVILENTMEDHAAEASGKPLGEISVPLDSSLLCTLSSESHQEAASNENDKKPGNYKSMLRPEVGTTSQDSALLDQELYNSFHFWRTPLPEIDLDIELEQNSGGKPSPEGPEEESEGPVPSSPNITMATRKELEEMIENLEPHIDDPDVKAQVEVLSAALRASSLDAHEETISIEKRSDLQDELDINELPNCKINQEDSVPLISDAVENMDSTLHYIHSDSDLSNNSSFSPDEERRTKVQDVVPQALLDQYLSMTDPSRAQTVDTEIAKHCAYSLPGVALTLGRQNWHCLRETYETLASDMQWKVRRTLAFSIHELAVILGDQLTAADLVPIFNGFLKDLDEVRIGVLKHLHDFLKLLHIDKRREYLYQLQEFLVTDNSRNWRFRAELAEQLILLLELYSPRDVYDYLRPIALNLCADKVSSVRWISYKLVSEMVKKLHAATPPTFGVDLINELVENFGRCPKWSGRQAFVFVCQTVIEDDCLPMDQFAVHLMPHLLTLANDRVPNVRVLLAKTLRQTLLEKDYFLASASCHQEAVEQTIMALQMDRDSDVKYFASIHPASTKISEDAMSTASSTY

SEQ ID NO: 835 - DNA, 1314 bp, Homo sapiens
atggcatccgttgcagttgatccacaaccgagtgtggtgactcgggtggtcaacctgcccttggtgagctccacgtatgacctcatgtcctcagcctatctcagtacaaaggaccagtatccctacctgaagtctgtgtgtgagatggcagagaacggtgtgaagaccatcacctccgtggccatgaccagtgctctgcccatcatccagaagctagagccgcaaattgcagttgccaatacctatgcctgtaaggggctagacaggattgaggagagactgcctattctgaatcagccatcaactcagattgttgccaatgccaaaggcgctgtgactggggcaaaagatgctgtgacgactactgtgactggggccaaggattctgtggccagcacgatcacaggggtgatggacaagaccaaaggggcagtgactggcagtgtggagaagaccaagtctgtggtcagtggcagcattaacacagtcttggggagtcggatgatgcagctcgtgagcagtggcgtagaaaatgcactcaccaaatcagagctgttggtagaacagtacctccctctcactgaggaagaactagaaaaagaagcaaaaaaagttgaaggatttgatctggttcagaagccaagttattatgttagactgggatccctgtctaccaagcttcactcccgtgcctaccagcaggctctcagcagggttaaagaagctaagcaaaaaagccaacagaccatttctcagctccattctactgttcacctgattgaatttgccaggaagaatgtgtatagtgccaatcagaaaattcaggatgctcaggataagctctacctctcatgggtagagtggaaaaggagcattggatatgatgatactgatgagtcccactgtgctgagcaatttgagtcacgtactcttgcaattgcccgcaacctgactcagcagctccagaccacgtgccacaccctcctgtccaacatccaaggtgtaccacagaacatccaagatcaagccaagcacatgggggtgatggcaggcgacatctactcagtgttccgcaatgctgcctcctttaaagaagtgtctgacagcctcctcacttctagcaaggggcagctgcagaaaatgaaggaatctttagatgacgtgatggattatcttgttaacaacacgcccctcaactggctggtaggtcccttttatcctcagctgactgagtctcagaatgctcaggaccaaggtgcagagatggacaagagcagccaggagacccagcgatctgagcataaaactcattaa

SEQ ID NO: 836 - protein, 437 aa, Homo sapiens
MASVAVDPQPSVVTRVVNLPLVSSTYDLMSSAYLSTKDQYPYLKSVCEMAENGVKTITSVAMTSALPIIQKLEPQIAVANTYACKGLDRIEERLPILNQPSTQIVANAKGAVTGAKDAVTTTVTGAKDSVASTITGVMDKTKGAVTGSVEKTKSVVSGSINTVLGSRMMQLVSSGVENALTKSELLVEQYLPLTEEELEKEAKKVEGFDLVQKPSYYVRLGSLSTKLHSRAYQQALSRVKEAKQKSQQTISQLHSTVHLIEFARKNVYSANQKIQDAQDKLYLSWVEWKRSIGYDDTDESHCAEQFESRTLAIARNLTQQLQTTCHTLLSNIQGVPQNIQDQAKHMGVMAGDIYSVFRNAASFKEVSDSLLTSSKGQLQKMKESLDDVMDYLVNNTPLNWLVGPFYPQLTESQNAQDQGAEMDKSSQETQRSEHKTH

SEQ ID NO: 837 - DNA, 3592 bp, Homo sapiens
ggcgcgggcggaggctaaaacacgggggtcctgagactgaggaaaacgcgccaagttcccctcggtggcggagtgctaaagaccctagcggttcaggcgttcggcgagcggggccgctgcttgttgcgctcctggctctcccggggcgggcgcagatgggcgccgctcccgggatgtagttggtgttggtgcaaggcgggagcgagcggcggtcggggttcccgctcttgggagcggatggtcactcccccgcggggagggcgagccgaccagattttcctggggccggggacccggcgggctcggggcagggactcacctgtcgcacccacactcattcgggttggacttgccggcgtcaccgccgcggacttcgctttgggccatgaccagatataattggtgattacaactttcctctataaattaactcttgacactccttgggatttgaagaaaaaaatgcctggtgtcatacctagtgaaagtaatggactttcaagaggtagcccttcaaagaaaaacagactttccttaaagttttttcagaaaaaggaaactaagagagctttggatttcacagattctcaagaaaatgaagaaaaagcttctgaatatagagcatctgaaattgatcaagttgttcctgcagcacagtcttcacctataaactgtgagaagagagaaaacttgttaccatttgtgggactgaataatctcggcaatacttgctatcttaatagtatacttcaggtattatatttttgtcccggttttaaatctggagtaaagcacttatttaatattatttcaaggaagaaagaagctctaaaggatgaagccaatcaaaaagacaagggaaattgcaaagaagattctttggcaagttatgaattgatatgcagtttacagtccttaatcatttcggttgaacagctccaggctagttttctcttaaatccagagaaatatactgatgaacttgccactcagccaaggcgactgcttaacacactgagggaactcaaccctatgtatgaaggatatctacagcatgatgcacaggaagtattacaatgtattttgggaaacattcaagaaacatgccaactcctaaaaaaagaagaagtaaaaaatgtggcagaattacctactaaggtagaagaaatacctcatccgaaagaggaaatgaatggtattaacagcatagagatggacagtatgaggcattctgaagactttaaagagaaactcccaaaaggaaatgggaaaagaaaaagtgacactgaatttggtaacatgaagaaaaaagttaaattatccaaggaacaccagtcattggaagagaaccagagacaaactagatcaaaaagaaaagctacaagtgatacattagagagtcctcctaaaataattcccaagtatatttctgaaaatgagagtccaagaccctcacaaaagaaatcaagagttaaaataaattggttaaagtctgcaactaagcaacccagcattctttctaaattttgtagtctgggaaaaataacaacaaaccaaggagtcaaaggacaatctaaagaaaatgaatgtgatcctgaagaggacttggggaagtgtgaaagtgataacacaactaatggttgtggacttgaatctccaggaaatactgttacacctgtaaatgttaatgaagttaaacccataaacaaaggtgaagaacaaattggttttgagctagtggagaaattatttcaaggtcagctggtattaaggacgcgttgcttggaatgtgaaagtttaacagaaagaagagaagattttcaagacatcagtgtgccagtacaagaagatgagctttccaaagtagaggagagttctgaaatttctccagagccaaaaacagaaatgaagaccctgagatgggcaatttcacaatttgcttcagtagaaaggattgtaggagaagataaatatttctgtgaaaactgccatcattatactgaagctgaacgaagtcttttgtttgacaaaatgcctgaagttataactattcatttgaagtgctttgctgctagtggtttggagtttgattgttatggtggtggactttccaagatcaacactcctttattgacacctcttaaattgtcactagaagaatggagcacaaagccaactaacgacagctatggattatttgcggttgtgatgcatagtggcattacaattagtagtgggcattacactgcttctgttaaagtcactgaccttaacagtttagaactagataaaggaaattttgtggttgaccaaatgtgtgaaataggtaagccagaaccattgaatgaggaggaagcaaggggtgtggttgagaattataatgatgaagaagtgtcaattagagttggtggaaatacacagccaagtaaagttttgaacaaaaaaaatgtagaagctattggacttcttggaggacaaaagagcaaagcagattatgagctatacaacaaagcctctaatcctgataaggttgctagtacagcgtttgctgaaaatagaaattctgagactagtgatactactgggacccatgaatctgatagaaacaaggaatccagtgaccaaacaggcattaatattagtggatttgagaacaaaatttcatacgtagtgcaaagcttaaaggagtatgaggggaagtggttgctttttgatgattctgaagtcaaagttactgaagagaaggactttctgaattctctttccccttctacatctcctacttctactccttacttgctattttataagaaattatagagtgagtgtattttccttgtgtatatattaaacacacccatacaaacattggtaaagttgattacatcaaagaatctttagcttatcttttgaagctactggatattattggtctctctaggtttttatataaatagtgaaatctgaattactgaaaaccatgttaatttttagaactcattttcctcagtagagactagtgatgcattagcttctgggaacaaacttgtatcggttcttaattaaattatccaaaacggaggcatttaaacacttggatttacaccagtcttttgtgtttgctttttaaaataaagtgctcgtatttgtattctccatattttggagtaattatctacatgatgtttatagttcctgtggtttttcacccaagaagcagaatctcattcagtacatttagttttataagagtcatgaagctaaatccttgggctatgtcagaggcacaaagtctagaatgtgtgtattcacaatggtgtatgtacattttgtgccttgattcacttagaagtgtctcagaaaacctggacagttcgcttctacacaagaattttatatgtatttatgaagatgattctgtaccctagtatatctttttgggcatggactaatttgtatctgtttaactcatattctgcacgatctgtatatagtacatcaaacttagaggtgtgaccttaaatttaactttttttaaaaactgggaggtcaataaaatttaaactgcttaactatgaaaaaaaaaaaaaaa

SEQ ID NO: 838 - protein, 785 aa, Homo sapiens
MPGVIPSESNGLSRGSPSKKNRLSLKFFQKKETKRALDFTDSQENEEKASEYRASEIDQVVPAAQSSPINCEKRENLLPFVGLNNLGNTCYLNSILQVLYFCPGFKSGVKHLFNIISRKKEALKDEANQKDKGNCKEDSLASYELICSLQSLIISVEQLQASFLLNPEKYTDELATQPRRLLNTLRELNPMYEGYLQHDAQEVLQCILGNIQETCQLLKKEEVKNVAELPTKVEEIPHPKEEMNGINSIEMDSMRHSEDFKEKLPKGNGKRKSDTEFGNMKKKVKLSKEHQSLEENQRQTRSKRKATSDTLESPPKIIPKYISENESPRPSQKKSRVKINWLKSATKQPSILSKFCSLGKITTNQGVKGQSKENECDPEEDLGKCESDNTTNGCGLESPGNTVTPVNVNEVKPINKGEEQIGFELVEKLFQGQLVLRTRCLECESLTERREDFQDISVPVQEDELSKVEESSEISPEPKTEMKTLRWAISQFASVERIVGEDKYFCENCHHYTEAERSLLFDKMPEVITIHLKCFAASGLEFDCYGGGLSKINTPLLTPLKLSLEEWSTKPTNDSYGLFAVVMHSGITISSGHYTASVKVTDLNSLELDKGNFVVDQMCEIGKPEPLNEEEARGVVENYNDEEVSIRVGGNTQPSKVLNKKNVEAIGLLGGQKSKADYELYNKASNPDKVASTAFAENRNSETSDTTGTHESDRNKESSDQTGINISGFENKISYVVQSLKEYEGKWLLFDDSEVKVTEEKDFLNSLSPSTSPTSTPYLLFYKKL

SEQ ID NO: 839 - DNA, 2470 bp, Homo sapiens
ggcggctgtagccgagggggcggccggaaagcagcggcggcgtctggggcgctttcgcaacattcagacctcggttgcagcccggtgccgtgagctgaagaggtttcacatcttactccgccccacaccctgggcgttgcggcgctgggctcgttgctgcagccggaccctgctcgatgggcacgactgggctggagagtctgagtctgggggaccgcggagctgcccccaccgtcacctctagtgagcgcctagtcccagacccgccgaatgacctccgcaaagaagatgttgctatggaattggaaagagtgggagaagatgaggaacaaatgatgataaaaagaagcagtgaatgtaatcccttgctacaagaacccatcgcttctgctcagtttggtgctactgcaggaacagaatgccgtaagtctgtcccatgtggatgggaaagagttgtgaagcaaaggttatttgggaagacagcaggaagatttgatgtgtactttatcagcccacaaggactgaagttcagatccaaaagttcacttgctaattatcttcacaaaaatggagagacttctcttaagccagaagattttgattttactgtactttctaaaaggggtatcaagtcaagatataaagactgcagcatggcagccctgacatcccatctacaaaaccaaagtaacaattcaaactggaacctcaggacccgaagcaagtgcaaaaaggatgtgtttatgccgccaagtagtagttcagagttgcaggagagcagaggactctctaactttacttccactcatttgcttttgaaagaagatgagggtgttgatgatgttaacttcagaaaggttagaaagcccaaaggaaaggtgactattttgaaaggaatcccaattaagaaaactaaaaaaggatgtaggaagagctgttcaggttttgttcaaagtgatagcaaaagagaatctgtgtgtaataaagcagatgctgaaagtgaacctgttgcacaaaaaagtcagcttgatagaactgtctgcatttctgatgctggagcatgtggtgagaccctcagtgtgaccagtgaagaaaacagccttgtaaaaaaaaaagaaagatcattgagttcaggatcaaatttttgttctgaacaaaaaacttctggcatcataaacaaattttgttcagccaaagactcagaacacaacgagaagtatgaggatacctttttagaatctgaagaaatcggaacaaaagtagaagttgtggaaaggaaagaacatttgcatactgacattttaaaacgtggctctgaaatggacaacaactgctcaccaaccaggaaagacttcactggtgagaaaatatttcaagaagataccatcccacgaacacagatagaaagaaggaaaacaagcctgtatttttccagcaaatataacaaagaagctcttagccccccacgacgtaaagcctttaagaaatggacacctcctcggtcaccttttaatctcgttcaagaaacactttttcatgatccatggaagcttctcatcgctactatatttctcaatcggacctcaggcaaaatggcaatacctgtgctttggaagtttctggagaagtatccttcagctgaggtagcaagaaccgcagactggagagatgtgtcagaacttcttaaacctcttggtctctacgatcttcgggcaaaaaccattgtcaagttctcagatgaatacctgacaaagcagtggaagtatccaattgagcttcatgggattggtaaatatggcaacgactcttaccgaattttttgtgtcaatgagtggaagcaggtgcaccctgaagaccacaaattaaataaatatcatgactggctttgggaaaatcatgaaaaattaagtctatcttaaactctgcagctttcaagctcatctgttatgcatagctttgcacttcaaaaaagcttaattaagtacaaccaaccacctttccagccatagagattttaattagcccaactagaagcctagtgtgtgtgctttcttaatgtgtgtgccaatggtggatctttgctactgaatgtgtttgaacatgttttgagatttttttaaaataaattattatttgacaacaatccaaaaaaaatacggcttttccaatgatgaaatataatcagaagatgaaaaatagttttaaactatcaataatacaaagcaaatttctatcagccttgctaaagctaggggcccactaaatatttttatcggctaggcgtggtggtgcatgcctgtaatctcggaaggctgaggcaggaggatcatttgagctcatgagggcccaggaggtcaaggcttcagtgagccatgatcatgccactgcactccagtctggatgacagagagagaccctgtctcaaaaaatatatatttaaaaaataaaaataaaagctgaccccaaagac

SEQ ID NO: 840 - protein, 580 aa, Homo sapiens
MGTTGLESLSLGDRGAAPTVTSSERLVPDPPNDLRKEDVAMELERVGEDEEQMMIKRSSECNPLLQEPIASAQFGATAGTECRKSVPCGWERVVKQRLFGKTAGRFDVYFISPQGLKFRSKSSLANYLHKNGETSLKPEDFDFTVLSKRGIKSRYKDCSMAALTSHLQNQSNNSNWNLRTRSKCKKDVFMPPSSSSELQESRGLSNFTSTHLLLKEDEGVDDVNFRKVRKPKGKVTILKGIPIKKTKKGCRKSCSGFVQSDSKRESVCNKADAESEPVAQKSQLDRTVCISDAGACGETLSVTSEENSLVKKKERSLSSGSNFCSEQKTSGIINKFCSAKDSEHNEKYEDTFLESEEIGTKVEVVERKEHLHTDILKRGSEMDNNCSPTRKDFTGEKIFQEDTIPRTQIERRKTSLYFSSKYNKEALSPPRRKAFKKWTPPRSPFNLVQETLFHDPWKLLIATIFLNRTSGKMAIPVLWKFLEKYPSAEVARTADWRDVSELLKPLGLYDLRAKTIVKFSDEYLTKQWKYPIELHGIGKYGNDSYRIFCVNEWKQVHPEDHKLNKYHDWLWENHEKLSLS

SEQ ID NO: 841 - DNA, 4713 bp, Homo sapiens
cggccgcggcgcgagccggagtccgccgagccggagcgcgacgaggccccgggcgcgccctccccgctgccgccaccgccgtgccgccgccatccgcccgccgccgccgccgctgtccggcccccgagcacgccggccccgcgcgcgcctcgaggccgagtcaaggtgtgagatgcacaatgcgaaacctaggccccagcttttacaccatgatgcgcagggttgtactttttgtactgaactgataggtggcctagtggttatgccctgtactaccattttgaggatctggactccgtttcctgccttgctctttggaccacattgtcaattcacaccgaaactatgttccaacttcctgtcaacaatcttggcagtttaagaaaagcccggaaaactgtgaaaaaaatacttagtgacattgggttggaatactgtaaagaacatatagaagattttaaacaatttgaacctaatgacttttatttgaaaaacactacatgggaggatgtaggactgtgggacccatcacttacgaaaaaccaggactatcggacaaaacctttctgctgcagcgcttgtccattttcctcaaaattcttctctgcctacaaaagtcatttccgcaatgtccatagtgaagactttgaaaataggattctccttaattgcccctactgtaccttcaatgcagacaaaaagactttggaaacacacattaaaatatttcatgctccgaacgccagcgcaccaagtagcagcctcagcactttcaaagataaaaacaaaaatgatggccttaaacctaagcaggctgacagtgtagagcaagctgtttattactgtaagaagtgcacttaccgagatcctctttatgaaatagttaggaagcacatttacagggaacattttcagcatgtggcagcaccttacatagcaaaggcaggagaaaaatcactcaatggggcagtccccttaggctcgaatgcccgagaagagagtagtattcactgcaagcgatgccttttcatgccaaagtcctatgaagctttggtacagcatgtcatcgaagaccatgaacgtataggctatcaggtcactgccatgattgggcacacaaatgtagtggttccccgatccaaacccttgatgctaattgctcccaaacctcaagacaagaagagcatgggactcccaccaaggatcggttcccttgcttctggaaatgtccggtctttaccatcacagcagatggtgaatcgactctcaataccaaagcctaacttaaattctacaggagtcaacatgatgtccagtgttcatctgcagcagaacaactatggagtcaaatctgtaggccagggttacagtgttggtcagtcaatgagactgggtctaggtggcaacgcaccagtttccattcctcaacaatctcagtctgtaaagcagttacttccaagtggaaacggaaggtcttatgggcttgggtcagagcagaggtcccaggcaccagcaagatactccctgcagtctgctaatgcctcttctctctcatcgggccagttaaagtctccttccctctctcagtcacaggcatccagagtgttaggtcagtccagttccaaacctgctgcagctgccacaggccctcccccaggtaacacttcctcaactcaaaagtggaaaatatgtacaatctgtaatgagctttttcctgaaaatgtctatagtgtgcacttcgaaaaagaacataaagctgagaaagtcccagcagtagccaactacattatgaaaatacacaattttactagcaaatgcctctactgtaatcgctatttacccacagatactctgctcaaccatatgttaattcatggtctgtcttgtccatattgccgttcaactttcaatgatgtggaaaagatggccgcacacatgcggatggttcacattgatgaagagatgggacctaaaacagattctactttgagttttgatttgacattgcagcagggtagtcacactaacatccatctcctggtaactacatacaatctgagggatgccccagctgaatctgttgcttaccatgcccaaaataatcctccagttcctccaaagccacagccaaaggttcaggaaaaggcagatatccctgtaaaaagttcacctcaagctgcagtgccctataaaaaagatgttgggaaaaccctttgtcctctttgcttttcaatcctaaaaggacccatatctgatgcacttgcacatcacttacgagagaggcaccaagttattcagacggttcatccagttgagaaaaagctcacctacaaatgtatccattgccttggtgtgtataccagcaacatgaccgcctcaactatcactctgcatctagttcactgcaggggcgttggaaagacccaaaatggccaggataagacaaatgcaccctctcggcttaatcagtctccaagtctggcacctgtgaagcgcacttacgagcaaatggaatttcccttactgaaaaaacgaaagttagatgatgatagtgattcacccagcttctttgaagagaagcctgaagagcctgttgttttagctttagaccccaagggtcatgaagatgattcctatgaagccaggaaaagctttctaacaaagtatttcaacaaacagccctatcccaccaggagagaaattgagaagctagcagccagtttatggttatggaagagtgacatcgcttcccattttagtaacaaaaggaagaagtgtgtccgtgattgtgaaaagtacaagcctggcgtgttgctggggtttaacatgaaagaattaaataaagtcaagcatgagatggattttgatgctgagtggctatttgaaaatcatgatgagaaggattccagagtcaatgctagtaagactgctgacaaaaagctcaaccttgggaaggaagatgacagttcctcagacagttttgaaaatttggaagaagaatccaatgaaagtggtagcccttttgaccctgtttttgaagttgaacctaaaatctctaacgataacccagaggaacatgtactgaaggtaattcctgaggatgcttcagaatctgaggagaagctagaccaaaaagaggatggttcaaaatacgaaactattcatttgactgaggaaccaaccaaactaatgcacaatgcatctgatagtgaggttgaccaagacgatgttgttgagtggaaagacggtgcttctccatctgagagtgggcctggatcccaacaagtgtcagactttgaggacaatacctgcgaaatgaaaccaggaacctggtctgacgagtcttcccaaagcgaagatgcaaggagcagtaagccagctgccaaaaaaaaggctaccatgcaaggtgacagagagcagttgaaatggaagaatagttcctatggaaaagttgaagggttttggtctaaggaccagtcacagtggaagaatgcatctgagaatgatgagcgcttatctaacccccagattgagtggcagaatagcacaattgacagtgaggatggggaacagtttgacaacatgactgatggagtagctgagcccatgcatggcagcttagccggagttaaactgagcagccaacaggcctaagtgccaggttccctggcgttggtgacatgctgcagcctggaactctgatctccagtgtgactgcaaagctgtcttctcactggtactgccttgtgagtactggttggactgtggggcatgtggccgctgcagttccagtggttatttctaagtctatgacaggacaggctgttcttgcttcagaaccttctctgacagacacggtaactaaatgtgaaaaaccaataagctggtgactcatgaatacacacgaggaaaagcagaggtttattttatctgccttttcaacatttctttccctctgtgaaatgattggtcagatgtctttgagaagtgttaaactaattcacatggtagtgtagggccaacatacaagctaccagtctaatgtgtatagtagactttgggaaaagcgattttttttcatgtattcattctgaatagttgaaatgtatatttgtacagtcttttagacctattcaagtgatgctcatgatcctgttactgtgtgcccatcatagatttctttttttagtgttgcccttgctgtgtaataaacgctctatctagtttacctagcaaaagctcaaaactgcgctagtatggactttttggacagacttagtttttgcacataaccttgtacaatcttgcaacagaggccagccacgtaagatatatatctggactctcttgtattataggatttttcttgttctgaatatccttgacattacagctgtcaaaaacaaaaactggtatttcagatctgttttctgaaatcttttaagctaaaatcacatgcaagaattgactttgcagctactaattttgacaccttttagatctgtataaaagtgtgttgtgttgaagcagcaaaccaatgagtgctgcattttggatatttagttttatctttagttcaacaccatcatggtggattcatttataccatctaatatatgacacactgttgtagtatgtataattttgtgatctttattttccctttgtattcattttaagcatctaaataaattgctgtattgtgcttaatgt

SEQ ID NO: 842 - protein, 1102 aa, Homo sapiens
MFQLPVNNLGSLRKARKTVKKILSDIGLEYCKEHIEDFKQFEPNDFYLKNTTWEDVGLWDPSLTKNQDYRTKPFCCSACPFSSKFFSAYKSHFRNVHSEDFENRILLNCPYCTFNADKKTLETHIKIFHAPNASAPSSSLSTFKDKNKNDGLKPKQADSVEQAVYYCKKCTYRDPLYEIVRKHIYREHFQHVAAPYIAKAGEKSLNGAVPLGSNAREESSIHCKRCLFMPKSYEALVQHVIEDHERIGYQVTAMIGHTNVVVPRSKPLMLIAPKPQDKKSMGLPPRIGSLASGNVRSLPSQQMVNRLSIPKPNLNSTGVNMMSSVHLQQNNYGVKSVGQGYSVGQSMRLGLGGNAPVSIPQQSQSVKQLLPSGNGRSYGLGSEQRSQAPARYSLQSANASSLSSGQLKSPSLSQSQASRVLGQSSSKPAAAATGPPPGNTSSTQKWKICTICNELFPENVYSVHFEKEHKAEKVPAVANYIMKIHNFTSKCLYCNRYLPTDTLLNHMLIHGLSCPYCRSTFNDVEKMAAHMRMVHIDEEMGPKTDSTLSFDLTLQQGSHTNIHLLVTTYNLRDAPAESVAYHAQNNPPVPPKPQPKVQEKADIPVKSSPQAAVPYKKDVGKTLCPLCFSILKGPISDALAHHLRERHQVIQTVHPVEKKLTYKCIHCLGVYTSNMTASTITLHLVHCRGVGKTQNGQDKTNAPSRLNQSPSLAPVKRTYEQMEFPLLKKRKLDDDSDSPSFFEEKPEEPVVLALDPKGHEDDSYEARKSFLTKYFNKQPYPTRREIEKLAASLWLWKSDIASHFSNKRKKCVRDCEKYKPGVLLGFNMKELNKVKHEMDFDAEWLFENHDEKDSRVNASKTADKKLNLGKEDDSSSDSFENLEEESNESGSPFDPVFEVEPKISNDNPEEHVLKVIPEDASESEEKLDQKEDGSKYETIHLTEEPTKLMHNASDSEVDQDDVVEWKDGASPSESGPGSQQVSDFEDNTCEMKPGTWSDESSQSEDARSSKPAAKKKATMQGDREQLKWKNSSYGKVEGFWSKDQSQWKNASENDERLSNPQIEWQNSTIDSEDGEQFDNMTDGVAEPMHGSLAGVKLSSQQA

SEQ ID NO: 843 - DNA, 7026 bp, Homo sapiens
gacacgcacgcacccgggcgccgaagggaaagccgcgtctcgccctcccgccccgccgtcggtcctgtctcagtccctcagcagagcgggaaagcggaggccggagccgtgacctctgaccccgtggttatgcggagccgccgcattccttagcgatcgcggggcagccgccgctgccgccgtgggcgactgacgcagcgcgggcgcgtggagccgccgccgcccctcccccaccgccgctctcgcgccagccggtccccgcgtgcccgccccttctccccggccgcacccgagacctcgcgcgccgccgctgccacgcgccccccccaccgccgccgccgccccagccccgcgccaccgccccagcccgcccagcccggaggtcccgcgtggagctgccgccgccgccggggagaaggatgaaggacaaacagaagaagaagaaggagcgcacgtgggccgaggccgcgcgcctggtattagaaaactactcggatgctccaatgacaccaaaacagattctgcaggtcatagaggcagaaggactaaaggaaatgagaagtgggacttcccctctcgcatgcctcaatgctatgctacattccaattcaagaggaggagaggggttgttttataaactgcctggccgaatcagccttttcacgctcaagaaggatgccctgcagtggtctcgccatccagctacagtggagggagaggagccagaggacacggctgatgtggagagctgtgggtctaatgaagccagcactgtgagtggtgaaaacgatgtatctcttgatgaaacatcttcgaacgcatcctgttctacagaatctcagagtcgacctctttccaatcccagggacagctacagagcttcctcacaggcgaacaaacaaaagaaaaagactggggtgatgctgcctcgagttgtcctgactcctctgaaggtaaacggggcccacgtggaatctgcatcagggttctcgggctgccacgccgatggcgagagcggcagcccgtccagcagcagcagcggctctctggccctgggcagcgctgctattcgtggccaggccgaggtcacccaggaccctgccccgctcctgagaggcttccggaagccagccacaggtcaaatgaagcgcaacagaggggaagaaatagattttgagacacctgggtccattcttgtcaacaccaacctccgtgccctgatcaactctcggaccttccatgccttaccatcacacttccagcagcagctcctcttcctcctgcctgaagtagacagacaggtggggacggatggcctgttgcgtctcagcagcagtgcactaaataacgagttttttacccatgcggctcagagctggcgggagcgcctggctgatggtgaatttactcatgagatgcaagtcaggatacgacaggaaatggagaaggaaaagaaggtggaacaatggaaagaaaagttctttgaagactactatggacagaagctgggtttgaccaaagaagagtcattgcagcagaacgtgggccaggaggaggctgaaatcaaaagtggcttgtgtgtcccaggagaatcagtgcgtatacagcgtggtccagccacccgacagcgagatgggcattttaagaaacgctctcggccagatctccgaaccagagccagaaggaatctgtacaaaaaacaggagtcagaacaagcaggggttgctaaggatgcaaaatctgtggcctcagatgttcccctctacaaggatggggaggctaagactgacccagcagggctgagcagtccccatctgccaggcacatcctctgcagcacccgacctggagggtcccgaattcccagttgagtctgtggcttctcggatccaggctgagccagacaacttggcacgtgcctctgcatctccagacagaattcctagcctgcctcaggaaactgtggatcaggaacccaaggatcagaagaggaaatcctttgagcaggcggcctctgcatcctttcccgaaaagaagccccggcttgaagatcgtcagtcctttcgtaacacaattgaaagtgttcacaccgaaaagccacagcccactaaagaggagcccaaagtcccgcccatccggattcaactttcacgtatcaaaccaccctgggtggttaaaggtcagcccacttaccagatatgcccccggatcatccccaccacggagtcctcctgccggggttggactggcgccaggaccctcgcagacattaaagcccgtgctctgcaggtccgaggggcgagaggtcaccactgccatagagaggcggccaccactgccatcggaggggggggtggcccgggtggaggtggcggcggggccaccgatgagggaggtggcagaggcagcagcagtggtgatggtggtgaggcctgtggccaccctgagcccaggggaggcccgagcacccctggaaagtgtacgtcagatctacagcgaacacaactactgccgccttatcctctaaatggggagcatacccaggccggaactgccatgtccagagctaggagagaggacctgccttctctgagaaaggaggaaagctgcctactacagagggctacagttggactcacagatgggctaggagatgcctcccaactccccgttgctcccactggggaccagccatgccaggccttgcccctactgtcctcccaaacctcagtagctgagagattagtggagcagcctcagttgcatccggatgttagaactgaatgtgagtctggcaccacttcctgggaaagtgatgatgaggagcaaggacccaccgttcctgcagacaatggtcccattccgtctctagtgggagatgatacattagagaaaggaactggccaagctcttgacagtcatcccactatgaaggatcctgtaaatgtgacccccagttccacacctgaatcctcaccgactgattgcctgcagaacagagcatttgatgacgaattagggcttggtggctcatgccctcctatgagggaaagtgatactagacaagaaaacttgaaaaccaaggctctcgtttctaacagttctttgcattggatacccatcccatcgaatgatgaggtagtgaaacagcccaaaccagaatccagagaacacataccatctgttgagccccaggttggagaggagtgggagaaagctgctcccacccctcctgcattgcctggggatttgacagctgaggagggtctagatcctcttgacagccttacttcactctggactgtgccatctcgaggaggcagtgacagcaatggcagttactgtcaacaggtggacattgaaaagctgaaaatcaacggagactctgaagcactgagtcctcacggtgagtccacggatacagcctctgactttgaaggtcacctcacggaggacagcagtgaggctgacactagagaagctgcagtgacaaagggatcttcggtggacaaggatgagaaacccaattggaaccaatctgccccactgtccaaggtgaatggtgacatgcgtctggttacaaggacagatgggatggttgctcctcagagctgggtgtctcgagtatgtgcggtccgccaaaagatcccagattccctactgctggccagtactgagtaccagccaagagccgtgtgcctgtccatgcctgggtcctcagtggaggccactaacccacttgtgatgcagttgctgcagggtagcttgcccctagagaaggttcttccaccagcccacgatgacagcatgtcagaatccccacaagtaccacttacaaaagaccagagccatggctcgctacgcatgggatctttacatggtcttggaaaaaacagtggcatggttgatggaagcagccccagttctttaagggctttgaaggagcctcttctgccagatagctgtgaaacaggcactggtcttgccaggattgaggccacccaggctcctggagcaccccaaaagaattgcaaggcagtcccaagttttgactccctccatccagtgacaaatcccattacatcctctaggaaactggaagaaatggattccaaagagcagttctcttcctttagttgtgaagatcagaaggaagtccgtgctatgtcacaggacagtaattcaaatgctgctccaggaaagagcccaggagatcttactacctcgagaacacctcgtttctcatctccaaatgtgatctcctttggtccagagcagacaggtcgggccctgggtgatcagagcaatgttacaggccaagggaagaagctttttggctctgggaatgtggctgcaacccttcagcgccccaggcctgcggacccgatgcctcttcctgctgagatccctccagtttttcccagtgggaagttgggaccaagcacaaactccatgtctggtggggtacagactccaagggaagactgggctccaaagccacatgcctttgttggcagcgtcaagaatgagaagacttttgtggggggtcctcttaaggcaaatgccgagaacaggaaagctactgggcatagtcccctggaactggtgggtcacttggaagggatgccctttgtcatggacttgcccttctggaaattaccccgagagccagggaaggggctcagtgagcctctggagccttcttctctcccctcccaactcagcatcaagcaggcattttatgggaagctttctaaactccaactgagttccaccagctttaattattcctctagctctcccacctttcccaaaggccttgctggaagtgtggtgcagctgagccacaaagcaaactttggtgcgagccacagtgcatcactttccttgcaaatgttcactgacagcagcacggtggaaagcatctcgctccagtgtgcgtgcagcctgaaagccatgatcatgtgccaaggctgcggtgcgttctgtcacgatgactgtattggaccctcaaagctctgtgtattgtgccttgtggtgagataataaattatggccatgggaaacattgtatatttagtgtgtgtattttgataatgattgatcttaaatctgtatacagaatatcattgatataatactctttaggcaggagcactcttgccttcccccaaaatttacactgctaaagccctctgtcacttggcgacccttctggtcttgctggaggggtttcctgggtataacccattgggctgcccaaggccagccagcctgagctctcctgcaagacagagcctgatgtggcacggagtggggttgcggggggtggggggactgcctgactcccagagggacttgaaactgaagcaagaaggttgcattctccaccaagggagttaacctacctgaactaagtagaaatgccagtcttccactaccccctccctgccatcttttcttctgctactttggggagttgatggccaggaaagaagccagcacagggttaaagtaactcctggcattgcccaccagggggctggtgcacctgctgacctcagggtcacagttgagtcatttgccagttgacggagcaagtttgaccttggttctgttgctgaagcaaatttggaacttttctgtctcagtgtgatccactaacccacaggatcatttggaaccttgaatagctctgcttggacaatggggttggggaatagggttgtctttcctatgaaaatgccatctgtagaccttgtgagtcagccgtccagatgtttgcaggtgaattcctctgcttgacatcctccctgtcactttggaccctatgggagtgggcatctccacgcacctgtgtatgtgaaagtcattttacatttcaaagcagtgtgtgtttcttatttttatatttttaactctttattcttggatgtataaagtgaactttttggcttctgtaagtatgctctatgcacctctaatgttttatcatgtatttatatgttgtacacagtactggctgattctgtaaatggatgtattgtacagagaacatgaacgtctcttcctaattttacatcttcagcatcattgcattaaagtggtgtaatctccttctctacatctgttgtcagagccactgagtgctgtgctgctcgacgtgagggtgaaatgattgacttgtgacctgccaggttgcccgatgccctgttgggtcaccggctggacctgctgcagcctgcagagccacagtcagcctgcccacatgccaccgagcaaacgcatcttgcttttcacatctctcctcctacagccttaatggctgcttgctgccatatgtgacaaatcaccaccaccagtgttaagtgcttctggattcatgggtgagttccctgggcagcccccaggaaggccttccagatctggctccagggtcaccacctgtcacagcaatacctgggaccatgctctcctgggactgtgaggctccttttgacgtacttttgacatcaggcaggtttgggaagaaacaaagccatgcctgctcctgcctctctcccaacatgtttccagcaagtagatgcccctgtgtgtgttttcccttgccttgtttcctgccttatatcttgtatttcgacttattacagagttgagggttcttgcttaatttagatcaagtataaaatttgtatgacttcaagtctcattttatctgaaaggtttttttctcatttaatctgatgtggcattttcgtcatctgaagcatgagtgacaagttgggaatgatgtggtgatttagaatgcagtattggccaagtccaagttgtcaacttaagcgtctgtttaccaaagaccgggaacaggggcccaaacatgtccagtcctcttcttccctctgctggaacctttggggacactcaagggtacagtttgacactgatctggtccatgaggctgcccagagaaagcactgcttctgtatgtctcttgtggtattggaacaataaacccgtacaacctgca

SEQ ID NO: 844 - protein, 1541 aa, Homo sapiens [sequence omitted]

SEQ ID NO: 845 - DNA, 2169 bp, Homo sapiens
ggcacgaggaaaagaggggatctgatgataaaaaaagtagtgtgaagtccggtagtcgagaaaagcagagtgaagacacaaacactgaatcgaaggaaagtgatactaagaatgaggtcaatgggaccagtgaagacattaaatctgaaggtgacactcagtccaattaaaactgatctgataagacctcagatcagacagaggtaagtgtattgtttctcactttgattagggctttttgttactgtttgacagtgcagcgtaagtatgcacagatgaagatggaactaagccgagttagaaaacatacaaaagcctcttctgaaggaaaagacagtgtagtcctgcaaaacattttgaggtacattgttttgtctcagctattttgtagcagactcgtgcccccattagtgtgcctctttggaaattatcgcccacatttgtaatatagtcgccattgaaaagttaattatcctttttttagggattttgatgtcatttctttttttttttttaataaaaaggttgaactgtttttttttttctttttggtattaagtccatcttgtgttggtacattggcagagacatatgctttaaaaacttaaatatttcggaggcacatgttggactactttgttttaattaaactgctagtatttctttgtcaaggatgtttctagttttttgctttattgccttgcattctaatgcagtttgttctgtaactcgagagccagtatcattggattgatggaagtgtagggtttatgaattattgcacctgactaccatacctcacacagcgttggtgttgtgagcggcccatgaaaagccaaattaaaaatcaaggattcagtcaaactaagcaggtactcatgccaggtactcctttctctacccacatccatgtttgaatgctattgcctgtgatctttacgcttaactgttgtgtatcttttttgttctttacaagaagtgcagaggggttttttgtgtattgcgtgaaaacttataaaacaaatgttaacagaatggaattttttttcaactgtatgtagggctgcagtggtggccagaattagatatctttaaagaattttaaatacaataaacacttcatattattcgccttgttacactcaatgcaattctcaagtctataaaaggtatgtgcttaatatttcctactgtgtaggagaatttgcagtcagccataggtatgtaggaatagtcactcactggctgatacatttaaagcagcagtgtgaatagcaaggacagacaccttcaatttgtgaaatcaaagaactgatgcactatatagaacgaatttgggtttttaaagaaatattaaaagttaagtactgtaagtgttcttaaaacctgtaaacttcattctgtgggctaatggtgtgggacaaaatattcctaatgaaaggaagtaccaattagttgatttgttggtggcattccccttttgggaaagcaatgtaaggttatgtctgtgtatgtcattcacacttaggcaagcatacacaggcacatggctttaaaaaccacactgatgccttgataattaaaaagaatacaagcattccatgtacacatgttaattagcagttagtgattgggccaacactttctcataaaaattggccttttacatgttgtctaattatcatttttccccaaattttgcgttgtaggactactgttcgaagatttttggaagaatactgagaacggcataaagtgaagatcgacatttaaaaaatgaggtgaaagaaagctatagtggcatagaaaaagtataaagctcagttagtttttttattattattattattaaaagttaattcaggactgatgtgacctaccagatttcagaacatgtgttaatagtatatatgccactgaaaacttagggtcctgtatcatacttttttctttaagactttttaagaaatattacttaaacatgtggcttgctcagtgtttaattgcaagttttcaatcttggactttgaaaacaggattaaacgttagtattcgtgtgaatcagactaagtgggatttcatttttacaactctgctctacttagcctttggatttagaagtaaaaataaagtatctctgactttctgttaaaaaaaaaaaaaaaaaaa

SEQ ID NO: 846 - protein, 56 aa, Homo sapiens
MKMELSRVRKHTKASSEGKDSVVLQNILRYIVLSQLFCSRLVPPLVCLFGNYRPHL

SEQ ID NO: 847 - DNA, 388 bp, Homo sapiens
ctgtggagggcgagctgagccctggccgccgccacaatgggccgcgagtttgggaatctgacgcggatgcggcatgtgatcagctacagcttgtcaccgttcgagcagcgcgcctatccgcacgtcttcactaaaggaatccccaatgttctgcgccgcattcgggagtctttctttcgcgtggtgccgcagtttgtagtgttttatcttatctacacatgggggactgaagagttcgagagatccaagaggaggatccagctgcctatgaaaatgacaaatgagcaacgcatccggatgacggttccctgtctctgaaagacctttctctggaagaggagtctgcattgtagtgtctcaaagacacaataaacttcctatggtctga

SEQ ID NO: 848 - protein, 93 aa, Homo sapiens
MGREFGNLTRMRHVISYSLSPFEQRAYPHVFTKGIPNVLRRIRESFFRVVPQFVVFYLIYTWGTEEFERSKRRIQLPMKMTNEQRIRMTVPCL

SEQ ID NO: 849 - DNA, 1934 bp, Homo sapiens
agaaccccgcggggtctgagcagcccagcgtgcccattccagcgcccgcgtccccgcagcatgccgcgcccccgcctgctggccgcgctgtgcggcgcgctgctctgcgcccccagcctcctcgtcgccctggatatctgttccaaaaacccctgccacaacggtggtttatgcgaggagatttcccaagaagtgcgaggagatgtcttcccctcgtacacctgcacgtgccttaagggctacgcgggcaaccactgtgagacgaaatgtgtcgagccactgggcatggagaatgggaacattgccaactcacagatcgccgcctcatctgtgcgtgtgaccttcttgggtttgcagcattgggtcccggagctggcccgcctgaaccgcgcaggcatggtcaatgcctggacacccagcagcaatgacgataacccctggatccaggtgaacctgctgcggaggatgtgggtaacaggtgtggtgacgcagggtgccagccgcttggccagtcatgagtacctgaaggccttcaaggtggcctacagccttaatggacacgaattcgatttcatccatgatgttaataaaaaacacaaggagtttgtgggtaactggaacaaaaacgcggtgcatgtcaacctgtttgagacccctgtggaggctcagtacgtgagattgtaccccacgagctgccacacggcctgcactctgcgctttgagctactgggctgtgagctgaacggatgcgccaatcccctgggcctgaagaataacagcatccctgacaagcagatcacggcctccagcagctacaagacctggggcttgcatctcttcagctggaacccctcctatgcacggctggacaagcagggcaacttcaacgcctgggttgcggggagctacggtaacgatcagtggctgcaggtggacctgggctcctcgaaggaggtgacaggcatcatcacccagggggcccgtaactttggctctgtccagtttgtggcatcctacaaggttgcctacagtaatgacagtgcgaactggactgagtaccaggaccccaggactggcagcagtaagatcttccctggcaactgggacaaccactcccacaagaagaacttgtttgagacgcccatcctggctcgctatgtgcgcatcctgcctgtagcctggcacaaccgcatcgccctgcgcctggagctgctgggctgttagtggccacctgccacccccaggtcttcctgctttccatgggcccgctgcctcttggcttctcagcccctttaaatcaccatagggctggggactggggaaggggagggtgttcagaggcagcaccaccacacagtcacccctccctccctctttcccaccctccacctctcacgggccctgccccagcccctaagccccgtcccctaacccccagtcctcactgtcctgttttcttaggcactgagggatctgagtaggtctgggatggacaggaaagggcaaagtagggcgtgtggtttccctgcccctgtccggaccgccgatcccaggtgcgtgtgtctctgtctctcctagcccctctctcacacatcacattcccatggtggcctcaagaaaggcccggaagccccaggctggagataacagcctcttgcccgtcggccctgcgtcggccctggggtaccatgtgccacaactgctgtggccccctgtccccaagacacttccccttgtctccctggttgcctctcttgccccttgtcctgaagcccagcgacacagaagggggtggggcgggtctatggggagaaagggagcgaggtcagaggagccggcatgggttggcagggtgggcgtttggggccctcatgctggcttttcaccccagaggacacaggcagcttccaaaatatatttatcttcttcacggg

SEQ ID NO: 850 - protein, 387 aa, Homo sapiens
MPRPRLLAALCGALLCAPSLLVALDICSKNPCHNGGLCEEISQEVRGDVFPSYTCTCLKGYAGNHCETKCVEPLGMENGNIANSQIAASSVRVTFLGLQHWVPELARLNRAGMVNAWTPSSNDDNPWIQVNLLRRMWVTGVVTQGASRLASHEYLKAFKVAYSLNGHEFDFIHDVNKKHKEFVGNWNKNAVHVNLFETPVEAQYVRLYPTSCHTACTLRFELLGCELNGCANPLGLKNNSIPDKQITASSSYKTWGLHLFSWNPSYARLDKQGNFNAWVAGSYGNDQWLQVDLGSSKEVTGIITQGARNFGSVQFVASYKVAYSNDSANWTEYQDPRTGSSKIFPGNWDNHSHKKNLFETPILARYVRILPVAWHNRIALRLELLGC

SEQ ID NO: 851 - DNA, 2263 bp, Homo sapiens
agagacaacagtgaatgacaaggaggggccatccaatccctgctgccacctcctgggatggagccctagggagcccctgtgctgcccctgccgtggcaggactcacagccccaccgctgcactgaagcccagggctgtggagcagcctctctccttggacctcctctcggccctaaagggactgggcagagccttccaggactatggttggactgaagccttcagacgtgcctcccaccatggctgtgaagttcctgggggcaggcacagcagcctgttttgctgacctcgttacctttccactggacacagccaaggtccgcctgcagatccagggggagaaccaggcggtccagacggcccggctcgtgcagtaccgtggcgtgctgggcaccatcctgaccatggtgcggactgagggtccctgcagcccctacaatgggctggtggccggcctgcagcgccagatgagcttcgcctccatccgcatcggcctctatgactccgtcaagcaggtgtacacccccaaaggcgcggacaactccagcctcactacccggattttggccggctgcaccacaggagccatggcggtgacctgtgcccagcccacagatgtggtgaaggtccgatttcaggccagcatacacctcgggccatccaggagcgacagaaaatacagcgggactatggacgcctacagaaccatcgccagggaggaaggagtcaggggcctgtggaaaggaactttgcccaacatcatgaggaatgctatcgtcaactgtgctgaggtggtgacctacgacatcctcaaggagaagctgctggactatcacctgctcactgacaacttcccctgccactttgtctctgcctttggagccggcttctgtgccacagtggtggcctccccggtggacgtggtgaagacccggtatatgaactcacctccaggccagtacttcagccccctcgactgtatgataaagatggtggcccaggagggccccacagccttctacaagggatttacaccctcctttttgcgtttgggatcctggaacgtggtgatgttcgtaacctatgagcagctgaaacgggccctgatgaaagtccagatgttacgggaatcaccgttttgaacaagacaagaaggccactggtagctaacgtgtccgaaaccagttaagaatggaagaaaacggtgcatccacgcacacatggacacagacccacacatgtttacagaactgttgtttacttgttgctgattcaagaaacagaagtagaagaggaggagggattctggtcttcactgccatgcctcaagaacacctttgttttgcactgacaagatggaaaataaattatattaatttttgaaacccattaggcatgcctaatatttaggcaagagaaaataaaccaagatagatccatttggacaaaatggaaggttggagacgtgtatccccgtgaaatctggttagataatgaatgataagcaggaaggatggcaagcacgggacaggaggggcccacaatggagtgggagatcagccacggagcctggagggatgccacccagcaacacagagctggcgactgcagctgcaccatcacacatgcatcatcagcctatttgtaatatgtctgccacagagagtcctttgggattctaggaaacccaaggaacaagagaaaaaactagagcctgtgctaaagaagccctgctgggcccatgtgaggctggggctcgtaaatattccctgacgacactgaagaatcaagagggcagcccccactttcctacaaaatggagggagccatcccttccctgtccacctcaccaggggtgctatgacatgcaagtgagaagctgggcatgaacgcactttataaaagcaaaagctctgtgtaaatctaactacaaggacaatgccttgggagagattttgtcgggacagagaggagttgccagggaagaaggtttgaaagatacggttgtctagaggtgagaccaaaggatccagagacttggggaccagaggtgacagtggatgacgtgaagccacaggagccccacccccatgcagcctcttccccacccccccccaccacgcgctcaatcatgagtacctcaaaggattgttgggcttgggggaaaagaggtggattcctgggcaagaacctaaagtagcaggactcggaattctcgggaaattattatgactcaataaaagaattcacaccttaggtgtgg

SEQ ID NO: 852 - protein, 312 aa, Homo sapiens
MVGLKPSDVPPTMAVKFLGAGTAACFADLVTFPLDTAKVRLQIQGENQAVQTARLVQYRGVLGTILTMVRTEGPCSPYNGLVAGLQRQMSFASIRIGLYDSVKQVYTPKGADNSSLTTRILAGCTTGAMAVTCAQPTDVVKVRFQASIHLGPSRSDRKYSGTMDAYRTIAREEGVRGLWKGTLPNIMRNAIVNCAEVVTYDILKEKLLDYHLLTDNFPCHFVSAFGAGFCATVVASPVDVVKTRYMNSPPGQYFSPLDCMIKMVAQEGPTAFYKGFTPSFLRLGSWNVVMFVTYEQLKRALMKVQMLRESPF

SEQ ID NO: 853 - DNA, 1182 bp, Homo sapiens
agagacaacagtgaatgacaaggaggggccatccaatccctgctgccacctcctgggatggagccctagggagcccctgtgctgcccctgccgtggcaggactcacagccccaccgctgcactgaagcccagggctgtggagcagcctctctccttggacctcctctcggccctaaagggactgggcagagccttccaggactatggttggactgaagccttcagacgtgcctcccaccatggctgtgaagttcctgggggcaggcacagcagcctgttttgctgacctcgttacctttccactggacacagccaaggtccgcctgcagatccagggggagaaccaggcggtccagacggcccggctcgtgcagtaccgtggcgtgctgggcaccatcctgaccatggtgcggactgagggtccctgcagcccctacaatgggctggtggccggcctgcagcgccagatgagcttcgcctccatccgcatcggcctctatgactccgtcaagcaggtgtacacccccaaaggcgcggacaactccagcctcactacccggattttggccggctgcaccacaggagccatggcggtgacctgtgcccagcccacagatgtggtgaaggtccgatttcaggccagcatacacctcgggccatccaggagcgacagaaaatacagcgggactatggacgcctacagaaccatcgccagggaggaaggagtcaggggcctgtggaaaggaactttgcccaacatcatgaggaatgctatcgtcaactgtgctgaggtggtgacctacgacatcctcaaggagaagctgctggactaccacctgctcactgacaacttcccctgccactttgtctctgcctttggagccggcttctgtgccacagtggtggcctccccggtggacgtggtgaagacccggtatatgaactcacctccaggccagtacttcagccccctcgactgtatgataaagatggtggcccaggagggccccacagccttctacaaggggtgagcctcctcctgcctccagcactccctcccagagaacaggggcttctttcttttcgaatgtggctaccgtgggtcaacctgggatgtagcggtgaagagtacagatgtaaatgccacaaagaagaagtttaaaaaaccatgcaaaaaaaaaa

SEQ ID NO: 854 - protein, 275 aa, Homo sapiens
MVGLKPSDVPPTMAVKFLGAGTAACFADLVTFPLDTAKVRLQIQGENQAVQTARLVQYRGVLGTILTMVRTEGPCSPYNGLVAGLQRQMSFASIRIGLYDSVKQVYTPKGADNSSLTTRILAGCTTGAMAVTCAQPTDVVKVRFQASIHLGPSRSDRKYSGTMDAYRTIAREEGVRGLWKGTLPNIMRNAIVNCAEVVTYDILKEKLLDYHLLTDNFPCHFVSAFGAGFCATVVASPVDVVKTRYMNSPPGQYFSPLDCMIKMVAQEGPTAFYKG

SEQ ID NO: 855 - DNA, 475 bp, Homo sapiens
  misc_feature (356)..(356): n is a, c, g, or t
  misc_feature (408)..(408): n is a, c, g, or t
  misc_feature (470)..(470): n is a, c, g, or t
ttttttttttttttaataactgttcagctacaaaattttattggtatctttttatgttccctctagaggatgtaatgcacaaaagcattgccacggaacatataaaattacaaatgaaatttattgtaaaaagtagaatgtcttctagactggtgtcagtatttatgtcattcataaaccaaaactgctgtataatatattcattgtcagacaagttcatgtgtgtaaattgccatccaatgttattgactgatataagacagatattgaaaagacaatttaaatttactcttccaaacataaactgttccacaaaaggcactgtaaaacctccttcaaggattttggggttgtgncttggacatttatgggttaactacattaatttgggtcgtgtccataaatccnttgtgtttgggcatttgggcctttaaacggcggcgggcggattggggtcctcaccacctcantagta

SEQ ID NO: 856 - DNA, 3446 bp, Homo sapiens
gcgcaggaacttaagacagttcctcctggcgatgtgatggaatttaatgggacaggagaagggaacgggctttcttttcaggccagcgtggcagcgggcggtagggcgaaagggagaaggaaacgagggtttattccgttgcccactccgcgatatttacaaccgtaacagagaaaatggaaaagcaaaagccctttgcattgttcgtaccaccgagatcaagcagcagtcaggtgtctgcggtgaaacctcagaccctgggaggcgattccactttcttcaagagtttcaacaaatgtactgaagatgattttgagtttccatttgcaaagactaatctctccaaaaatggggaaaacattgattcagatcctgctttacaaaaagttaatttcttgcccgtgcttgagcaggttggtaattctgactgtcactatcaggaaggactaaaagactctgatttggagaattcagagggattgagcagagtgtattcaaaactgtataaggaggctgaaaagataaaaaaatggaaagtaagtacagaagctgaactgagacagaaagaaagtaagttgcaagaaaacagaaagataattgaagcacagcgaaaagccattcaggaactgcaatgtggaaatgaaaaagtaagtttgacattagaagaaggaatacaagacaataaagatttaataaaagagaataatgccacaaggcatttatgtaatctactcaaagaaacctgtgctagatctgcagaaaagacaaagaaatatgaatatgaacgggaagaaaccaggcaagtttatatggatctaaatagtaacattgagaaaatgataacagcttttgaggaacttcgtgtgcaagctgagaattccagactggaaatgcattttaagttaaaggaagattatgaaaaaatccaacaccttgaacaagaatacaagaaggaaataaatgacaaggaaaagcaggtatcactactattgatccaaatcactgagaaagaaaataaaatgaaagatttaacatttctgctagaggaatccagagataaagttaatcaattagaggaaaagacaaaattacagagtgaaaacttaaaacaatcaattgagaaacagcatcatttgactaaagaactagaagatattaaagtgtcattacaaagaagtgtgagtactcaaaaggctttagaggaagatttacagatagcaacaaacacaatttgtcagctaactgaagaaaaagacactcaaatggaagaatctaataaagctagagctgctcattcgtttgtggttactgaatttgaaactactgtctgcagcttggaagaattattgagaacagaacagcaaagattggaaaattatgaagatcaattgataatacttaccatggagcttcaaaagacatcaagtgagctggaagagatgactaagcttacaaataacaaagaagtagaacttgaagaattgaaaaaagtcttgggagaaaaggaaacacttttatatgacaataaacaatttgagaagattgctgaagaattaaaaggaacagaacaagaactaattggtcttctccaagccagagagaaagaagtacatgatttggaatacagttactgccattaccacaagtggacagtattacccaaaagaggtcaaagaccaaaactgagctcgaaacgagaactcaagaatactgaatacttcacactgcaacaagcttcacccccccccaacgagctcacacaggaaacaagtgatatgaccctagaactcaagaatcagcaagaagatataattaataacaaaaagcaagaagaaaggatgttgacacaaatagaaaatcttcaagaaacagaaacccaattaagaaatgaactagaatatgtgagagaagagctaaaacagaaaagagatgaagttaaatgtaaattggacaagagtgaagaaaattgtaacaatttaaggaaacaagttgaaaataaaaacaagtatattgaagaacttcagcaggagaataaggccttgaaaaaaaaaggtacagcagaaagcaagcaactgaatgtttatgagataaaggtcaataaattagagttagaactagaaagtgccaaacagaaatttggagaaatcacagacacctatcagaaagaaattgaggacaaaaagatatcagaagaaaatcttttggaagaggttgagaaagcaaaagtaatagctgatgaagcagtaaaattacagaaagaaattgataagcgatgtcaacataaaatagctgaaatggtagcacttatggaaaaacataagcaccaatatgataagatcattgaagaaagagactcagaattaggactttataagagcaaagaacaagaacagtcatcactgagagcatctttggagattgaactatccaatctcaaagctgaacttttgtctgttaagaagcaacttgaaatagaaagagaagagaaggaaaaactcaaaagagaggcaaaagaaaacacagctactcttaaagaaaaaaaagacaagaaaacacaaacatttttattggaaacacctgacatttattggaaattggattctaaagcagttccttcacaaactgtatctcgaaatttcacatcagttgatcatggcatatccaaagataaaagagactatctgtggacatctgccaaaaatactttatctacaccattgccaaaggcatatacagtgaagacaccaacaaaaccaaaactacagcaaagagaaaacttgaatatacccattgaagaaagtaaaaaaaagagaaaaatggcctttgaatttgatattaattcagatagttcagaaactactgatcttttgagcatggtttcagaagaagagacattgaaaacactgtataggaacaataatccaccagcttctcatctttgtgtcaaaacaccaaaaaaggccccttcatctctaacaacccctggatctacactgaagtttggagctataagaaaaatgcgggaggaccgttgggctgtaattgctaaaatggatagaaaaaaaaaactaaaagaagctgaaaagttatttgtttaatttcagagaatcagtgtagttaaggagcctaataacgtgaaacttatagttaatattttgttcttatttgccagagccaaattttatctggaagttgagacttaaaaaatacttgcatgaatgatttgtgtttctttatatttttagcctaaatgttaactacatattgtctggaaacctgtcattgtattcagataattagatgattatatattgttgttactttttcttgtattcatgaaaactgtttttactaagttttcaaatttgtaaagttagcctttgaatgctaagaatgcattattgagggtcattctttattctttactattaaaatattttggatgc

SEQ ID NO: 857 - protein, 973 aa, Homo sapiens
MEKQKPFALFVPPRSSSSQVSAVKPQTLGGDSTFFKSFNKCTEDDFEFPFAKTNLSKNGENIDSDPALQKVNFLPVLEQVGNSDCHYQEGLKDSDLENSEGLSRVYSKLYKEAEKIKKWKVSTEAELRQKESKLQENRKIIEAQRKAIQELQCGNEKVSLTLEEGIQDNKDLIKENNATRHLCNLLKETCARSAEKTKKYEYEREETRQVYMDLNSNIEKMITAFEELRVQAENSRLEMHFKLKEDYEKIQHLEQEYKKEINDKEKQVSLLLIQITEKENKMKDLTFLLEESRDKVNQLEEKTKLQSENLKQSIEKQHHLTKELEDIKVSLQRSVSTQKALEEDLQIATNTICQLTEEKDTQMEESNKARAAHSFVVTEFETTVCSLEELLRTEQQRLENYEDQLIILTMELQKTSSELEEMTKLTNNKEVELEELKKVLGEKETLLYDNKQFEKIAEELKGTEQELIGLLQAREKEVHDLEYSYCHYHKWTVLPKRGQRPKLSSKRELKNTEYFTLQQASPPPNELTQETSDMTLELKNQQEDIINNKKQEERMLTQIENLQETETQLRNELEYVREELKQKRDEVKCKLDKSEENCNNLRKQVENKNKYIEELQQENKALKKKGTAESKQLNVYEIKVNKLELELESAKQKFGEITDTYQKEIEDKKISEENLLEEVEKAKVIADEAVKLQKEIDKRCQHKIAEMVALMEKHKHQYDKIIEERDSELGLYKSKEQEQSSLRASLEIELSNLKAELLSVKKQLEIEREEKEKLKREAKENTATLKEKKDKKTQTFLLETPDIYWKLDSKAVPSQTVSRNFTSVDHGISKDKRDYLWTSAKNTLSTPLPKAYTVKTPTKPKLQQRENLNIPIEESKKKRKMAFEFDINSDSSETTDLLSMVSEEETLKTLYRNNNPPASHLCVKTPKKAPSSLTTPGSTLKFGAIRKMREDRWAVIAKMDRKKKLKEAEKLFV

SEQ ID NO: 858 - DNA, 2304 bp, Homo sapiens
ctcgcgtttccggccggaagcttctccagcctttcccggaagctgcgctcgctacccgggtaacgggtcccggctgtggaagctcccgcggcgccgcgatggacctcgaggagtcggaagagtttaaagaacgctgtactcagtgtgctgctgtctcatggggtcttactgatgaaggcaaatattattgcacttcttgccacaatgttacagagagatatcaggaagttacaaacactgatcttattcctaatacccaaataaaagccctcaaccgggggcttaaaaaaaaaaacaatactgaaaaaggctgggattggtatgtgtgtgaaggtttccagtatattctttatcaacaagcagaagccttaaagaaccttggagtaggcccagagttaaagaacgatgttttacataatttttggaagcgctaccttcagaagagcaagcaggcatattgtaagaacccagtttataccactggaaggaaacctacggtattagaagataatctaagtcattcagactgggctagtgagcctgagctgctaagtgatgtcagctgtcctccttttcttgaaagtggagcggagtctcagtctgacatccacactcgaaaacctttccccgtcagcaaagcatcacaatcagaaacgtctgtctgctctggatctctggatggagttgaatactcacaacgaaaggagaagggaatcgtgaagatgaccatgccacagacacttgccttctgttatctgtccttactttggcagagagaagcaataacactttcagatcttttgaggtttgttgaagaggaccatattccttacataaatgcttttcagcattttccagaacagatgaaattatatggacgtgacagaggaatctttggtatagagtcttggcctgactacgaggacatctataaaaaaacaatagaagttggaacatttttagatttgcctcgttttccagacataactgaagactgctatcttcatcccaacatactgtgtatgaaatacttgatggaagtcaacctccctgatgaaatgcatagcttaacttgccacgtggtaaaaatgactggaatgggagaagtggattttctgacatttgatcctatagctaaaatggcaaaaactgttaagtacgatgtacaagctgtagctatcattgtggtggtattgaaactgctctttctattggatgacagtttcgagtggtctttgtctaatcttgctgaaaagcataatgaaaagaacaaaaaagataagccatggtttgatttcagaaagtggtaccaaattatgaagaaagcttttgatgagaaaaaacaaaaatgggaagaagcaagggccaagtacctgtggaaaagtgaaaagccactctactactcatttgtcgacaaaccagtagcatataaaaaaagagaaatggtggtgaatctacagaaacaatttagcacactggtcgagtcaacagcaactgctggaaaaaaaagcccttcaagttttcagttcaactggactgaagaggacactgatagaacgtgtttccatggacacagccttcagggagtcctgaaagagaaaggccaatcactgctgactaagaattcattatattggcttagtacacagaaattctgcagatgctattgtacacatgtgacaacctatgaagaatcaaattattctctgagttatcagtttatactaaatctcttctccttcctgctcagaataaagacttcccttctccatgaagaagtgagcttagttgagaagaaactttttgagaaaaaatacagtgtaaaaagaaagaaatcaagatccaagaaagtgagacgacattgagaaaatgaaatagaaactttctggaaaaatattttaatagtgataataacatcagattttaatataacattccagagaattgtggaaaatactgcatatatatgtatagactctgacacatatttacatatatatcaagtgtgcttagaaaaatgtatattgtaaagcaggtgagcttcatttgattttatttttcagagtatgaacattctaagagaaagttaaaacaatagcaaattgtataattgtatccagaaatgtatactcatcgtattttaaagctaaatttattttttaaactagatcccttcattattctttatgccccagagtaaatcccagatggatcaaagatctaaacataatctttcatatgtaaaaatataaaagtattagtagaaaacaaatatgaatgctttgatgatcttggaaaaaaaaa

SEQ ID NO: 859 - protein, 588 aa, Homo sapiens
MDLEESEEFKERCTQCAAVSWGLTDEGKYYCTSCHNVTERYQEVTNTDLIPNTQIKALNRGLKKKNNTEKGWDWYVCEGFQYILYQQAEALKNLGVGPELKNDVLHNFWKRYLQKSKQAYCKNPVYTTGRKPTVLEDNLSHSDWASEPELLSDVSCPPFLESGAESQSDIHTRKPFPVSKASQSETSVCSGSLDGVEYSQRKEKGIVKMTMPQTLAFCYLSLLWQREAITLSDLLRFVEEDHIPYINAFQHFPEQMKLYGRDRGIFGIESWPDYEDIYKKTIEVGTFLDLPRFPDITEDCYLHPNILCMKYLMEVNLPDEMHSLTCHVVKMTGMGEVDFLTFDPIAKMAKTVKYDVQAVAIIVVVLKLLFLLDDSFEWSLSNLAEKHNEKNKKDKPWFDFRKWYQIMKKAFDEKKQKWEEARAKYLWKSEKPLYYSFVDKPVAYKKREMVVNLQKQFSTLVESTATAGKKSPSSFQFNWTEEDTDRTCFHGHSLQGVLKEKGQSLLTKNSLYWLSTQKFCRCYCTHVTTYEESNYSLSYQFILNLFSFLLRIKTSLLHEEVSLVEKKLFEKKYSVKRKKSRSKKVRRH

SEQ ID NO: 860 - DNA, 2742 bp, Homo sapiens
cccgcctcttcctcccttccttctttccttgctttcgccgcgcactccgccgccatggagcagcgccgcgtcaccgacttcttcgcgcgccgccgccccgggcccccccgcatcgcgccgcccaagctggcctgccgcacccccagccccgccaggcccgcactccgcgccccggcctccgctaccagtggcagccgcaagcgcgcccgcccgcccgccgcccccggacgcgaccaggccaggccaccggcccgcaggagactgcggctgtcggtggacgaggtttccagccccagtacccccgaggccccagacatcccagcctgcccttctccgggccagaagataaagaaatccaccccggcagcaggtcagccgccccacctgacatccgcgcaggaccaggacaccatctctgagcttgcgtcatgcctgcaacgggcccgggagctgggggcaagagtccgggcgctgaaggccagtgcccaggatgctggggagtcctgcaccccagaggccgagggccgccctgaggagccatgtggcgagaaggcgcccgcctaccagcgcttccatgccctggcccagcccggcctgccgggactcgtgctgccctacaagtaccaggtgctggcggagatgttccgcagcatggacaccatcgtgggcatgctccacaaccgctccgagacgcccacctttgccaaggtccagcggggcgtccaggacatgatgcgtaggcgttttgaggagcgcaatgttggccagatcaaaaccgtgtacccggcctcctaccgcttccgccaggagcgcagtgtccccaccttcaaggatggcgccaggaggtcagattaccagctcaccatcgagccactgctggagcaggaggctgacggagcagccccccagctcacggcctcgcgcctcctgcagcgacggcagatcttcagccagaagctggtggagcacgtcaaggagcaccacaaggccttcctggcctccctgagccccgccatggtggtgccggaggaccagctgacccgctggcacccgcgcttcaacgtggatgaagtacccgacatcgagccggccgcgctgccccagccacccgccacggagaagctcaccactgctcaggaggtgctggcccgggcccgcaacctgatttcacccaggatggagaaggccttgagtcaattggccctgcgctctgctgcgcccagcagccccgggtctcccaggccagcactgccggctaccccaccagccaccccgcctgcagcctctcccagtgctctgaagggggtgtcccaggatctgctggagcggatccgagccaaggaggcacagaagcagctggcacagatgacgcggtgcccggagcaggagcagcggctgcagcgcttagaacggctgcctgagctggcccgcgtgctgcggagcgtctttgtgtccgaacgcaagcctgcgctcagcatggaggtggcctgtgccaggatggtgggcagctgttgtactatcatgagccctggggaaatggagaagcacctgctgctcctctccgagctgctgccggactggctcagcctccaccgcatccgcaccgacacctacgtcaagctggacaaggccgcggacctggcccacatcactgcacgcctggcccaccagacacgtgctgaggaggggctgtgagcctgggggccactgtggacagacgtgggcttcagaagctcgctggcctgggcccaccagcattttcttttatgaacatgatacactttggccttcctttccccagcgcccctgagggccagaggcagatgtgggctgcaggctgcacagcccgagggtctctggctgcgggcggtgggccccttcatggggctcacctggtggattcacattaaaccggtttctgtgggcacctttgtccttgctgctggtggggaagggaagccagatccagcaccccctggggggccatcgggagtgtggctgggggtgaagggggctctgtggcaatatggggttgggtagtgtgggtggcaggccatcccctctaatcttggaacctctgaatatgggacctcccacagcaaagggtgacttttgtcattaagaaagactggggtgggtgtggtggctcacgcctgtaaccccagcactttgggaggccaaggtgggcagatcacgaggtcaagagatcgagaccatcctggcgaacatggtgaaaccccatctctactaaaaatacaaaaaattagccgggtgtggtggtgggcacctgtcgtcccagctactagggaggctgaggcaggagaatggtgtgaacccaggaggcacagcttgcagtgagcgaagatcgcaccactgcacgcactccagcctgggtgacagagcgagactccgtctcaaaaaaaaaaatttcaagactggagaggtgatcctgaattgtccagctacgccccatgtcatcacagggccttcatgacagggccagagccagccagctttgaagacgcggccctgccccgacacaggcagcctggagaagctgggcaggacaagtaggacatccctggagcctccagaagggactggcctctgcccacaccttgacttcagtatttctgacctcctaaactctaataaagtcatgcttacagccactaaaaaaaaaaaaaaaaaaaaaaaaaaaaaaaaaaaaaaaaaaaaaaaaaaaaaaaaaaaaaaaaaaaa

SEQ ID NO: 861 - protein, 546 aa, Homo sapiens
MEQRRVTDFFARRRPGPPRIAPPKLACRTPSPARPALRAPASATSGSRKRARPPAAPGRDQARPPARRRLRLSVDEVSSPSTPEAPDIPACPSPGQKIKKSTPAAGQPPHLTSAQDQDTISELASCLQRARELGARVRALKASAQDAGESCTPEAEGRPEEPCGEKAPAYQRFHALAQPGLPGLVLPYKYQVLAEMFRSMDTIVGMLHNRSETPTFAKVQRGVQDMMRRRFEERNVGQIKTVYPASYRFRQERSVPTFKDGARRSDYQLTIEPLLEQEADGAAPQLTASRLLQRRQIFSQKLVEHVKEHHKAFLASLSPAMVVPEDQLTRWHPRFNVDEVPDIEPAALPQPPATEKLTTAQEVLARARNLISPRMEKALSQLALRSAAPSSPGSPRPALPATPPATPPAASPSALKGVSQDLLERIRAKEAQKQLAQMTRCPEQEQRLQRLERLPELARVLRSVFVSERKPALSMEVACARMVGSCCTIMSPGEMEKHLLLLSELLPDWLSLHRIRTDTYVKLDKAADLAHITARLAHQTRAEEGL

SEQ ID NO: 862 - DNA, 1706 bp, Homo sapiens
aagcttgtgctgcaggacagaaagggagaacagcttctctcacccctgagccttcacaagcccttgtctatttgccgttgccttcaaaatatacctcccccgaaaccagtagctttctgagtcctggtgtcccctccgccctttctggacaggtttgggaagaagaaagcagtcagtgctgggccttattggggtgtgaagcgccttgctctgccccttctgctcactgtgaaggccgctggatgcttctcttaggcatggtttaagcctccgattactaaaccccttgccccacaaacgtccacattgacgagcctctttttagtaactgcttccccgtaattccttcagaggttgctgtacccttcgctgatgtgctgccctcctgtaaaacctccagatgccttcccacgtaatgcccctttcagatgctttaagctgagagcttaaaccacaggtaccatggctgacgcctgccaggtttctgctgcagataatctatgatgggaggggcatattttttacttcattacttatgtaaactcttgttccagaaagctttaatgtgtgtgggagtgttctgggtctattaggtctgtgcgcatgggtgtgggcatttgcctgtgtccaccgggtgggtctcattatgaaatgtatgtttatgtagggctttaatggctgaaaatggcaaagagatgaatagaccacttggccccatgtgtaattgccaggccccttctgtgctcaaatgaggtgtccgagtgaaggtcagcccttcccttctgtatttggggcctatttatgccaccagtaattttataagaaatctgaatagttctcccctttgagtgcatttaactctttagtatcttctctcttacctatttgagcccctctagctacagtctggcttaaatgaaaggggaattatatgcttaagaaaaagtaggacacggttgaggcagtttgctgactgaatacgcgaagaaggacctgatgggctcatatgcaccactgccatcacagtcctcatcgtgatgcaagcttatatgattcttgaggtaactctaccagatacttccagatttagaaatgtgtcaaaggaaaaattggtgatactcttctttcccctgccagaaacagcccagatctcctcttaagcggaaaagagattgaccttctagcagaggcaaaggtaaactcctgtaagttacttctgttaccaaagggaggggggcggcttttgtgaatgtatgaggagcttttgccagagagatattcggaggaggggtgtgcccatatgcacacatatattttcccgcataaccgtatccaatgctagcatttagaggaaggcatttagccaccaaaagtccatccatctatgctgcttccacagagaaaacattttctctttcctcctcttgaacttacataatatcctcctcccattccaaccttagaatggagtcttctgggggcagctgcaaagcgttctccctaggacagatggagcctccctttcctcatctactctgtgggtggtttcagggcccacgagtcaacatgaggagttgtgctggtggtatgtgtgttggaggctgggctggctgattcacagtgacgaggatgtcaataataacaagaatgagaatgatggtacctaataaagactttttttcccaaaaaaaaaaaaaaaaaaaaaa

SEQ ID NO: 863 - DNA, 1792 bp, Homo sapiens
ggcacgaggcctggagctagcctgggggcgagccagggtcccccaacccccgggatgaccgcggccagccgggccaacccctacagcatcgtgtcatcggaggaggacgggctgcacctggtcaccatgtcgggcgccaacggcttcggcaacggcaaggtgcacacgcggcgcaggtgccgcaaccgcttcgtcaagaagaatggccagtgcaacattgagttcgccaacatggacgagaagtcacagcgctacctggctgacatgttcaccacctgtgtggacatccgctggcggtacatgctgctcatcttctcgctggccttccttgcctcctggctgctgttcggcatcatcttctgggtcatcgcggtggcacacggtgacctggagccggctgagggccggggccgcacaccctgtgtgatgcaggtgcacggcttcatggcggccttcctcttctccatcgagacgcagaccaccatcggctacgggctgcgctgtgtgacggaggagtgcccggtggccgtcttcatggtggtggcccagtccatcgtgggctgcatcatcgactccttcatgattggtgccatcatggccaagatggcaaggcccaagaagcgggcacagacgctgctgttcagccacaacgccgtggtggccctgcgtgacggcaagctctgcctcatgtggcgtgtgggtaacctgcgcaagagccacattgtggaggcccatgtgcgcgcgcagctcatcaagccgcgggtcaccgaggagggcgagtacatcccgctggaccagatcgacatcgatgtgggcttcgacaagggcctggaccgcatctttctggtgtcgcccatcaccatcttgcatgagattgacgaggccagcccgctcttcggcatcagccggcaggacctggagacggacgactttgagatcgtggtcatcctggaaggcatggtggaggccacagccatgaccacccaggcccgcagctcctacctggccaatgagatcctgtggggtcaccgctttgagcccgtgctcttcgaggagaagaaccagtacaagattgactactcgcacttccacaagacctatgaggtgccctctacgccccgctgcagtgcgaaggatctggtagagaacaagttcctgctgcccagcgccaactccttctgctacgagaacgagctggccttcctgagccgtgacgaggaggatgaggcggacggagaccaggacggccgaagccgggacggcctcagcccccaggccaggcatgactttgacagactccaggctggcggcggggtcctggagcagcggccctacagacgggagtcagagatctgagccaaccttggccgacatgcagcatccacccccggctggggagaggccccgcggtcgctcaggggccccgggtttgagcagaacgggcccagtgccctgggttgcagactcagtagcgttttagtcgttttatgtttctttgcaacggcctcagaagtttggccggagagggggcagccagagcggcagcccccggcctcagaggctatcacaggctcagggcaaagaagtggcctcctggggggccaggccacgagggccagggcttctgcctgaagatggagctgcagcctgcggggaagcagctcagctcgatggtgggcccagcctctgctgtccaaggctggctagctgcggtgctccttgctggtttttaacttggggagaaacaccgggtttcagctttcttgaccttagcttgggtgagactgtttac

SEQ ID NO: 864 - protein, 433 aa, Homo sapiens
MTAASRANPYSIVSSEEDGLHLVTMSGANGFGNGKVHTRRRCRNRFVKKNGQCNIEFANMDEKSQRYLADMFTTCVDIRWRYMLLIFSLAFLASWLLFGIIFWVIAVAHGDLEPAEGRGRTPCVMQVHGFMAAFLFSIETQTTIGYGLRCVTEECPVAVFMVVAQSIVGCIIDSFMIGAIMAKMARPKKRAQTLLFSHNAVVALRDGKLCLMWRVGNLRKSHIVEAHVRAQLIKPRVTEEGEYIPLDQIDIDVGFDKGLDRIFLVSPITILHEIDEASPLFGISRQDLETDDFEIVVILEGMVEATAMTTQARSSYLANEILWGHRFEPVLFEEKNQYKIDYSHFHKTYEVPSTPRCSAKDLVENKFLLPSANSFCYENELAFLSRDEEDEADGDQDGRSRDGLSPQARHDFDRLQAGGGVLEQRPYRRESEI

SEQ ID NO: 865 - DNA, 6586 bp, Homo sapiens
ctggggagccggcgctggaggtggtgagtggcgtggggactgtgtcgagggggtccccaaggtgccggaccctgcggaggggcgaagtttcggcactggggagggcgtgcggacgctttccctacaggcgaccactgctctgcgggcgggtggtcttagctccagtcccccattcagttcctcagcattccaggtcggcggcgaaggggtccccgaacgaagggcgcaaggcagcgtctctgctgggaccgggaagccggacttcagggcctctcggcccgtgggcttctccccgagtctccccgagtcggttggcattaagagtttagcagatactttcagaaatggatacataagaaatggctggaaatcaaatgaatgtccaaagaagagcttagggtcttagtaacattcttttttaaaataactgtctgccaaaatgtcattacacagtactcataatagaaataacagcggtgatattcttgatattccttcttcccaaaatagttcatcactgaatgccctcacccacagtagccgacttaagctgcatttgaagtcggatatgtcagaatgtgaaaatgatgatccattattgagatctgcaggtaaagtcagagacataaatagaacttatgttatttctgccagtagaaaaacagcagacatgccccttacccctaatcctgtaggtagattggcacttcagaggagaactacaaggaacaaagaatcatctttgcttgttagtgagttggaagacacaactgaaaaaacagcagaaacacgtcttacattacaacgtcgtgctaaaacagattctgcagaaaagtggaaaacagctgaaatagattctgtcaaaatgacactgaatgtgggaggtgaaacagaaaataatggtgtttctaaggaaagtagaacaaatgtaaggattgtaaataatgctaaaaactcttttgttgcctcttctgtacctttagatgaagatccacaggtcattgaaatgatggctgataagaaatacaaagaaacattttctgcccccagtagagcaaatgaaaatgttgcacttaagtactcaagtaatagaccacccattgcttccctgagtcagactgaagttgttagatcaggacacttgacaacgaaacctactcagagcaagttggatatcaaagtgttgggaacaggaaacttgtatcatagaagtattgggaaggaaattgcaaaaacttcaaataaatttgggagcttagaaaaaagaacacctacaaaatgtacaacagaacacaaactgacaacaaagtgcagcctgcctcagcttaagagcccagctccatcaatactgaagaatagaatgtctaaccttcaagttaaacaaagaccaaaaagttcctttcttgcaaataaacaggaaagatccgcagaaaatacaattcttcccgaagaagaaactgtagttcagaacacctctgcaggaaaagaccccttaaaagtagagaatagtcaagtgacagtggcagtacgcgtaagacctttcaccaagagagagaagattgaaaaagcatcccaggtagtcttcatgagtgggaaagaaataactgtggaacaccctgacacgaaacaagtttataattttatttatgatgtttcattctggtcttttgatgaatgtcatcctcactacgctagccagacaactgtctatgagaagctagcagcaccactcctagaaagagccttcgaaggcttcaatacctgtctttttgcttatggtcagactggctctggaaaatcatatacgatgatgggatttagtgaagaaccaggaataattccaagattttgtgaagatcttttttctcaagtagccagaaaacaaacccaagaggtcagctatcacattgaaatgagcttctttgaagtatataatgaaaaaattcacgaccttctggtttgtaaagatgaaaatgggcagagaaagcaaccactgagagtgagggaacatcctgtttatggaccatatgttgaagcactgtcaatgaacattgtcagttcttacgctgatatccagagttggctagaattgggaaataaacaaagagctactgctgctactggtatgaatgataaaagttcccgatctcattcagttttcaccctggtgatgacccagaccaagacagaatttgtggaaggggaagaacacgatcacagaataacaagtcgaattaacctaatagatctggcaggcagtgagcgctgctctacggctcacactaatggagatcgactaaaggaaggtgtgagtattaataagtccttgctaactttgggaaaagttatatctgcactttcggaacaagcaaaccaaaggagtgtttttattccttatcgtgaatctgttcttacatggctgttaaaagaaagtctgggtggaaattcaaaaactgcaatgattgctacgattagtcccgctgccagcaacatagaagaaacattaagcacacttagatatgctaaccaagcccgtttaatagtcaacattgctaaagtaaatgaagatatgaacgctaagttaattagagaattgaaggcagaaattgcaaagctaaaagctgctcagagaaacagtcggaatattgaccctgaacgatacaggctctgtcggcaagaaataacatccttaagaatgaaactgcatcaacaggagagagacatggcagaaatgcaaagagtgtggaaagaaaagtttgaacaagctgaaaaaagaaaacttcaagaaacaaaagagttacagaaagcaggaattatgtttcaaatggacaatcatttaccaaaccttgttaatctgaatgaagatccacaactatctgagatgctgctatatatgataaaagaaggaacaactacagttggaaagtataaaccaaactcaagccatgatattcagttatctggggtgctgattgctgatgatcattgtactatcaaaaattttggtgggacagtgagtattatcccagttggggaagcaaagacatatgtaaatggaaaacatattttggaaatcacagtattacgtcatggtgatcgagtgattcttggtggagatcattattttagatttaatcatccagtagaagtccagaaaggaaaaaggccatctggaagagatactcctataagtgagggtccaaaagactttgaatttgcaaaaaatgagttgctcatggcacagagatcacaacttgaagcagaaataaaagaggctcagttgaaggcaaaggaagaaatgatgcaaggaatccagattgcaaaagaaatggctcagcaagagctttcttctcaaaaagctgcatatgaaagcaaaataaaagcactggaagcagaactgagagaagagtctcaaaggaaaaaaatgcaggaaataaataaccagaaggctaatcacaaaattgaggaattagaaaaggcaaagcagcatcttgaacaggaaatatatgtcaacaaaaagcgattagaaatggagacattggctacaaaacaggctttagaagaccatagcatccgccatgcaagaattctggaagctttagaaactgaaaagcaaaaaattgctaaagaagtacaaattctacagcagaatcggaataatagggataaaacttttacagtgcagacaacttggagctctatgaaactctcaatgatgattcaggaagccaatgctatcagcagcaaattgaaaacatactatgtttttggcagacatgatatatcagataaaagtagttctgacacttctattcgggttcgtaacctgaaactaggaatctcaacattctggagtctggaaaagtttgaatctaaacttgcagcaatgaaagaactttatgagagtaatggtagtaacaggggtgaagatgccttttgtgatcctgaagatgaatgggaacccgacattacagatgcaccagtttcttcactttctagaaggaggagtaggagtttgatgaagaacagaagaatttctggttgtttacatgacatacaagtccatccaattaagaatttgcattcttcacattcatcaggtttaatggacaaatcaagcactatttactcaaattcagcagagtcctttcttcctggaatttgcaaagaattgattggttcttcgttagatttttttggacagagttatgatgaagaaagaactatagcagacagcctaattaatagttttcttaaaatttataatgggctatttgccatttccaaggctcatgaagaacaagatgaagaaagtcaagataacttgttttcttctgatcgagcaatccagtcacttactattcagactgcatgtgcttttgagcagctagtagtgctaatgaaacactggctgagtgatttactgccttgtaccaacatagcaagacttgaggatgagttgagacaagaagttaaaaaactgggaggctacttacagttatttttgcagggatgctgtttggatatttcatcaatgataaaagaggctcaaaagaatgcaatccaaattgtacaacaagctgtaaagtatgtggggcagttagcagttctgaaagggagcaagctacattttctagaaaacggtaacaataaagctgccagtgtccaggaggaattcatggatgctgtttgtgatggtgtaggcttaggaatgaagattttattagattctggactggaaaaagcaaaagaacttcagcatgaactctttaggcagtgtacaaaaaatgaggttaccaaagaaatgaaaactaatgccatgggattgattagatctcttgaaaacatctttgctgaatcgaaaattaaaagtttcagaaggcaagtacaagaagaaaactttgaataccaagatttcaagaggatggttaatcgtgctccagaattcttaaagttaaaacattgcttagagaaagctattgaaattattatttctgcactgaaaggatgccatagtgatataaatcttctccagacttgtgttgaaagtattcgcaacttggccagtgatttttacagtgacttcagtgtgccttctacttctgttggcagctatgagagtagagtaactcacattgtccaccaggaactagaatctctagctaagtctctcctcttttgttttgaatctgaagaaagccctgatttgttgaaaccctgggaaacttataatcaaaataccaaagaagaacaccaacaatctaaatcaagcgggattgacggcagtaagaataaaggtgtaccaaagcgtgtctatgagctccatggctcatccccagcagtgagctcagaggaatgcacacccagtaggattcagtgggtgtgaatactgatgtgtaggcacttttatgaccacccatgaaagaaaaagaacacttgctcggtaattttctttatgcaggagagtttaagagaaatcagcacagatatttcaaaaaagtccatgtctttttatctttaaaatatctatttatcaaaggccagacacagtggctcacgcctgtaatcccagcactttgggaggcgggcagatcacaaggtcaggagtttgagaccggcctggccaacatggtgaaaccccgtctctactaaaaatacaaaaatttgctgggcatggtggcgcgtgcctgtaatcccagctactaggggggctgaggcaggaggatcgcttgaacctgagaggcagaggttgcagtgagccaagatcatgccactttactccagtctgagcaacagaacgagacttagtcaaaataaataaataaataagtaaataaataaataaataaaatatcttttatctttaaagtgtttaacattggtatactgtctgtagttggttcattagtcgtttataaagggttattttctcatgagtggaaacctgaacaatcagttacctttgtgcctatgccttctctctcctcagacagctgggatgtttatggtgaaatggcctgtacaagtttaactaagacaacttaacttgcattgttaatcaaaaattcttttctcaaagggttaactggttgccattttgaatagtatgttcaagggtgtagcttcctgtttctttccaaattataagtagctacctaaatatagtataattatatattaataatatggcttgctggcacagtagtttaccctgttatctgtgtttcataatgggggctgtatgaatattatttaaaactaataaaatgttgccagaattatactaaactgttggatgagattaggagatcagaggctggaccttctcttgataatgcttgttttgttaaaggtataatgaaataatttgtatatgatttgatgaagattaaagacccttattttccacagctttaaaaaaaaacctttatttatgatcaagtaataaagataatattctacttgtgggatcttacattatggaaatagtttgacgtttttgacctcaagagtatgtataatttgaagagatactttgtaactatgcttgggtgatattgagcagttcctaaagaataattcattt

SEQ ID NO: 866 - protein, 1648 aa, Homo sapiens
MSLHSTHNRNNSGDILDIPSSQNSSSLNALTHSSRLKLHLKSDMSECENDDPLLRSAGKVRDINRTYVISASRKTADMPLTPNPVGRLALQRRTTRNKESSLLVSELEDTTEKTAETRLTLQRRAKTDSAEKWKTAEIDSVKMTLNVGGETENNGVSKESRTNVRIVNNAKNSFVASSVPLDEDPQVIEMMADKKYKETFSAPSRANENVALKYSSNRPPIASLSQTEVVRSGHLTTKPTQSKLDIKVLGTGNLYHRSIGKEIAKTSNKFGSLEKRTPTKCTTEHKLTTKCSLPQLKSPAPSILKNRMSNLQVKQRPKSSFLANKQERSAENTILPEEETVVQNTSAGKDPLKVENSQVTVAVRVRPFTKREKIEKASQVVFMSGKEITVEHPDTKQVYNFIYDVSFWSFDECHPHYASQTTVYEKLAAPLLERAFEGFNTCLFAYGQTGSGKSYTMMGFSEEPGIIPRFCEDLFSQVARKQTQEVSYHIEMSFFEVYNEKIHDLLVCKDENGQRKQPLRVREHPVYGPYVEALSMNIVSSYADIQSWLELGNKQRATAATGMNDKSSRSHSVFTLVMTQTKTEFVEGEEHDHRITSRINLIDLAGSERCSTAHTNGDRLKEGVSINKSLLTLGKVISALSEQANQRSVFIPYRESVLTWLLKESLGGNSKTAMIATISPAASNIEETLSTLRYANQARLIVNIAKVNEDMNAKLIRELKAEIAKLKAAQRNSRNIDPERYRLCRQEITSLRMKLHQQERDMAEMQRVWKEKFEQAEKRKLQETKELQKAGIMFQMDNHLPNLVNLNEDPQLSEMLLYMIKEGTTTVGKYKPNSSHDIQLSGVLIADDHCTIKNFGGTVSIIPVGEAKTYVNGKHILEITVLRHGDRVILGGDHYFRFNHPVEVQKGKRPSGRDTPISEGPKDFEFAKNELLMAQRSQLEAEIKEAQLKAKEEMMQGIQIAKEMAQQELSSQKAAYESKIKALEAELREESQRKKMQEINNQKANHKIEELEKAKQHLEQEIYVNKKRLEMETLATKQALEDHSIRHARILEALETEKQKIAKEVQILQQNRNNRDKTFTVQTTWSSMKLSMMIQEANAISSKLKTYYVFGRHDISDKSSSDTSIRVRNLKLGISTFWSLEKFESKLAAMKELYESNGSNRGEDAFCDPEDEWEPDITDAPVSSLSRRRSRSLMKNRRISGCLHDIQVHPIKNLHSSHSSGLMDKSSTIYSNSAESFLPGICKELIGSSLDFFGQSYDEERTIADSLINSFLKIYNGLFAISKAHEEQDEESQDNLFSSDRAIQSLTIQTACAFEQLVVLMKHWLSDLLPCTNIARLEDELRQEVKKLGGYLQLFLQGCCLDISSMIKEAQKNAIQIVQQAVKYVGQLAVLKGSKLHFLENGNNKAASVQEEFMDAVCDGVGLGMKILLDSGLEKAKELQHELFRQCTKNEVTKEMKTNAMGLIRSLENIFAESKIKSFRRQVQEENFEYQDFKRMVNRAPEFLKLKHCLEKAIEIIISALKGCHSDINLLQTCVESIRNLASDFYSDFSVPSTSVGSYESRVTHIVHQELESLAKSLLFCFESEESPDLLKPWETYNQNTKEEHQQSKSSGIDGSKNKGVPKRVYELHGSSPAVSSEECTPSRIQWV

SEQ ID NO: 867 - DNA, 541 bp, Homo sapiens
cttttcgatccgccatctgcggtggagccgccaccaaaatgcagattttcgtgaaaacccttacggggaagaccatcaccctcgaggttgaaccctcggatacgatagaaaatgtaaaggccaagatccaggataaggaaggaattcctcctgatcagcagagactgatctttgctggcaagcagctggaagatggacgtactttgtctgactacaatattcaaaaggagtctactcttcatcttgtgttgagacttcgtggtggtgctaagaaaaggaagaagaagtcttacaccactcccaagaagaataagcacaagagaaagaaggttaagctggctgtcctgaaatattataaggtggatgagaatggcaaaattagtcgccttcgtcgagagtgcccttctgatgaatgtggtgctggggtgtttatggcaagtcactttgacagacattattgtggcaaatgttgtctgacttactgtttcaacaaaccagaagacaagtaactgtatgagttaataaaagacatgaactaaca

SEQ ID NO: 868 - protein, 156 aa, Homo sapiens
MQIFVKTLTGKTITLEVEPSDTIENVKAKIQDKEGIPPDQQRLIFAGKQLEDGRTLSDYNIQKESTLHLVLRLRGGAKKRKKKSYTTPKKNKHKRKKVKLAVLKYYKVDENGKISRLRRECPSDECGAGVFMASHFDRHYCGKCCLTYCFNKPEDK

SEQ ID NO: 869 - DNA, 515 bp, Homo sapiens
cctcttttaccaaggacccgccaacatgggccgcgttcgcaccaaaaccgtgaagaaggcggcccgggtcatcatagaaaagtactacacgcgcctgggcaacgacttccacacgaacaagcgcgtgtgcgaggagatcgccattatccccagcaaaaagctccgcaacaagatagcaggttatgtcacgcatctgatgaagcgaattcagagaggcccagtaagaggtatctccatcaagctgcaggaggaggagagagaaaggagagacaattatgttcctgaggtctcagccttggatcaggagattattgaagtagatcctgacactaaggaaatgctgaagcttttggacttcggcagtctgtccaaccttcaggtcactcagcctacagttgggatgaatttcaaaacgcctcggggacctgtttgaattttttctgtagtgctgtattattttcaataaatctgggacaacagcaaaaaaaaaaaaaaaaaaaaaaaaaaaaaaaaaa

SEQ ID NO: 870 - protein, 135 aa, Homo sapiens [sequence omitted]

SEQ ID NO: 871 - DNA, 3029 bp, Homo sapiens
acatttaggagaaacagcggtgtctgcggctcccacccttcggggggcccgtggggggggcggtgtcaggggcatggacgccaccccccaggggtctctgctgccggctactctcctctccacgtgctcccctccaggacccccgacgccgcctaggcgcccagcgacgcgcggcaggtggcagcagctcgggcccccgccgcactccaggcgcccgcagcgctcgccctgacgcggccgccatggcgcaggagaacgcggccttctcgcccgggcaggaggagccgccgcggcgccgcggccgccagcgctacgtggagaaggatggccggtgcaacgtgcagcagggcaacgtgcgcgagacataccgctacctgacggacctgttcaccacgctggtggacctgcagtggcgcctcagcctgttgttcttcgtcctggcctacgcgctcacctggctcttcttcggcgccatctggtggctgatcgcctacggccgcggcgacctggagcacctggaggacaccgcgtggacgccgtgcgtcaacaacctcaacggcttcgtggccgccttcctcttctccatcgagaccgagaccaccatcggctacgggcaccgcgtcatcaccgaccagtgccccgagggcatcgtgctgctgctgctgcaggccatcctgggctccatggtgaacgccttcatggtgggctgcatgttcgtcaagatctcgcagcccaacaagcgcgcagccacgctcgtcttctcctcgcacgccgtggtgtcgctgcgcgacgggcgcctctgcctcatgttccgcgtgggcgacttgcgctcctcacacatagtggaggcctccatccgcgccaagctcatccgctcgcgccagacgctggagggcgagttcatcccgctgcaccagaccgacctcagcgtgggcttcgacacgggagacgaccgcctcttcctcgtctcgccgctggttatcagccacgagatcgacgccgccagccccttctgggaggcgtcgcgccgtgccctcgagagggacgacttcgagatcgtcgttatcctcgagggcatggtggaagccacgggaatgacatgccaagctcggagctcctacctggtagacgaggtgctgtggggccaccgcttcacgtcagtgctgactctggaggacggcttctacgaagtggactatgccagctttcacgagacttttgaggtgcccacaccttcgtgcagtgctcgagagctggcagaggctgccgcccgccttgatgcccatctctactggtccatccccagccggctggatgagaaggtggaggaggagggggcgggggagggggcgggtggggaagctggggctgacaaggagcagaatggctgcctgccacccccagagagtgagtccaaggtgtgaccagcttcctccagacccctgtggcagaccgggggccagacacagatacatggggaactgcatatcggaggtggtggaggaggaggaggaggaggaaggcaaagcccctggaaatgtgctaaagttggaaagtccccgtcccccagaacctcaagtctagaaaccagtatggaagggaggggtcctgatttcagggaaatggagggtggggccgggtgaaaatgccagtctgtgtttgaccttcacatttgttcatgagtggatggatggacagaatgatggacttttgggggttggatgggaagatggtagcagataaagacagctgacagatacatagatggaccagtagacaactggtccactcagggctgccactaacctgtagaacacccctgtgcaaattttaaaaaggaacccttttcctccagacagatacagccccaaaccagggtgcatggcttggggagcagagtataggatggattgcagtccccagtcacctcttctgccagcctccccacatatggcacaactgtctaatgacacggtaggccaagctgaagtgaaggagaaaggagccggaccaagatgggcacatgaggagggtgccctcctagctccaccctcaccaggatgaaggcgtgcaaggggctcagcaaggtgtgaatgaccttagtccgcaagttcagggaagcaggcagagcggggaggtgcctgagctggggcctggagaggggcctgggaaaggaaaaccagggatagctattttcttacagtggagtgagatcttacaggtatcaggcacaggcaggaagagagagagagaggttctggggaggaagggccaggagagagatctagaaagtgggttcactagagctgggaaacagggagcccctaggaaagcagtgtgtccttggggcacagtcattcacatcactgattgggtgccatgtggagtggacattcaaaaacctggttcctgtcctcaaaataaggggcacctgggaaaacagaggaatctacctgtggtgactgaacgagggataattcaaactgacaacctgtgcagtcccgtggagggtaggggagtgtgggtgatcagaaggctggggccagtgtaaggcatagggaatatgtaagtcaggagttagaaatctccagtgtgcgttggaatcacctggagggcttggtaaaacacagatttttgggctccactccaagggtttctgacccaagaggtggggaccaaaaccatgcattcctaagaagtccccaggtcatgctgctgttgctggactgaggaccacactttgagaacctgtgctctaagtgaatacttggaagtcgtttcaggacatggggcatagaaactgaggagtagctgagaggaagatgaagagaagctgagaagaagctgaggatcctcacaggagcagacagagaaatgtgaagggtggggttttatgtgtgggaaagggacccgaagcccaggctgaagagtttaactttgggcccagaaactcaaccatcaatggaaacagggcagtgacaagtggagggggtgtctggaagctgagcaggcccgacagagagatgaag

SEQ ID NO: 872 - protein, 393 aa, Homo sapiens
MAQENAAFSPGQEEPPRRRGRQRYVEKDGRCNVQQGNVRETYRYLTDLFTTLVDLQWRLSLLFFVLAYALTWLFFGAIWWLIAYGRGDLEHLEDTAWTPCVNNLNGFVAAFLFSIETETTIGYGHRVITDQCPEGIVLLLLQAILGSMVNAFMVGCMFVKISQPNKRAATLVFSSHAVVSLRDGRLCLMFRVGDLRSSHIVEASIRAKLIRSRQTLEGEFIPLHQTDLSVGFDTGDDRLFLVSPLVISHEIDAASPFWEASRRALERDDFEIVVILEGMVEATGMTCQARSSYLVDEVLWGHRFTSVLTLEDGFYEVDYASFHETFEVPTPSCSARELAEAAARLDAHLYWSIPSRLDEKVEEEGAGEGAGGEAGADKEQNGCLPPPESESKV

SEQ ID NO: 873 - DNA, 475 bp, Homo sapiens
acacatctgctcctgctctctctcctccagcgaccctagccatgagaaccctcaccatcctcactgctgttctcctcgtggccctccaggccaaggctgagccactccaagctgaggatgatccactgcaggcaaaagcttatgaggctgatgcccaggagcagcgtggggcaaatgaccaggactttgccgtctcctttgcagaggatgcaagctcaagtcttagagctttgggctcaacaagggctttcacttgccattgcagaaggtcctgttattcaacagaatattcctatgggacctgcactgtcatgggtattaaccacagattctgctgcctctgagggatgagaacagagagaaatatattcataatttactttatgacctagaaggaaactgtcgtgtgtcccatacattgccatcaactttgtttcctcatctcaaataaagtcctttcagcaaaaaaaaaaaa

SEQ ID NO: 874 - protein, 100 aa, Homo sapiens
MRTLTILTAVLLVALQAKAEPLQAEDDPLQAKAYEADAQEQRGANDQDFAVSFAEDASSSLRALGSTRAFTCHCRRSCYSTEYSYGTCTVMGINHRFCCL

SEQ ID NO: 875 - DNA, 843 bp, Homo sapiens
gcggagcgcggcggcaagatggcagtgcaaatatccaagaagaggaagtttgtcgctgatggcatcttcaaagctgaactgaatgagtttcttactcgggagctggctgaagatggctactctggagttgaggtgcgagttacaccaaccaggacagaaatcattatcttagccaccagaacacagaatgttcttggtgagaagggccggcggattcgggaactgactgctgtagttcagaagaggtttggctttccagagggcagtgtagagctttatgctgaaaaggtggccactagaggtctgtgtgccattgcccaggcagagtctctgcgttacaaactcctaggagggcttgctgtgcggagggcctgctatggtgtgctgcggttcatcatggagagtggggccaaaggctgcgaggttgtggtgtctgggaaactccgaggacagagggctaaatccatgaagtttgtggatggcctgatgatccacagcggagaccctgttaactactacgttgacactgctgtgcgccacgtgttgctcagacagggtgtgctgggcatcaaggtgaagatcatgctgccctgggacccaactggtaagattggccctaagaagcccctgcctgaccacgtgagcattgtggaacccaaagatgagatactgcccaccacccccatctcagaacagaagggtgggaagccagagccgcctgccatgccccagccagtccccacagcataacagggtctccttggcagctgtattctggagtctggatgttgctctctaaagacctttaataaaattttgtacaaagacaaaaaaaaaaaaaaa

SEQ ID NO: 876 - protein, 243 aa, Homo sapiens
MAVQISKKRKFVADGIFKAELNEFLTRELAEDGYSGVEVRVTPTRTEIIILATRTQNVLGEKGRRIRELTAVVQKRFGFPEGSVELYAEKVATRGLCAIAQAESLRYKLLGGLAVRRACYGVLRFIMESGAKGCEVVVSGKLRGQRAKSMKFVDGLMIHSGDPVNYYVDTAVRHVLLRQGVLGIKVKIMLPWDPTGKIGPKKPLPDHVSIVEPKDEILPTTPISEQKGGKPEPPAMPQPVPTA

SEQ ID NO: 877 - DNA, 729 bp, Homo sapiens
cttgcttcggacgccggattttgacgtgctctcgcgagatttgggtctcttcctaagccggcgctcggcaagttctcccaggagaaagccatgttcagttcgagcgccaagatcgtgaagcccaatggcgagaagccggacgagttcgagtccggcatctcccaggctcttctggagctggagatgaactcggacctcaaggctcagctcagggagctgaatattacggcagctaaggaaattgaagttggtggtggtcggaaagctatcataatctttgttcccgttcctcaactgaaatctttccagaaaatccaagtccggctagtacgcgaattggagaaaaagttcagtgggaagcatgtcgtctttatcgctcagaggagaattctgcctaagccaactcgaaaaagccgtacaaaaaataagcaaaagcgtcccaggagccgtactctgacagctgtgcacgatgccatccttgaggacttggtcttcccaagcgaaattgtgggcaagagaatccgcgtcaaactagatggcagccggctcataaaggttcatttggacaaagcacagcagaacaatgtggaacacaaggttgaaactttttctggtgtctataagaagctcacgggcaaggatgttaattttgaattcccagagtttcaattgtaaacaaaaatgactaaataaaaagtatatattcacagtaaaaaaaaaaaaaaaaaa

SEQ ID NO: 878 - protein, 194 aa, Homo sapiens [sequence omitted]

SEQ ID NO: 879 - DNA, 2325 bp, Homo sapiens
acctcattcatttctaccggtctctagtagtgcagcttcggctggtgtcatcggtgtccttcctccgctgccgcccccgcaaggcttcgccgtcatcgaggccatttccagcgacttgtcgcacgcttttctatatacttcgttccccgccaaccgcaaccattgacgccatgtcgggttattcgagtgaccgagaccgcggccgggaccgagggtttggtgcacctcgatttggaggaagtagggcagggcccttatctggaaagaagtttggaaaccctggggagaaattagttaaaaagaagtggaatcttgatgagctgcctaaatttgagaagaatttttatcaagagcaccctgatttggctaggcgcacagcacaagaggtggaaacatacagaagaagcaaggaaattacagttagaggtcacaactgcccgaagccagttctaaatttttatgaagccaatttccctgcaaatgtcatggatgttattgcaagacagaatttcactgaacccactgctattcaagctcagggatggccagttgctctaagtggattggatatggttggagtggcacagactggatctgggaaaacattgtcttatttgcttcctgccattgtccacatcaatcatcagccattcctagagagaggcgatgggcctatttgtttggtgctggcaccaactcgggaactggcccaacaggtgcagcaagtagctgctgaatattgtagagcatgtcgcttgaagtctacttgtatctacggtggtgctcctaagggaccacaaatacgtgatttggagagaggtgtggaaatctgtattgcaacacctggaagactgattgactttttagagtgtggaaaaaccaatctgagaagaacaacctaccttgtccttgatgaagcagatagaatgcttgatatgggctttgaaccccaaataaggaagattgtggatcaaataagacctgataggcaaactctaatgtggagtgcgacttggccaaaagaagtaagacagcttgctgaagatttcctgaaagactatattcatataaacattggtgcacttgaactgagtgcaaaccacaacattcttcagattgtggatgtgtgtcatgacgtagaaaaggatgaaaaacttattcgtctaatggaagagatcatgagtgagaaggagaataaaaccattgtttttgtggaaaccaaaagaagatgtgatgagcttaccagaaaaatgaggagagatgggtggcctgccatgggtatccatggtgacaagagtcaacaagagcgtgactgggttctaaatgaattcaaacatggaaaagctcctattctgattgctacagatgtggcctccagagggctagatgtggaagatgtgaaatttgtcatcaattatgactaccctaactcctcagaggattatattcatcgaattggaagaactgctcgcagtaccaaaacaggcacagcatacactttctttacacctaataacataaagcaagtgagcgaccttatctctgtgcttcgtgaagctaatcaagcaattaatcccaagttgcttcagttggtcgaagacagaggttcaggtcgttccaggggtagaggaggcatgaaggatgaccgtcgggacagatactctgcgggcaaaaggggtggatttaatacctttagagacagggaaaattatgacagaggttactctagcctgcttaaaagagattttggggcaaaaactcagaatggtgtttacagtgctgcaaattacaccaatgggagctttggaagtaattttgtgtctgctggtatacagaccagttttaggactggtaatccaacagggacttaccagaatggttatgatagcactcagcaatacggaagtaatgttccaaatatgcacaatggtatgaaccaacaggcatatgcatatcctgctactgcagctgcacctatgattggttatccaatgccaacaggatattcccaataagactttagaagtatatgtaaatgtctgtttttcataattgctctttatattgtgtgttatctgacaagatagttatttaagaaacatgggaattgcagaaatgactgcagtgcagcagtaattatggtgcactttttcgctatttaagttggatatttctctacattcctgaaacaatttttaggttttttttgtactagaaaatgcaggcagtgttttcacaaaagtaaatgtacagtgatttgaaatacaataatgaaggcaatgcatggccttccaataaaaaatatttgaagactgaaaaaaaaaa

SEQ ID NO: 880 - protein, 614 aa, Homo sapiens
MSGYSSDRDRGRDRGFGAPRFGGSRAGPLSGKKFGNPGEKLVKKKWNLDELPKFEKNFYQEHPDLARRTAQEVETYRRSKEITVRGHNCPKPVLNFYEANFPANVMDVIARQNFTEPTAIQAQGWPVALSGLDMVGVAQTGSGKTLSYLLPAIVHINHQPFLERGDGPICLVLAPTRELAQQVQQVAAEYCRACRLKSTCIYGGAPKGPQIRDLERGVEICIATPGRLIDFLECGKTNLRRTTYLVLDEADRMLDMGFEPQIRKIVDQIRPDRQTLMWSATWPKEVRQLAEDFLKDYIHINIGALELSANHNILQIVDVCHDVEKDEKLIRLMEEIMSEKENKTIVFVETKRRCDELTRKMRRDGWPAMGIHGDKSQQERDWVLNEFKHGKAPILIATDVASRGLDVEDVKFVINYDYPNSSEDYIHRIGRTARSTKTGTAYTFFTPNNIKQVSDLISVLREANQAINPKLLQLVEDRGSGRSRGRGGMKDDRRDRYSAGKRGGFNTFRDRENYDRGYSSLLKRDFGAKTQNGVYSAANYTNGSFGSNFVSAGIQTSFRTGNPTGTYQNGYDSTQQYGSNVPNMHNGMNQQAYAYPATAAAPMIGYPMPTGYSQ

SEQ ID NO: 881 - DNA, 4413 bp, Homo sapiens
agatccttccttctctcctccttcttcattctacaccacccccaacacatatccctgcaccccgcccattctttgctctctctcctttcttacacttaactccttcttgctccacagcctaacatgctgattaacaggaccccaaaggtttgggtgggtattaggggccttctcaacaaaagcagcacactcttgagcttgttcttccttttgttgccatctcagataaaaaggccccatgagggaggagacagataagtatagacttggtattctgataactctgtgttacatgggatcagatgtaaatgagttgtaccctgtggtgtttcatgctctgctgtgttgtcttctcatggtgagcttttctgtgcccttatttcatccagctctggtttctgtgtttcatgttatttctcctagcctctgtaaactctgcagcatactaataatgctctggctttctgattaaagataaatggcttactatcatcacccctggcttgagggccagctcacatgtaatcccttataggattccaaagttgttaaataaatgcagttctttttgtcattttgaagcattcaaaaatttttcaagaaaagctatgatcatataaatagaaattttatccagaatgttacagtgtagcatttgtgaataaatgtgtaggtgctgtatttgctcagactctagtttgggttgtgttttcttttccctttttttttttgagacggggtctctctctgtcatctgggctgcagtgcagtggtgtaatcacagctcactgcaacctctactcccaggctcaagcaatcctcctgagtagctgggactggagacatgcgccacaacgcccagctaatttttaggtttttctttcacatagacggggtctcactctgttggccaggctggtttcgaactcctggactcaagcagttccccccacctcagcctcctaaagtgctgggattacaggcctgagccaccatacccagcaagttatattttctttttccttatatagagtaaaataagggtgagtgaccgagaggttgatgcatagctagatcaccagtttaaatgccttcccacacacccctttcctcctgttccctccacctacaggttgtagatgagcatgagagtgtggagcagagttggcgagtgcaagtcgagcccatcaacctggacagctgtctccgtgctttcaccagtgaggaagagctaggggaagatgagatatactactgttccaagtgtaagacccactgctttagcaacaaagaagctggatctctggaggcttccacccttcctgattattcaccttaagcgatttcaatttgtaaatgatcagtggataaaatcacagaaaattgtcaaatttcctcgggaaagttttgatccgagtgcttttttggtaccacgagacccggctctctgccagcatcaaccactcacaccccagggggatgagctctccaagcccaggattctggcaagagaggtgaagaaagtggatgtgcagagtttggctggggaagaggacatgctcctgagcaaaagcccatcctcactcagcgctaacatcagcagcagcccaaaaggttctccttcttcatcaagaaaaagtggaaccagctgtccctccagcaaaaacagcagccctaatagctgcccacggactttggggaggagcaaagggaggctccggctgccccagattggcagcaaaaataaactgtcaagtagtaagaagaacttggatgccagcaaagagaatggggctgagcagatctgtgagctggctgatgccttgagtcgagggcatatgcgggggggcagccaaccagagctggtcactcctcaggaccacgaggtagctttgggcaatggattcctttatgagcatgaagcatatggcaatggctacagcaatggtcagcttggaaaccacagtgaagaagacagcactgatgaccaaagagaagacactcatattaagcctatttataatctatatgcaatttcatgccattcaggaattctgagtgggggccattacgtcacttatgccaaaaacccaaactgcaagtggtactgctacaatggcagcatctgtgaggaacatcaccctgatgaaattgacaccgactctgcctacattcttttctatgagcagcagaggatagactacgcacaatttctgccaaagattgatggcaaaaagatggcagacacaagcagtatggatgaagactttgagtctgattacgaaaagtactgtgtgttacagtaaagctaccactctggctgctagatagcttggtggggagggagatgactccttgtagctgatacttggcaaaagtgtcactgagaggcaagctaaatgtagttattttatcctgttagaatacaaattctaattaaaatagttaactttaagagtagtagtaattttattttgaagtctcatgcaagttgtctgatagagaactttcaggcagatcccaccattagcctgtaaacaaaaagtttggcaccagccacctgggaccaaataagaattcaattgtgcttgtccagatatgaacaaatatgtagtgagtatagagtttatcaataatcataacaaatattaaagatttccttggagtcaaagtaaaaaacaaaaaattgtaatgttgtctagggatgacatgatatgctacctcctttttcctgaagttttattccattctgttgacaagatggagaaagcaagatcatgaaggtgtgcaaatgattcttacggcatgggcgaggatttttcaatttattttttaaagtttccataccctttctttgtctttcttgctttttgtttttgccgttgtgtttatgtttgagatacaaccagtcattggtggcaggggcatagagtggtcagtctgaaagggaggctctcttaagagctatgtgccttccacccagagggagacccagtagaaagaaaaacatcctgggaaatccagctaccatggccctcccagtggaggcatcttacatttaggatacttcaggtatcctcagaaatgtattctgcaccccccggccccgcccatgctgagggaaggggagcagttgccaatatttgcaccatcttcacatgcacatgttgcaacaagagcttctgggaaggtaagcggcatcggagctagatcacgtttcacaattagtggtggttcttttccatgtttgttttgcactttaaaaaagagagaacacatgcaaatgaacttgcttgtgtgtatttgatggctccaagggctataaattacaaacaaaacacatcccagacattaggagttcataagtatatttaatgaaattggtggttttaggaagtcaactttagttttgctttgtttgcatgtccactaatttttttattttgatattagtcttttttaaaaaattttacagtagtcattgaaagttatgtttctttgtttacttcattttttcctctaaatattcaagactgggacaaaagtataaatattatttatttcaggtagaatttttttggtgtagttttttaatatatacttgaaggaaatgtttcaccttatttttggtctttgtttattcatttagaccctgcaagttgattctcattaattgtcagattccactacactttcttcctcataggtagtaattaccagtgtaactaagcatttgtgttctgatatctgaggccagtaactattaatatctagttctcagagcatttggaaaggttatcttaaatggctacctaaattgaaatccttttcagaaaaaatataattgcaaataggtaggagtggcctaaattatctaatgtaataaagtcagacaaaatgcatactttatagttcaagattttcggtatataaaatctgtcctttcctacctggacatgtcccattaaaaagtggaagattttaaataatttctttacagatgttttatttaagcaggtagcacaatctactaatgttgtttgatctgtgtttgttatactggttgtaattaatttttttaattcatgaactagcggaaaatttattaaattaactattaaccacattcaccttgtaaatgactgtataaaacttgttgacaatgcactgactttagaaagatgttaatgtgcataaatagagtgtaaataaaatagtgttgatgtactgaaatatgaactgtataaaaagtattagtaattgtatatggggtgtacctgtttatctgtaactgttatccaaacaaattaaatactgtggatgcctttaaaaaaaaaaaaaaaaaaaaaaaaaaaaaaaaaaaaaaaaaaaaaaaaaaaaaaaaaaaaaaaaaaaaaaaaaaaaaaaaaaaaa

SEQ ID NO: 882 - protein, 354 aa, Homo sapiens
MRYTTVPSVRPTALATKKLDLWRLPPFLIIHLKRFQFVNDQWIKSQKIVKFPRESFDPSAFLVPRDPALCQHQPLTPQGDELSKPRILAREVKKVDVQSLAGEEDMLLSKSPSSLSANISSSPKGSPSSSRKSGTSCPSSKNSSPNSCPRTLGRSKGRLRLPQIGSKNKLSSSKKNLDASKENGAEQICELADALSRGHMRGGSQPELVTPQDHEVALGNGFLYEHEAYGNGYSNGQLGNHSEEDSTDDQREDTHIKPIYNLYAISCHSGILSGGHYVTYAKNPNCKWYCYNGSICEEHHPDEIDTDSAYILFYEQQRIDYAQFLPKIDGKKMADTSSMDEDFESDYEKYCVLQ

SEQ ID NO: 883 - DNA, 1494 bp, Homo sapiens
ctcgcgaaagggcaggcatcgcggggctggccacttccgtacttccgctttccggcccagccagcgcccgcgatgactgccactctccgcccctacctgagtgccgtgcgggccacattgcaggctgccctctgcctggagaacttctcctcccaggttgtggaacgacacaacaagccggaagtggaagtcaggagtagcaaagagctcctgttacaacctgtgaccatcagcaggaatgagaaggaaaaggttctgattgagggctccatcaactctgtccgggtcagcattgctgtgaaacaggctgatgagatcgagaagattttgtgccacaagttcatgcgcttcatgatgatgcgagcagagaacttctttatccttcgaaggaagcctgtggaggggtatgatatcagctttctgatcaccaacttccacacagagcagatgtacaaacacaagttggtggactttgtgatccacttcatggaggagattgacaaggagatcagtgagatgaagctgtcagtcaatgcccgtgcccgcattgtggctgaagagttccttaagaatttttaaaccatctggctggatctcgtggccttccccctcagactacccatgtctccacgaaggcgtcctggagtcactccccgagcagcgcggcggcggcagggagttgggttggggtgggcatttgatgcgggaggtgggtggtgtgcttgctagctgggcaagaaagcagcagtggacctgccccaaggccacacgtgcctggtcaggctggcttctgatgttcagtcccctgggccgggacagattttttttaacgtcttgaaacttaaactctgtgcttgtaggatactgtaacctttttgtctttttttttttttttttttttaaacctccacctccagtggctgtgactggtcccagtgattatacgttattggttgctgtgggtctgggcgggcctggagccagaaggcgacttattttttctctcctatgccaccccaggtggggagggagggaggtttcagactccagtttctcccttgcccttttattcccaagcctccttggccccagtataagtgttgggaactctctgccagcttcctgagttctgcctaaagatggccccccagcactggttggggacaagggccaaattggtgaccaccagtcatgcctaggacctggggcccaaaagccgggcaacctctggctacaggggccattgggtgccctcccagttgagaggggccgctgtttcgccttgtccgtcagtgccagtgcctgtgccagaggtggcgaggtgagtcctccagagcttcctggccgggccctcctcctgcctgttctggctcctctgctcccacgctagctgtcccttttctgattctggtggatcctccctcccctaattaaagtctctttttgcccctttggggctgcatgaaaaaaaaaaaaaaaaaaaaaaaaaaaaaa

SEQ ID NO: 884 - protein, 168 aa, Homo sapiens
MTATLRPYLSAVRATLQAALCLENFSSQVVERHNKPEVEVRSSKELLLQPVTISRNEKEKVLIEGSINSVRVSIAVKQADEIEKILCHKFMRFMMMRAENFFILRRKPVEGYDISFLITNFHTEQMYKHKLVDFVIHFMEEIDKEISEMKLSVNARARIVAEEFLKNF

SEQ ID NO: 885 - DNA, 5301 bp, Homo sapiens
gcggccgccccggctcctcgcctcccccacttctggccacccctcgccggtgagagaagagaacgcgagaagggaagatgggggccgtcctgaggagcctcctggcctgcagcttctgtgtgctcctgagagcggcccctttgttgctttatgcaaacagacgggacttgcgattggttgatgctacaaatggcaaagagaatgctacgattgtagttggaggcttggaggatgcagctgcggtggactttgtgtttagtcatggcttgatatactggagtgatgtcagcgaagaagccattaaacgaacagaatttaacaaaactgagagtgtgcagaatgttgttgtttctggattattgtcccccgatgggctggcatgtgattggcttggagaaaaattgtactggacagattctgaaactaatcggattgaagtttctaatttagatggatctttacgaaaagttttattttggcaagagttggatcaacccagagctattgccttagatccttcaagtgggttcatgtactggacagactggggagaagtgccaaagatagaacgtgctggaatggatggttcaagtcgcttcattataataaacagtgaaatttactggccaaatggactgactttggattatgaagaacaaaagctttattgggcagatgcaaaacttaatttcatccacaaatcaaatctggatggaacaaatcggcaggcagtggttaaaggttcccttccacatccttttgccttgacgttatttgaggacatattgtactggactgactggagcacacactccattttggcttgcaacaagtatactggtgagggtctgcgtgaaatccattctgacatcttctctcccatggatatacatgccttcagccaacagaggcagccaaatgccacaaatccatgtggaattgacaatgggggttgttcccatttgtgtttgatgtctccagtcaagcctttttatcagtgtgcttgccccactggggtcaaactcctggagaatggaaaaacctgcaaagatggtgccacagaattattgcttttagctcgaaggacagacttgagacgcatttctttggatacaccagattttacagacattgttctgcagttagaagacatccgtcatgccattgccatagattacgatcctgtggaaggctacatctactggactgatgatgaagtgagggccatacgccgttcatttatagatggatctggcagtcagtttgtggtcactgctcaaattgcccatcctgatggtattgctgtggactgggttgcacgaaatctttattggacagacactggcactgatcgaatagaagtgacaaggctcaatgggaccatgaggaagatcttgatttcagaggacttagaggaaccccgggctattgtgttagatcccatggttgggtacatgtattggactgactggggagaaattccgaaaattgagcgagcagctctggatggttctgaccgtgtagtattggttaacacttctcttggttggccaaatggtttagccttggattatgatgaaggcaaaatatactggggagatgccaaaacagacaagattgaggttatgaatactgatggcactgggagacgagtactagtggaagacaaaattcctcacatatttggatttactttgttgggtgactatgtttactggactgactggcagaggcgtagcattgaaagagttcataaacgaagtgcagagagggaagtgatcatagatcagctgcctgacctcatgggcctaaaggctacaaatgttcatcgagtgattggttccaacccctgtgctgaggaaaacgggggatgtagccatctctgcctctatagacctcagggccttcgctgtgcttgccctattggctttgaactcatcagtgacatgaagacctgcattgtcccagaggctttccttttgttttcacggagagcagatatcagacgaatttctctggaaacaaacaataataatgtggctattccactcactggtgtcaaagaagcttctgctttggattttgatgtgacagacaaccgaatttattggactgatatatcactcaagaccatcagcagagcctttatgaatggcagtgcactggaacatgtggtagaattcggcttagattatccagaaggcatggcagtagactggcttgggaagaacttgtactgggcagacacaggaacgaatcgaattgaggtgtcaaagttggatgggcagcaccgacaagttttggtgtggaaagacctagatagtcccagagctctcgcgttggaccctgccgaaggatttatgtattggactgaatggggtggaaaacctaagatagacagagctgcaatggatggaagtgaacgtactaccttagttccaaatgtggggcgggcaaacggcctaactattgattatgctaaaaggaggctttattggacagacctggacaccaacttaatagaatcttcaaatatgcttgggctcaaccgtgaagttatagcagatgacttgcctcatccttttggcttaactcagtaccaagattatatctactggacggactggagccgacgcagcattgagcgtgccaacaaaaccagtggccaaaaccgcaccatcattcagggccatttggattatgtgatggacatcctcgtctttcactcatctcgacagtcagggtggaatgaatgtgcttccagcaatgggcactgctcccacctctgcttggctgtgccagttgggggttttgtttgtggatgccctgcccactactctcttaatgctgacaacaggacttgtagtgctcctacgactttcctgctcttcagtcaaaagagtgccatcaaccgcatggtgattgatgaacaacagagccccgacatcatccttcccatccacagccttcggaatgtccgggccattgactatgacccactggacaagcaactctattggattgactcacgacaaaacatgatccgaaaggcacaagaagatggcagccagggctttactgtggttgtgagctcagttccgagtcagaacctggaaatacaaccctatgacctcagcattgatatttacagccgctacatctactggacttgtgaggctaccaatgtcattaatgtgacaagattagatgggagatcagttggagtggtgctgaaaggcgagcaggacagacctcgagccattgtggtaaacccagagaaagggtatatgtattttaccaatcttcaggaaaggtctcctaaaattgaacgggctgctttggatgggacagaacgggaggtcctctttttcagtggcttaagtaaaccaattgctttagcccttgatagcaggctgggcaagctcttttgggctgattcagatctccggcgaattgaaagcagtgatctctcaggtgctaaccggatagtattagaagactccaatatcttgcagcctgtgggacttactgtgtttgaaaactggctctattggattgataaacagcagcaaatgattgaaaaaattgacatgacaggtcgagagggtagaaccaaagtccaagctcgaattgcccagcttagtgacattcatgcagtaaaggagctgaaccttcaagaatacagacagcacccttgtgctcaggataatggtggctgttcacatatttgtcttgtaaagggggatggtactacaaggtgttcttgccccatgcacctggttctacttcaagatgagctatcatgtggagaacctccaacatgttctcctcagcagtttacttgtttcacgggggaaattgactgtatccctgtggcttggcggtgcgatgggtttactgaatgtgaagaccacagtgatgaactcaattgtcctgtatgctcagagtcccagttccagtgtgccagtgggcagtgtattgatggtgccctccgatgcaatggagatgcaaactgccaggacaaatcagatgagaagaactgtgaagtgctttgtttaattgatcagttccgctgtgccaatggtcagtgcattggaaagcacaagaagtgtgatcataatgtggattgcagtgacaagtcagatgaactggattgttatccgactgaagaaccagcaccacaggccaccaatacagttggttctgttattggcgtaattgtcaccatttttgtgtctggaactgtatactttatctgccagaggatgttgtgtccacgtatgaagggagatggggaaactatgactaatgactatgtagttcatggaccagcttctgtgcctcttggttatgtgccacacccaagttctttgtcaggatctcttccaggaatgtctcgaggtaaatcaatgatcagctccctcagtatcatggggggaagcagtggacccccctatgaccgagcccatgttacaggagcatcatcaagtagttcttcaagcaccaaaggcacttacttccctgcaattttgaaccctccaccatccccagccacagagcgatcacattacactatggaatttggatattcttcaaacagtccttccactcataggtcatacagctacaggccatatagctaccggcactttgcaccccccaccacaccctgcagcacagatgtttgtgacagtgactatgctcctagtcggagaatgacctcagtggcaacagccaagggctataccagtgacttgaactatgattcagaacctgtgcccccacctcccacaccccgaagccaatacttgtcagcagaggagaactatgaaagctgcccaccttctccatacacagagaggagctattctcatcacctctacccaccgccaccctctccctgtacagactcctcctgaggaggggccctcctcctctgactgcctccaacgtaaaaatgtaaatataaatttggttgagatctggagggggggagggagctattagagaaggatgaggcagaccatgtacagttaaaattataaaatggggtagggaatactggagatatttgtacagaagaaaaggatatttatatattttcttaaaacagcagatttgctgcttgtgccataaaagtttgtataaaaaaaatttgtactaaaagttttatttttgcaaactaaatacacaaagcatgccttaaacccagtgaagcaactgagtacaaaggaaacaggaataataaaggcatcactgaccaggaatatctgggctttattgataccaaaaaaaaaaaaa

SEQ ID NO: 886 - protein, 1613 aa, Homo sapiens
MGAVLRSLLACSFCVLLRAAPLLLYANRRDLRLVDATNGKENATIVVGGLEDAAAVDFVFSHGLIYWSDVSEEAIKRTEFNKTESVQNVVVSGLLSPDGLACDWLGEKLYWTDSETNRIEVSNLDGSLRKVLFWQELDQPRAIALDPSSGFMYWTDWGEVPKIERAGMDGSSRFIIINSEIYWPNGLTLDYEEQKLYWADAKLNFIHKSNLDGTNRQAVVKGSLPHPFALTLFEDILYWTDWSTHSILACNKYTGEGLREIHSDIFSPMDIHAFSQQRQPNATNPCGIDNGGCSHLCLMSPVKPFYQCACPTGVKLLENGKTCKDGATELLLLARRTDLRRISLDTPDFTDIVLQLEDIRHAIAIDYDPVEGYIYWTDDEVRAIRRSFIDGSGSQFVVTAQIAHPDGIAVDWVARNLYWTDTGTDRIEVTRLNGTMRKILISEDLEEPRAIVLDPMVGYMYWTDWGEIPKIERAALDGSDRVVLVNTSLGWPNGLALDYDEGKIYWGDAKTDKIEVMNTDGTGRRVLVEDKIPHIFGFTLLGDYVYWTDWQRRSIERVHKRSAEREVIIDQLPDLMGLKATNVHRVIGSNPCAEENGGCSHLCLYRPQGLRCACPIGFELISDMKTCIVPEAFLLFSRRADIRRISLETNNNNVAIPLTGVKEASALDFDVTDNRIYWTDISLKTISRAFMNGSALEHVVEFGLDYPEGMAVDWLGKNLYWADTGTNRIEVSKLDGQHRQVLVWKDLDSPRALALDPAEGFMYWTEWGGKPKIDRAAMDGSERTTLVPNVGRANGLTIDYAKRRLYWTDLDTNLIESSNMLGLNREVIADDLPHPFGLTQYQDYIYWTDWSRRSIERANKTSGQNRTIIQGHLDYVMDILVFHSSRQSGWNECASSNGHCSHLCLAVPVGGFVCGCPAHYSLNADNRTCSAPTTFLLFSQKSAINRMVIDEQQSPDIILPIHSLRNVRAIDYDPLDKQLYWIDSRQNMIRKAQEDGSQGFTVVVSSVPSQNLEIQPYDLSIDIYSRYIYWTCEATNVINVTRLDGRSVGVVLKGEQDRPRAIVVNPEKGYMYFTNLQERSPKIERAALDGTEREVLFFSGLSKPIALALDSRLGKLFWADSDLRRIESSDLSGANRIVLEDSNILQPVGLTVFENWLYWIDKQQQMIEKIDMTGREGRTKVQARIAQLSDIHAVKELNLQEYRQHPCAQDNGGCSHICLVKGDGTTRCSCPMHLVLLQDELSCGEPPTCSPQQFTCFTGEIDCIPVAWRCDGFTECEDHSDELNCPVCSESQFQCASGQCIDGALRCNGDANCQDKSDEKNCEVLCLIDQFRCANGQCIGKHKKCDHNVDCSDKSDELDCYPTEEPAPQATNTVGSVIGVIVTIFVSGTVYFICQRMLCPRMKGDGETMTNDYVVHGPASVPLGYVPHPSSLSGSLPGMSRGKSMISSLSIMGGSSGPPYDRAHVTGASSSSSSSTKGTYFPAILNPPPSPATERSHYTMEFGYSSNSPSTHRSYSYRPYSYRHFAPPTTPCSTDVCDSDYAPSRRMTSVATAKGYTSDLNYDSEPVPPPPTPRSQYLSAEENYESCPPSPYTERSYSHHLYPPPPSPCTDSS

SEQ ID NO: 887 - DNA, 4658 bp, Homo sapiens
ggaattccgggaggagcggacgtcggcttctccccgcgggagcccccagcatggttgactatattgtggagtatgactatgatgctgtacatgatgatgaattaactattcgagttggagaaatcatcaggaatgtgaaaaagctacaggaggaagggtggctggaaggagaactaaatgggagaagaggaatgttccctgacaatttcgttaaggaaattaaaagagagacggaattcaaggatgacagtttgcccatcaaacgggaaaggcatgggaatgtagcaagtcttgtacaacgaataagcacctatggacttccagctggaggaattcagccacatccacaaaccaaaaacattaagaagaagaccaagaagcgtcagtgtaaagttctttttgagtacattccacaaaatgaggatgaactggagctgaaagtgggagatattattgatattaatgaagaggtagaagaaggctggtggagtggaaccctgaataacaagttgggactgtttccctcaaattttgtgaaagaattagaggtaacagatgatggtgaaactcatgaagcccaggacgattcagaaactgttttggctgggcctacttcacctataccttctctgggaaatgtgagtgaaactgcatctggatcagttacacagccaaagaaaattcgaggaattggatttggagacatttttaaagaaggttctgtgaaacttcggacaagaacatccagtagtgaaacagaagagaaaaaaccagaaaagcccttaatcctacagtcactgggacccaaaactcagagtgtggagataacaaaaacagataccgaaggtaaaattaaagctaaagaatattgtagaacattatttgcctatgaaggtactaatgaagatgaacttacttttaaagagggggagataatccatttgataagtaaggagactggagaagctggctggtggaggggcgaacttaatggtaaagaaggagtatttccagacaattttgctgtccagataaatgaacttgataaagactttccaaaaccaaagaaaccaccacctcctgctaaggctccagctccaaagcctgaactgatagctgcagagaagaaatatttttctttaaagcctgaagaaaaggatgaaaaatcaacactggaacagaaaccttctaaaccagcagctccacaagtcccacccaagaaacctactccacctaccaaagccagtaatttattgagatcttctggaacagtgtacccaaagcgacctgaaaaaccagttcctccaccacctcctatagccaagattaatggggaagtttctagcatttcatcaaaatttgaaactgagccagtatcaaaactaaagctagattctgaacagctgccccttagaccaaaatcagtagactttgattcacttacagtaaggacctccaaagaaacagatgttgtaaattttgatgacatagcttcctcagaaaacttgcttcatctcactgcaaatagaccaaagatgcctggaagaaggttgccgggccgtttcaatggtggacattctccaactcacagccccgaaaaaatcttgaagttaccaaaagaagaagacagtgccaacctgaagccatctgaattaaaaaaagatacatgctactctccaaagccatctgtgtacctttcaacaccttccagtgcttctaaagcaaatacaactgctttcctgactccattagaaatcaaagctaaagtggaaacagatgatgtgaaaaaaaattccctggatgaacttagagcccagattattgaattgttgtgcattgtagaagcactgaaaaaggatcacgggaaagaactggaaaaactgcgaaaagatttggaagaagagaagacaatgagaagtaatctagagatggaaatagagaagctgaaaaaagctgtcctgtcttcttgagtggtgtggacctggtgttcataatgttccagggattcagaagcaacgctatgaacttcagctgacttgttacttaaaaattgtgaattctgttgttgtgataaatatgagcaaatgaagtgtaatatctatagaaaagtagagtgagggtgaatttatatatatattttgttttgccaatatgaagaaaaagaggccttatttcttaactgtgctgggattgcaaacactttttaaaaaattgtttgcttgaaaatactactgaatataaataagaatgtgctcagtagtttttttattgaaacttgtattatttttaaagagatctatactataaatatggtgatatatttacaagtaatctgtaagatatactatttgagagggacagattagccttttagtaactatagtcactactttttccataatgcataagggatataaactctgtgtgtgtgtgtgtgtgtgtgtgtgtgtgtgtgtgtgtatatatatatatatatttttacttttatcctcttaccgaaggttacactgttgtgcctgtttgtctgcaatgctgtttatattttgggtgatgaaataggagtttcctagctatataaaccagattactcacccatgcatatagtaagaactaatgaataatcaaaataatttcatcaacttttagaatattttatgttgcttgcactataggagtcataaaaggaacttagttaaaatatgttggattgttaaacatttggggaaatatgaactgtattttaaatttgttaggtctgaaaaatctaaaactgttaatttaacccttaacttgtgcctagaaactacagcacatataaaatatgtaaacaccagcctgttgctgtacttttctgcttattttacagcctcaaatatttctcattatcttgtcacttagttcttcatgtttctccttctgacttttaataatggtaataggaaaacaaaacccaaagcttttcaaacttcagtgtgaggtttcctattttgacaagttaacttgtaaatactcaggttttacgatgtataatttacctaatagaccaaactaactcatggagatattttgaactattatttaggtacaaactttataaagaatgttagtatgtcataaaatataacattacagcttatttaaaaccaaatatattgaacatattttaaaatacatttcacagaatggatgaattagttgtttcttcaaaagttacttatgaacagttgaatgcctttaaaatgttctgtctgtaggtacatctaaaaacacaagtgggtttatttaaatttttaaaatttgaaattttttatttgccaaaaattgttttatgctttattatatcgcaaatgagtgtcagatttttgagtaccaatgatcatgcttccattttttttagttttaaaccaccaaaccaatatttttcctttaaattttaatcttataatatagaaatcttatgttaatgaaattttgtcatgtttcaaataaagaaaactgaagtagaaaatagaaatgccagtaaacaacataatgtttaatttacaacttacattaggggtttgggggaatgctaattatatattgagaatatacattagaactcttcaaaatgggctcttctaatgaggtcactactgaacaaaattgttccctcttctgttaaatagaataggtttaaatgactagtcaaatgaattattttctccttgttaaataaattaaatcttactttcttttaatgaccaaccttaggtaaaacaaaaatattgtaatcctagaaattatcctccagctttctcacctgaaaatctattgaagtgatccctggtcatcctaataatgggatgagggaagtttccagcagatttcaggctgttcttaaagtttttgttggtcattttctcaatagtacatgaaatcaagatgcttatgagcatggaaatgtatttaaagtttttgcttgtgtcctcctcagtcagaatagaaaagtaactgaaatactcttacctttctgtccttgataaaatagtaaagaaaaccaaacaaacccaggcctgatgggaaaaatgattcctttattctagcaattactttctgttggtatgggaaatgttattaatttctattactaaagttcatatcacaaaatgatatttaataataaccttggggtaaatcatgaatttttttttctacgtgtgagtataaaagacaaaagttgaacagcatggaatcttcattgccaaattattagtgaatgtatagttcaggtattctttgagacacacagtatcattaatttccgaattgtatttcagtgttattttttgtttgtgaccactaagcttctgtcttaatacaaagctgttaccttctacagaatttaagtctgaagatgtaaagagagaacaggccttgtgtaacagaagatactcttttttatgctccttactgtgatcacagaaaaattaaaaatccaagtgctctctagatttgttgataaacattttatgcttgcatttaaacttgaaatgtatgagcagaatgagacaatcagttaaatcagaaatgagaagtattataatgtaaaggccttgttttgctgtagcaataaaatgaccaagtgcaatgacttgatttaataaaatccggaattc

SEQ ID NO: 888 - protein, 639 aa, Homo sapiens
MVDYIVEYDYDAVHDDELTIRVGEIIRNVKKLQEEGWLEGELNGRRGMFPDNFVKEIKRETEFKDDSLPIKRERHGNVASLVQRISTYGLPAGGIQPHPQTKNIKKKTKKRQCKVLFEYIPQNEDELELKVGDIIDINEEVEEGWWSGTLNNKLGLFPSNFVKELEVTDDGETHEAQDDSETVLAGPTSPIPSLGNVSETASGSVTQPKKIRGIGFGDIFKEGSVKLRTRTSSSETEEKKPEKPLILQSLGPKTQSVEITKTDTEGKIKAKEYCRTLFAYEGTNEDELTFKEGEIIHLISKETGEAGWWRGELNGKEGVFPDNFAVQINELDKDFPKPKKPPPPAKAPAPKPELIAAEKKYFSLKPEEKDEKSTLEQKPSKPAAPQVPPKKPTPPTKASNLLRSSGTVYPKRPEKPVPPPPPIAKINGEVSSISSKFETEPVSKLKLDSEQLPLRPKSVDFDSLTVRTSKETDVVNFDDIASSENLLHLTANRPKMPGRRLPGRFNGGHSPTHSPEKILKLPKEEDSANLKPSELKKDTCYSPKPSVYLSTPSSASKANTTAFLTPLEIKAKVETDDVKKNSLDELRAQIIELLCIVEALKKDHGKELEKLRKDLEEEKTMRSNLEMEIEKLKKAVLSS

SEQ ID NO: 889 - DNA, 4617 bp, Homo sapiens
aaagaagcagaagcgtttgcttattatcgccggacacacactgccaatgagcggcggcggcgtggtgaaatgagggatctctttgagaaattaaagatcacattgggattacttcattcttccaaggtttccaaaagtctcattcttactcgagccttcagtgaaattcagggactaacagatcaggcagacaaattgataggacagaaaaatctcctgactcgaaaacggaatattctgatacggaaagtatcgtctctttcaggtaagacagaagaagtggtcctgaagaagctagagtatatttatgcaaaacagcaagcactagaggcacaaaaaagaaaaaagaagatgggatcagatgagtttgacatatctcccagaattagcaaacagcaggaaggatcttctgcatcatctgtagatcttggacagatgtttataaataacaggagggggaaacctttgattctttccagaaaaaaagaccaggccacagaaaatacctcacccttgaacactccacacacctctgccaaccttgtgatgactccgcaagggcaattgctcaccctaaaaggtcccctattctcaggaccagtggtagctgtttctcctgatctcttagaatctgatcttaagcctcaagttgccggtagtgctgtggctctaccagaaaatgacgacttatttatgatgccacgaattgttaatgtgacatcattggccacagagggaggtttggtagatatgggtggcagcaaatatcctcatgaagttcctgatagcaagccatctgaccatctgaaagacaccgtcaggaatgaagataattccttagaggataagggtagaatctcttccagaggaaacagagatggcagagtgacgttgggtccaacgcaggtttttctggcaaacaaagattctggttatccacaaatagttgacgtttccaatatgcagaaagcacaagagttcttacctaaaaagatttctggtgatatgagagggattcagtataaatggaaagagagtgaatcaagaggggagagagtgaagtcaaaggattcttcatttcataaattaaagatgaaagatctcaaggactcaagcatagagatggaactgaggaaagtaacatcagctatagaggaagcagctcttgattccagtgaactgctgactaacatggaagatgaggatgatactgatgagacactgacttcactgctcaatgaaattgcctttcttaatcaacaactaaatgatgactctgttggcctggctgaactacccagctctatggatacagagttcccaggggatgctcggcgggcttttattagtaaggttcctcctggaagcagagcaactttccaggttgagcacttgggaactggtttgaaagagttgcctgatgttcaaggggagagtgactctatcagtcccctcctcttgcacttggaagacgatgacttttctgagaatgaaaaacaacttgcagaaccagcctctgagccagatgtccttaagattgttattgactctgaaataaaggattccctcctttccaacaagaaagctattgatggagggaagaatacttctggcctccctgcagagcccgaaagtgtgtcctcaccccccaccctacacatgaagactggcttggagaacagcaacagcacagacactttgtggaggcctatgccaaagttggcccctctaggtttaaaagtagctaatccttccagtgatgcagatggtcagagtctcaaggtgatgccttgtttggcacctatagctgccaaagttgggtcagttggacacaaaatgaacttaacagggaatgaccaggaaggccgggaaagcaaggtgatgcctacattggcacctgttgtggctaaattgggcaactcgggggcctcaccaagttctgcagggaaatgaacttacttgtccttaagcagaagccaggctgtgaggggaaatagatctcacctcctttctctgcaggcatctgtttgtttgtgtcttagaacttggatccttgacttcaatgatgcagtggataatgatgggagaaagggggtagggtgctgaccctggtataagaagtactctgaaattctgatcatgttaaaatgtgttacctcacttgtggtgctgggtcccctcatcctctctaagaagatgtgatccattactgaacatgaggtgcccctcttacccaaggaatttataacatgactctggctccacagtggtttctagttcttcccccacaagcgaaagagctgtttgcaactttggagttgctgtagactgaactgtagcttgtagctgttgaattaagtccaaaatctaaggaatgcgatggacttgtgcaaagggatccagaagagacactttttagttgatgtttcaagaatagggagagagaggatgggtaccatggaataccaaagtgaaggactttgtgtcattcagtaaaattttcttttttcatatcctaagtagctcccattccctcaccttttcaatcagaattaacaaattcaagccttcagtaaagtagggatgcttttaacttttattattaattattttgagatcttaaaaaaatagtagttctcccttattatttttgtgggcattgaaaagctcatttcacagtaccagagatttttactgggagtatatattttggaggtaggcatagagggagccctaccccttccacaaattacgttactcaagagacagctaaaataaaatgcattatctccccagaccagagacagtggccaaaataaaaaatcatggggctggaaatttcccaaatcaaaccagcctcctggtgcttgaaggtttcattcactattacctgcacaggatgtaaagaaaagtcacagtaggcactctttaccagggaaataaggcagtatttgaatcacaagatatattttttatctgcaaccatggatccaatgatctgtagagctttttcactcattaactgtcaggatatgaaggactgacagtctgtaaagatatttatatttttgtatagttgttttcatagatttctcaaaggctgaagttttcaacctagaagatgagatttgtattgagtatagaaatgatgtttcctatctagtttgtaaataatcatggtgcacttgaggggtctcttggaaactcctagggggtcaagaatcactattctgaaactgtatagactgggatttagctgctgcattttgcctttcttaaataattatattttggaatgtaacccctgttctgtcttcattgacaggatttgcttgtgttgttaaaacactaacacaagagcttccagtgcctgggccgtgcctaggtgatgctatttcttctatatctcctgtcttctttatcccaaatcccactcagcatatcttcagacctaggttgtaagaccaactttggattggatctagccagtgaattattatttccatggttggttccctttctgttaactctggtaatcaacagattgaaaacggtggaagaacttcttctgaaaattgcagtgggagcaaattcttgttggttttgtgctgcttgcctttctagatctgctcatcagcacttaaccttccctcctctaaaggttactaaagaagcctgaagtaggtaaagagtgctcctcagcttcttatccttccactctttacccagcagatttcattcaatgccttagccaaggagtccagcacctgtctcccctgctaataattgtccttagagatgctagtactttaatccaggtatagcagtttcccgttattttcttgcttgtcgttcccctacatttcctcctgatttcccaagactctctttgtggcttttgagggtcagccaaggagcaggcaagtgagtgaacaatcctcaggaaaagaaggaccattttagcttaacacttccttttttttttttttttttttaagaagaatataggtaaacaggtaatgattcttgattggagataccatttgactcttgatgagagttgtacgaagatggaaatgagggatgattccaggcgttttagggggaaggctgcagataccattctaacccccaagatactgtgttctcaagacctcttagaactaggtgttgtcagggataatttgaggagggcttagtcttcagaacaatcctgcagtcttgacagaaatctaaaatctccaaaaactcctaccctttaaccttaccctagggggaactgatctatgaatattacatgtgtgattatgaaaggtgaagttgagtgagaggagttgaggaacgtggaagacagtgagctctcaccctaacactataagaagcatgatctcaatagaccaataattcacctttttatacatctgtaaataaatggaatgtttttaagaatataattatgtcagatttagcattttcttttatatattaaatatatatatctttccttttctgctttcgaaaagtgactatttttttagaaatctaagaacagaagtttggtgattgaaaggtagaatatataaacctgaaataaagcagttaaaacaattaaagcag

SEQ ID NO: 890 - protein, 650 aa, Homo sapiens
KEAEAFAYYRRTHTANERRRRGEMRDLFEKLKITLGLLHSSKVSKSLILTRAFSEIQGLTDQADKLIGQKNLLTRKRNILIRKVSSLSGKTEEVVLKKLEYIYAKQQALEAQKRKKKMGSDEFDISPRISKQQEGSSASSVDLGQMFINNRRGKPLILSRKKDQATENTSPLNTPHTSANLVMTPQGQLLTLKGPLFSGPVVAVSPDLLESDLKPQVAGSAVALPENDDLFMMPRIVNVTSLATEGGLVDMGGSKYPHEVPDSKPSDHLKDTVRNEDNSLEDKGRISSRGNRDGRVTLGPTQVFLANKDSGYPQIVDVSNMQKAQEFLPKKISGDMRGIQYKWKESESRGERVKSKDSSFHKLKMKDLKDSSIEMELRKVTSAIEEAALDSSELLTNMEDEDDTDETLTSLLNEIAFLNQQLNDDSVGLAELPSSMDTEFPGDARRAFISKVPPGSRATFQVEHLGTGLKELPDVQGESDSISPLLLHLEDDDFSENEKQLAEPASEPDVLKIVIDSEIKDSLLSNKKAIDGGKNTSGLPAEPESVSSPPTLHMKTGLENSNSTDTLWRPMPKLAPLGLKVANPSSDADGQSLKVMPCLAPIAAKVGSVGHKMNLTGNDQEGRESKVMPTLAPVVAKLGNSGASPSSAGK

SEQ ID NO: 891 - DNA, 4989 bp, Homo sapiens
ttttttttttttttgagaaagggaatttcatcccaaataaaaggaatgaagtctggctccggaggagggtccccgacctcgctgtgggggctcctgtttctctccgccgcgctctcgctctggccgacgagtggagaaatctgcgggccaggcatcgacatccgcaacgactatcagcagctgaagcgcctggagaactgcacggtgatcgagggctacctccacatcctgctcatctccaaggccgaggactaccgcagctaccgcttccccaagctcacggtcattaccgagtacttgctgctgttccgagtggctggcctcgagagcctcggagacctcttccccaacctcacggtcatccgcggctggaaactcttctacaactacgccctggtcatcttcgagatgaccaatctcaaggatattgggctttacaacctgaggaacattactcggggggccatcaggattgagaaaaatgctgacctctgttacctctccactgtggactggtccctgatcctggatgcggtgtccaataactacattgtggggaataagcccccaaaggaatgtggggacctgtgtccagggaccatggaggagaagccgatgtgtgagaagaccaccatcaacaatgagtacaactaccgctgctggaccacaaaccgctgccagaaaatgtgcccaagcacgtgtgggaagcgggcgtgcaccgagaacaatgagtgctgccaccccgagtgcctgggcagctgcagcgcgcctgacaacgacacggcctgtgtagcttgccgccactactactatgccggtgtctgtgtgcctgcctgcccgcccaacacctacaggtttgagggctggcgctgtgtggaccgtgacttctgcgccaacatcctcagcgccgagagcagcgactccgaggggtttgtgatccacgacggcgagtgcatgcaggagtgcccctcgggcttcatccgcaacggcagccagagcatgtactgcatcccttgtgaaggtccttgcccgaaggtctgtgaggaagaaaagaaaacaaagaccattgattctgttacttctgctcagatgctccaaggatgcaccatcttcaagggcaatttgctcattaacatccgacgggggaataacattgcttcagagctggagaacttcatggggctcatcgaggtggtgacgggctacgtgaagatccgccattctcatgccttggtctccttgtccttcctaaaaaaccttcgcctcatcctaggagaggagcagctagaagggaattactccttctacgtcctcgacaaccagaacttgcagcaactgtgggactgggaccaccgcaacctgaccatcaaagcagggaaaatgtactttgctttcaatcccaaattatgtgtttccgaaatttaccgcatggaggaagtgacggggactaaagggcgccaaagcaaaggggacataaacaccaggaacaacggggagagagcctcctgtgaaagtgacgtcctgcatttcacctccaccaccacgtcgaagaatcgcatcatcataacctggcaccggtaccggccccctgactacagggatctcatcagcttcaccgtttactacaaggaagcaccctttaagaatgtcacagagtatgatgggcaggatgcctgcggctccaacagctggaacatggtggacgtggacctcccgcccaacaaggacgtggagcccggcatcttactacatgggctgaagccctggactcagtacgccgtttacgtcaaggctgtgaccctcaccatggtggagaacgaccatatccgtggggccaagagtgagatcttgtacattcgcaccaatgcttcagttccttccattcccttggacgttctttcagcatcgaactcctcttctcagttaatcgtgaagtggaaccctccctctctgcccaacggcaacctgagttactacattgtgcgctggcagcggcagcctcaggacggctacctttaccggcacaattactgctccaaagacaaaatccccatcaggaagtatgccgacggcaccatcgacattgaggaggtcacagagaaccccaagactgaggtgtgtggtggggagaaagggccttgctgcgcctgccccaaaactgaagccgagaagcaggccgagaaggaggaggctgaataccgcaaagtctttgagaatttcctgcacaactccatcttcgtgcccagacctgaaaggaagcggagagatgtcatgcaagtggccaacaccaccatgtccagccgaagcaggaacaccacggccgcagacacctacaacatcaccgacccggaagagctggagacagagtaccctttctttgagagcagagtggataacaaggagagaactgtcatttctaaccttcggcctttcacattgtaccgcatcgatatccacagctgcaaccacgaggctgagaagctgggctgcagcgcctccaacttcgtctttgcaaggactatgcccgcagaaggagcagatgacattcctgggccagtgacctgggagccaaggcctgaaaactccatctttttaaagtggccggaacctgagaatcccaatggattgattctaatgtatgaaataaaatacggatcacaagttgaggatcagcgagaatgtgtgtccagacaggaatacaggaagtatggaggggccaagctaaaccggctaaacccggggaactacacagcccggattcaggccacatctctctctgggaatgggtcgtggacagatcctgtgttcttctatgtccaggccaaaacaggatatgaaaacttcatccatctgatcatcgctctgcccgtcgctgtcctgttgatcgtgggagggttggtgattatgctgtacgtcttccatagaaagagaaataacagcaggctggggaatggagtgctgtatgcctctgtgaacccggagtacttcagcgctgctgatgtgtacgttcctgatgagtgggaggtggctcgggagaagatcaccatgagccgggaacttgggcaggggtcgtttgggatggtctatgaaggagttgccaagggtgtggtgaaagatgaacctgaaaccagagtggccattaaaacagtgaacgaggccgcaagcatgcgtgagaggattgagtttctcaacgaagcttctgtgatgaaggagttcaattgtcaccatgtggtgcgattgctgggtgtggtgtcccaaggccagccaacactggtcatcatggaactgatgacacggggcgatctcaaaagttatctccggtctctgaggccagaaatggagaataatccagtcctagcacctccaagcctgagcaagatgattcagatggccggagagattgcagacggcatggcatacctcaacgccaataagttcgtccacagagaccttgctgcccggaattgcatggtagccgaagatttcacagtcaaaatcggagattttggtatgacgcgagatatctatgagacagactattaccggaaaggaggcaaagggctgctgcccgtgcgctggatgtctcctgagtccctcaaggatggagtcttcaccacttactcggacgtctggtccttcggggtcgtcctctgggagatcgccacactggccgagcagccctaccagggcttgtccaacgagcaagtccttcgcttcgtcatggagggcggccttctggacaagccagacaactgtcctgacatgctgtttgaactgatgcgcatgtgctggcagtataaccccaagatgaggccttccttcctggagatcatcagcagcatcaaagaggagatggagcctggcttccgggaggtctccttctactacagcgaggagaacaagctgcccgagccggaggagctggacctggagccagagaacatggagagcgtccccctggacccctcggcctcctcgtcctccctgccactgcccgacagacactcaggacacaaggccgagaacggccccggccctggggtgctggtcctccgcgccagcttcgacgagagacagccttacgcccacatgaacgggggccgcaagaacgagcgggccttgccgctgccccagtcttcgacctgctgatccttggatcctgaatctgtgcaaacagtaacgtgtgcgcacgcgcagcggggtggggggggagagagagttttaacaatccattcacaagcctcctgtacctcagtggatcttcagttctgcccttgctgcccgcgggagacagcttctctgcagtaaaacacatttgggatgttccttttttcaatatgcaagcagctttttattccctgcccaaacccttaactgacatgggcctttaagaaccttaatgacaacacttaatagcaacagagcacttgagaaccagtctcctcactctgtccctgtccttccctgttctccctttctctctcctctctgcttcataacggaaaaataattgccacaagtccagctgggaagccctttttatcagtttgaggaagtggctgtccctgtggccccatccaaccactgtacacacccgcctgacaccgtgggtcattacaaaaaaacacgtggagatggaaatttttacctttatctttcacctttctagggacatgaaatttacaaagggccatcgttcatccaaggctgttaccattttaacgctgcctaattttgccaaaatcctgaactttctccctcatcggcccggcgctgattcctcgtgtccggaggcatgggtgagcatggcagctggttgctccatttgagagacacgctggcgacacactccgtccatccgactgcccctgctgtgctgctcaaggccacaggcacacaggtctcattgcttctgactagattattatttgggggaactggacacaataggtctttctctcagtgaaggtggggagaagctgaaccggc

SEQ ID NO: 892 - protein, 1367 aa, Homo sapiens
MKSGSGGGSPTSLWGLLFLSAALSLWPTSGEICGPGIDIRNDYQQLKRLENCTVIEGYLHILLISKAEDYRSYRFPKLTVITEYLLLFRVAGLESLGDLFPNLTVIRGWKLFYNYALVIFEMTNLKDIGLYNLRNITRGAIRIEKNADLCYLSTVDWSLILDAVSNNYIVGNKPPKECGDLCPGTMEEKPMCEKTTINNEYNYRCWTTNRCQKMCPSTCGKRACTENNECCHPECLGSCSAPDNDTACVACRHYYYAGVCVPACPPNTYRFEGWRCVDRDFCANILSAESSDSEGFVIHDGECMQECPSGFIRNGSQSMYCIPCEGPCPKVCEEEKKTKTIDSVTSAQMLQGCTIFKGNLLINIRRGNNIASELENFMGLIEVVTGYVKIRHSHALVSLSFLKNLRLILGEEQLEGNYSFYVLDNQNLQQLWDWDHRNLTIKAGKMYFAFNPKLCVSEIYRMEEVTGTKGRQSKGDINTRNNGERASCESDVLHFTSTTTSKNRIIITWHRYRPPDYRDLISFTVYYKEAPFKNVTEYDGQDACGSNSWNMVDVDLPPNKDVEPGILLHGLKPWTQYAVYVKAVTLTMVENDHIRGAKSEILYIRTNASVPSIPLDVLSASNSSSQLIVKWNPPSLPNGNLSYYIVRWQRQPQDGYLYRHNYCSKDKIPIRKYADGTIDIEEVTENPKTEVCGGEKGPCCACPKTEAEKQAEKEEAEYRKVFENFLHNSIFVPRPERKRRDVMQVANTTMSSRSRNTTAADTYNITDPEELETEYPFFESRVDNKERTVISNLRPFTLYRIDIHSCNHEAEKLGCSASNFVFARTMPAEGADDIPGPVTWEPRPENSIFLKWPEPENPNGLILMYEIKYGSQVEDQRECVSRQEYRKYGGAKLNRLNPGNYTARIQATSLSGNGSWTDPVFFYVQAKTGYENFIHLIIALPVAVLLIVGGLVIMLYVFHRKRNNSRLGNGVLYASVNPEYFSAADVYVPDEWEVAREKITMSRELGQGSFGMVYEGVAKGVVKDEPETRVAIKTVNEAASMRERIEFLNEASVMKEFNCHHVVRLLGVVSQGQPTLVIMELMTRGDLKSYLRSLRPEMENNPVLAPPSLSKMIQMAGEIADGMAYLNANKFVHRDLAARNCMVAEDFTVKIGDFGMTRDIYETDYYRKGGKGLLPVRWMSPESLKDGVFTTYSDVWSFGVVLWEIATLAEQPYQGLSNEQVLRFVMEGGLLDKPDNCPDMLFELMRMCWQYNPKMRPSFLEIISSIKEEMEPGFREVSFYYSEENKLPEPEELDLEPENMESVPLDPSASSSSLPLPDRHSGHKAENGPGPGVLVLRASFDERQPYAHMNGGRKNERALPLPQSSTC

SEQ ID NO: 893 - DNA, 1367 bp, Homo sapiens
gaattctgaactcatagtctccagccacacgtatgttaagcgaaactcctctgtgcccagcatgaaatcaaaagcaagtttttcctttttctttccacggtggtgaaggcggtcatcctcttgtagcctagggttccttggccaaattgctagttgccgatgacctcggggctcggcttgcgacgaacactgggctggaatctgtctccaggaaacccaggcccttttattgttgctgtgtcccccagaggcagggccaagctgaggccattctgtcatgctcaggaaggtagaagatggcccaaagggaagcacacctgcagtaggagggggggcagcggtgggcagggcacagcttccctgcaggttagaccccctcgcaggccagctgcctctcctgcagaaccgtgggtctcgggagaggctgccatccctgcacatgacaggtaggcacattgccgggttctggacatgcccccagagcagcctctgcccaccccttcctgggtccctgactccgtccccctccgtgtgcccctccccagatcacgcgctgccccatgatcccgtgctacatctcctccccggacgagtgcctctggatggactgggtcacagagaagaacatcaacgggcaccaggccaagttcttcgcctgcatcaagagaagtgacggctcctgtgcgtggtaccgcggcgcggcgccccccaagcaggagtttctcgacatcgaggacccataagcaggcctccaacgcccctgtggccaactgcaaaaaaagcctccaagggtttcgactggtccagctctgacatcccttcctggaaacagcatgaataaaacactcatcccatgggtccaaattaatatgattctgctccccccttctccttttagacatggttgtgggtctggagggagacgtgggtccaaggtcctcatcccatcctccctctgccaggcactatgtgtctggggcttcgatccttgggtgcaggcagggctgggacacgcggcttccctcccagtccctgccttggcaccgtcacagatgccaagcaggcagcacttagggatctcccagctgggttagggcagggcctgagaaatgtgcattttgcagaaacttttgagggtcgttgcaagactgtgtagaggcctacaggtccctttcatcttgagagggacatggcccttgttttctgcagcttccacgcctctgcactccctgcccctggaagtgctcccatcgcccggtgcccaccatgagctcccagcacctgactccccccacatggaagggcagcctggaaccagtggctagttcttgaattagccccatcaatcctattaatcctcagaattc

SEQ ID NO: 894 - protein, 65 aa, Homo sapiens
ITRCPMIPCYISSPDECLWMDWVTEKNINGHQAKFFACIKRSDGSCAWYRGAAPPKQEFLDIEDP

SEQ ID NO: 895 - DNA, 4545 bp, Homo sapiens
atgatgatggcaagaaagcaagatgtccgaattcccacctacaacatcagtgtggtgggattatctgggaccgagaaggaaaagggccagtgtgggattggaaagtcttgtttgtgcaaccgcttcgtgcgcccgagtgctgacgagtttcacttggaccatacctccgtcctcagcaccagtgactttggagggcgagtggtcaataatgaccactttctctactggggagaagttagccgctccctggaggattgtgtggaatgtaagatgcacattgtggagcagactgaatttattgatgatcagacttttcaacctcatcgaagcacggccctgcagccctatatcaagagagctgctgcgaccaagcttgcatcagctgaaaaactcatgtacttttgcactgaccagctggggctggagcaggactttgagcagaaacaaatgccagacggaaagctgctggttgatggttttcttcttggtattgatgttagcaggggcatgaataggaactttgatgaccagctcaagtttgtctccaatctctacaatcagcttgcaaaaacaaaaaagcccatagtggtggtcctgactaagtgtgacgaaggtgttgagcggtacattagagatgcacatacttttgccttaagcaaaaagaacctccaggttgtggagacctcagcgagatccaatgtaaacgtggacttggctttcagcaccttagtgcaactcattgataaaagtccggggaagacaaaaatcattccttattttgaagctctcaagcagcagagtcagcagatagctacagcaaaagacaagtatgagtggctggtgagtcgcattgtgaaaaaccacaatgagaactggctgagtgtcagccgaaagatgcaggcctctccagaataccaggactatgactacctggaagggactcagaaagccaagaagctgtttttacagcacatccaccgcctcaagcatgagcatatcgagcgtaggagaaagctgtacctggcagccctgccattagcttttgaagctcttatacctaatctagatgaaatagaccacctaggctgcataaaagccaaaaagctcttagaaaccaagccagaattcttgaagtggtttgttgtgcttgaagagaccccatgggatgccaccagtcacattgacaacatggaaaacgaacggattccctttgatttaatggataccgtccctgcagaggcactatacgaggcccacttagagaagctgaggaacgaaaggaaaagagttgagatgcgaagggcgtttaaagaaaacctggagacttctcctttcataactcccggaaagccttgggaagaggcccgtagttttattatgaatgaggatttctaccagtggctggaggaatctgtatacacggatatttatggcaaacaccaaaagcaaattatagataaagcaaaggaagaatttcaggagttgcttttggaatattcagaattgttttatgaactggagctggatgctaagcccagcaaggagaagatgggtgttattcaggatgttctgggagaggaacagcgatttaaagccatttacaaaagctccaagcagagcgttgatgcccttattctgaaacacattcattttgtgtaccacccaacaaaggagacatgccccagctgcccagcttgtgtggacgctaagattgagcacttgattagttctcggtttatccggccgtctgaccggaatcagaaaaattcactctctgaccctaacattgatagaatcaacttggttatattgggcaaagacgccttgcccgagagttggccaatggagattagagctctttgtacaaatgatgacaagtatgtgatagatggtaaaatgtatgagctttccctgaggccaatagaggggaatgtcaggcttcctgtgaactctttccagacgccaacatttcagccccacggctgtctctgcctttacaattcaaaggaatcgctatcctatgtagtggaaagtatagagaagagtagagagtccacgctgggccggcgggataatcatttagtccatctcccccttacattaattttggttaacaagagaggagacaccagtggagagactctgcatagcttaatacagcaaggtcaacaaattgctagcaaacttcagtgtgtctttctcgaccctgcttctgctggcattggttacggacgcaacattaatgaaaagcaaatcagtcaagttttgaagggactcctggactctaagcgtaacttaaacctggtcagttctactgctagcatcaaagatttggctgatgttgatctgcgaattgttatgtgtctgatgtgtggagatccttttagtgcagatgatatactttttcctgtccttcagtcccaaacctgtaaatcttcccattgtggaagcaacaactctgttttacttgaactaccaatcggactgcacaagaagcggattgaactgtctgttctttcataccattcctcctttagcatcagaaagagccggttggttcatgggtacattgttttttattcagccaaacgtaaggcctctttggctatgttacgtgcctttctttgtgaagtgcaggatattatccctattcagcttgtagcactcactgatggcgctgtagatgtcctggacaatgacttaagtagggaacagctaactgagggggaggagattgctcaagaaattgacggaaggttcacaagcatcccctgtagccaaccccagcataaacttgagatctttcacccattttttaaagatgtggtggaaaaaaagaacataatcgaggctactcatatgtacgataatgctgccgaggcctgtagcaccaccgaagaggtgtttaactccccccgggcaggatcaccgctctcgaactcaaacctgcaggattcagaagaagatatcgagccatcttacagcctgtttcgagaagacacatcactgccttctctgtccaaagaccattctaagctctctatggaactggagggaaatgatgggctgtctttcattatgagcaattttgagagtaaactgaacaacaaagtacctccgccagtcaaaccaaagcctcctgtccattttgaaattacaaagggggatctatcttatttagaccaaggccatagggatggacagaggaagtctgtgtcttctagcccctggctgcctcaggatgggtttgatccttctgactatgctgaacccatggatgctgtggtgaagccaaggaatgaagaagaaaacatatactccgtgccccatgacagcacccaaggcaaaatcatcaccattcggaatatcaacaaagcccagtccaacggcagcgggaatggttctgacagtgaaatggacaccagctctctagagcgagggcgcaaggtttccatcgtgagcaagccagtgctgtacaggacgagatgcacccggctggggcggtttgctagttaccggaccagcttcagcgtcgggagtgatgatgagctggggcccatccggaagaaagaggaggatcaggcatcccagggttataaaggggacaatgctgtcattccatacgaaacagacgaagacccgcggaggaggaatattcttcgcagcctaaggaggaacactaagaaaccaaagcccaaaccccggccatccatcacaaaggcaacctgggagagtaactattttggggtgcccttaacaactgtcgtgactccagagaagccgatccccatttttattgaaagatgtattgagtacattgaagccacaggactgagcacggaaggcatctaccgggtcagcgggaacaagtctgagatcgagagtctgcagagacagtttgatcaagaccacaacctggacctggcagagaaagactttacggtgaataccgtggctggtgccatgaagagctttttctcagaactgcctgaccccctggtcccgtataacatgcagatcgacttggtggaagcacacaaaatcaacgaccgggagcagaagttgcatgcccttaaggaggtattaaagaaatttccaaaggaaaaccacgaagtcttcaagtatgtcatctctcacctaaacaaggtcagccacaacaacaaggtgaatctcatgaccagcgagaacctctccatctgcttctggcccaccttgatgagacctgatttcagcactatggacgccctcacagccacgcgcacctaccagacaatcattgaactctttatccagcagtgccccttcttcttctacaatcggcccatcaccgagccccccggcgccaggcccagctccccctctgccgtggcttccaccgtccccttcctcacttccacgcctgtcacaagtcagccgtcgcccccacagtcgcctccacccaccccccagtccccaatgcagccactgcttccctccccgcttcatccccaccgtcccactccacagccttcccgaaacattccctggcaaacaaaggaacactag

SEQ ID NO: 896 - protein, 835 aa, Homo sapiens [sequence omitted]

SEQ ID NO: 897 - DNA, 7696 bp, Homo sapiens
atgatgatggcaagaaagcaagatgtccgaattcccacctacaacatcagtgtggtgggattatctgggaccgagaaggaaaagggccagtgtgggattggaaagtcttgtttgtgcaaccgcttcgtgcgcccgagtgctgacgagtttcacttggaccatacctccgtcctcagcaccagtgactttggagggcgagtggtcaataatgaccactttctctactggggagaagttagccgctccctggaggattgtgtggaatgtaagatgcacattgtggagcagactgaatttattgatgatcagacttttcaacctcatcgaagcacggccctgcagccctatatcaagagagctgctgcgaccaagcttgcatcagctgaaaaactcatgtacttttgcactgaccagctggggctggagcaggactttgagcagaaacaaatgccagacggaaagctgctggttgatggttttcttcttggtattgatgttagcaggggcatgaataggaactttgatgaccagctcaagtttgtctccaatctctacaatcagcttgcaaaaacaaaaaagcccatagtggtggtcctgactaagtgtgacgaaggtgttgagcggtacattagagatgcacatacttttgccttaagcaaaaagaacctccaggttgtggagacctcagcgagatccaatgtaaacgtggacttggctttcagcaccttagtgcaactcattgataaaagtcggggaaagacaaaaatcattccttattttgaagctctcaagcagcagagtcagcagatagctacagcaaaagacaagtatgagtggctggtgagtcgcattgtgaaaaaccacaatgagaactggctgagtgtcagccgaaagatgcaggcctctccagaataccaggactatgtctacctggaagggactcagaaagccaagaagctgtttctacagcacatccaccgcctcaagcatgagcatatcgagcgtaggagaaagctgtacctggcagccctgccattagcttttgaagctcttatacctaatctagatgaaatagaccacctaagctgcataaaagccaaaaagctcttagaaaccaagccagaattcttgaagtggtttgttgtgcttgaagagaccccatgggatgccaccagtcacattgacaacatggaaaacgaacggattccctttgatttaatggataccgtccctgcagagcagctatacgaggcccacttagagaagctgaggaacgaaaggaaaagagttgagatgcgaagggcgtttaaagaaaacctggagacttctcctttcataactcccggaaagccttgggaagaggcccgtagttttattatgaatgaggatttctaccagtggctggaggaatctgtatacatggatatttatggcaaacaccaaaagcaaattatagataaagcaaaggaagaatttcaggagttgcttttggaatattcagaattgttttatgaactggagctggatgctaagcccagcaaggagaagatgggtgttattcaggatgttctgggagaggaacagcgatttaaagcattacaaaagctccaagcagagcgtgatgcccttattctgaaacacattcattttgtgtaccacccaacaaaggagacatgccccagctgcccagcttgtgtggacgctaagattgagcacttgattagttctcggtttatccggccgtctgaccggaatcagaaaaattcactctctgaccctaacattgatagaatcaacttggttatattgggcaaagacggccttgcccgagagttggccaatgagattcgagctctttgtacaaatgatgacaagtatgtgatagatggtaaaatgtatgagctttccctgaggccaatagaggggaatgtcaggcttcctgtgaactctttccagacgccaacatttcagccccacggctgtctctgcctttacaattcaaaggaatcgctatcctatgtagtggaaagtatagagaagagtagagagtccacgctgggccggcgggataatcatttagtccatctcccccttacattaattttggttaacaagagaggagacaccagtggagagactctgcatagcttaatacagcaaggtcaacaaattgctagcaaacttcagtgtgtctttctcgaccctgcttctgctggcattggttacggacgcaacattaatgaaaagcaaatcagtcaagttttgaagggactcctggactctaagcgtaacttaaacctggtcagttctactgctagcatcaaagatttggctgatgttgatctgcgaattgttatgtgtctgatgtgtggagatccttttagtgcagatgacatactttttcctgtccttcagtcccaaacctgtaaatcttcccattgtggaagcaacaactctgttttacttgaactaccaatcggactgcacaagaagcggattgaactgtctgttctttcataccattcctcctttagcatcagaaagagccggttggttcatgggtacattgttttttattcagccaaacgtaaggcctctttggctatgttacgtgcctttctttgtgaagtgcaggatattatccctattcagcttgtagcactcactgatggcgctgtagatgtcctggacaatgacttaagtagggaacagctaactgagggggaggagattgctcaagaaattgacggaaggttcacaagcatcccctgtagccaaccccagcataaacttgagatctttcacccattttttaaagatgtggtggaaaaaaagaacataatcgaggctactcatatgtacgataatgctgccgaggcctgtagcaccaccgaagaggtgtttaactccccccgggcaggatcaccgctctgcaactcaaacctgcaggattcagaagaagatatcgagccatcttacagcctgtttcgagaagacacatcactgccttctctgtccaaagaccattctaagctctctatggaactggagggaaatgatgggctgtctttcattatgagcaattttgagagtaaactgaacaacaaagtacctccgccagtcaaaccaaagcctcctgtccattttgaaattacaaagggggatctatcttatttagaccaaggccatagggatggacagaggaagtctgtgtcttctagcccctggctgcctcaggatgggtttgatccttctgactatgctgaacccatggatgctgtggtgaagccaaggaatgaagaagaaaacatatactccgtgccccatgacagcacccaaggcaaaatcatcaccattcggaatatcaacaaagcccagtccaacggcagcgggaatggttctgacagtgaaatggacaccagctctctagagcgagggcgcaaggtttccatcgtgagcaagccagtgctgtacaggacgagatgcacccggctggggcggtttgctagttaccggaccagcttcagcgtggggagtgatgatgagctggggcccatccggaagaaagaggaggatcaggcatcccagggttataaaggggacaatgctgtcattccatacgaaacagacgaagacccgcggaggaggaatattcttcgcagcctaaggaggaacactaagaaaccaaagcccaaaccccggccatccatcacaaaggcaacctgggagagtaactattttggggtgcccttaacaactgtcgtgactccagagaagccgatccccatttttattgaaagatgtattgagtacattgaagccacaggactgagcacggaaggcatctaccgggtcagcgggaacaagtctgagatggagagtctgcagagacagtttgatcaagaccacaacctggacctggcagagaaagactttacggtgaataccgtggctggtgccatgaagagctttttctcagaactgcctgaccccctggtcccgtataacatgcagatcgacttggtggaagcacacaaaatcaacgaccgggagcagaagttgcatgcccttaaggaggtattaaagaaatttccaaaggaaaaccacgaagtcttcaagtatgtcatctctcacctaaacaaggtcagccacaacaacaaggtgaatctcatgaccagcgagaacctctccatctgcttctggcccaccttgatgagacctgatttcagcactatggacgccctcacagccacgcgcacctaccagacaatcattgaactctttatccagcagtgccccttcttcttctacaatcggcccatcaccgagccccccggcgccaggcccagctccccctctgccgtggcttccaccgtccccttcctcacttccacgcctgtcacaagtcagccgtcgcccccacagtcgcctccacccaccccccagtccccaatgcagccactgcttccctcccagcttcaagccgaacacacgctgtgagccaccaagacctggggcgacaggagaaccggtcctctctctgacggggtggcatttggccttgaacaaaaccaagtccactggggacagaggcaggggcaagtggctctccccattaccttctcaagacctcagtgggagcaccagccaatggtaccatcggctgggctgccaggtaccctgggcctggcgctgcagacctgagctggcttggacccatttgaggactgaactaggcaggcaatggctccagtgccctccctctgttccctggaccaccaccccacgtagctgctcacaccagcctccgggtgcctccctctgcttgtacagagcccatggtcgggacagtgccctggcctttgccggggaggaggatgctctgagattcagggtggggctggcaacccctgaagagaacacttcctgttggtctgtctcttcccaccttccatctgcacacacccccaaggtaagggtacagcccggctggcggcctccttgggaacgtgtaggccacggctctgccaccactaggtacctgctgagggcgctggctctgcagatcagaacaacggaggatagctttgtgcctggacccagagagtgtgggactccccgcttcatccccaccgtcccactccacagccttcccgaaacattccctggcaaacaaaggaacactaggagaaaaaatggaaaaacccttccagtaattaaaaaggaagaaaccacagaaagaaaactacagacctcaagattccactctgtgcccgcctctgccgggagggagggaggcacacaggtggagctgaccctcgtctttgtggcagcaaaaccaggatgcctggagctgtggcctgagggcctgctggggtcccactcacccacttaggtctagtcgctagatcccccgttttcccaagaagagggttcgagcccttggtggggacagctggggagatggcagtgcaggctggaacctgggctgccccagaacacagtccattacgatagaaacactaggcaccccccaggcgagagctagtggggtgcagagggccccatgccagacagcccttggggctcgttgcactttaagaaataggatctgtggtgtattccagggggcctgatggacacctttcccgggcgtctgcagctgccctgcccgtgcccgcctgcagtggttggagacgggagtggcccttcggctcccgagctccctctggggacggctggctcactgtctccagttctcaatggccaacgaaggtgcttggaaacacctaaccttgcaagttttaccgccttttgaggaacacaaatcggagaacaaacccagggttcaggcgtgttttctgtgaatgttggatgatgaatttttgtctcttctggtggagctgtgcctggccctgtaggcccagggttggctggaaggtgacatctgtgtttcgttttagctgaggttggcagaaacgttcccaaactcccccagccctggaccccagcagatgaggaaacggccccatttactgaccccgcccccttttcgaggttatgctcacctggtcagctcctcacgtaattgggggtggagggaaagcatggtggtgccctgggccgtccctgtgtgaacgcaggcaaaagcagcccagtccccctcactgcttgagctaacactgccacctcttttgtgtgagcacaaaagccacgtcccaagccacctggcccgattccacagatgtatgtgcggccagtgacttccccaggagtgtggagggggtggtgaggaggagcacctgggctctctacccctctcctcacagaagtacctgaaactaggtctggggcactcccaatgcagcgccttgtcagccaaggtgggcaggcagggactgtggcagcttatgtccaaagggagcccccatgcacaggaagccacagggttcctcttgtttcccccgctaacttcagcctctcatctgctgctccgggctgagggactagaggacatctcggtcgtttgaggggcatggccagtcgtggcaggccggccttcagcgtccggtcagggaagcgtgcagcccaaatgggcacttgcatgggagccacagaggagcgtccctggggattgttgggaccatgctgcccccactcccgcttttgttggggctctaagttctggaaggtgtgtgcacagagggtgctcatgggactcgcatgcagctctcagcactgggtgggagggcgttggcttgtccagaatggggacgtggggcagccacccctgcccagcgagagcgcagacaccgtgtgaggggacagcagcccttggtgcaaagccagagactgatcctggctctgacggctgaagagggaagacccaaggctgggtggcgtggctcgtgaatccacttagaattcttggcttgtgtcgcatactgggtgtcacggcacacatttactctgcattgtccccgtctttcccatcgcctagcgtttggggaggaacagggagagagcttcggggcgtctgtctccgtgctctcctgcctccaccgccttggttttgcttcctgctggaggcagggcacctgctgcgacccagattcttctgcaggatgtgtctgtctttgtcacggtggacagagggtgacatcataggagcagctcgctggccagaaggggatgggggcatccctgtgcctcactcagctcctgctgctcttagggaaaggaggcctgggtcaagccagcatccccttggtaaagacccccgcaggccaccaggcattctggacacgcacacacacacacacacacacacacacacacaaaacttcacagcaggccagctgcagtgacttgtcatcaagagtcacctcagctgcgcccccctcccatcctttcctatgagaagccactgctttgggggcgccggctagaaaaagtagggtgcggtggccaggagggcccctgccgcgcggggggctgggtctggttgagtcgctgctttcccgagggcagcgcagggatccggggaagctgcggcagggagcgggcgccggcttcgtggctctgaggtgtaacgggggtgggctccctccctcggaggacatcgtctgtgtccaggtcagaaagtggcccaggaagggggcagtttctgtcgcgggtccggtgggggcgcggccgc

SEQ ID NO: 898 - protein, 1499 aa, Homo sapiens
MMMARKQDVRIPTYNISVVGLSGTEKEKGQCGIGKSCLCNRFVRPSADEFHLDHTSVLSTSDFGGRVVNNDHFLYWGEVSRSLEDCVECKMHIVEQTEFIDDQTFQPHRSTALQPYIKRAAATKLASAEKLMYFCTDQLGLEQDFEQKQMPDGKLLVDGFLLGIDVSRGMNRNFDDQLKFVSNLYNQLAKTKKPIVVVLTKCDEGVERYIRDAHTFALSKKNLQVVETSARSNVNVDLAFSTLVQLIDKSRGKTKIIPYFEALKQQSQQIATAKDKYEWLVSRIVKNHNENWLSVSRKMQASPEYQDYVYLEGTQKAKKLFLQHIHRLKHEHIERRRKLYLAALPLAFEALIPNLDEIDHLSCIKAKKLLETKPEFLKWFVVLEETPWDATSHIDNMENERIPFDLMDTVPAEQLYEAHLEKLRNERKRVEMRRAFKENLETSPFITPGKPWEEARSFIMNEDFYQWLEESVYMDIYGKHQKQIIDKAKEEFQELLLEYSELFYELELDAKPSKEKMGVIQDVLGEEQRFKALQKLQAERDALILKHIHFVYHPTKETCPSCPACVDAKIEHLISSRFIRPSDRNQKNSLSDPNIDRINLVILGKDGLARELANEIRALCTNDDKYVIDGKMYELSLRPIEGNVRLPVNSFQTPTFQPHGCLCLYNSKESLSYVVESIEKSRESTLGRRDNHLVHLPLTLILVNKRGDTSGETLHSLIQQGQQIASKLQCVFLDPASAGIGYGRNINEKQISQVLKGLLDSKRNLNLVSSTASIKDLADVDLRIVMCLMCGDPFSADDILFPVLQSQTCKSSHCGSNNSVLLELPIGLHKKRIELSVLSYHSSFSIRKSRLVHGYIVFYSAKRKASLAMLRAFLCEVQDIIPIQLVALTDGAVDVLDNDLSREQLTEGEEIAQEIDGRFTSIPCSQPQHKLEIFHPFFKDVVEKKNIIEATHMYDNAAEACSTTEEVFNSPRAGSPLCNSNLQDSEEDIEPSYSLFREDTSLPSLSKDHSKLSMELEGNDGLSFIMSNFESKLNNKVPPPVKPKPPVHFEITKGDLSYLDQGHRDGQRKSVSSSPWLPQDGFDPSDYAEPMDAVVKPRNEEENIYSVPHDSTQGKIITIRNINKAQSNGSGNGSDSEMDTSSLERGRKVSIVSKPVLYRTRCTRLGRFASYRTSFSVGSDDELGPIRKKEEDQASQGYKGDNAVIPYETDEDPRRRNILRSLRRNTKKPKPKPRPSITKATWESNYFGVPLTTVVTPEKPIPIFIERCIEYIEATGLSTEGIYRVSGNKSEMESLQRQFDQDHNLDLAEKDFTVNTVAGAMKSFFSELPDPLVPYNMQIDLVEAHKINDREQKLHALKEVLKKFPKENHEVFKYVISHLNKVSHNNKVNLMTSENLSICFWPTLMRPDFSTMDALTATRTYQTIIELFIQQCPFFFYNRPITEPPGARPSSPSAVASTVPFLTSTPVTSQPSPPQSPPPTPQSPMQPLLPSQLQAEHTL

SEQ ID NO: 899 - DNA, 3320 bp, Homo sapiens
caacataaacatttttatgtagtgattcctcagatttacaagcaactacaagaaatggacgaacgaaggactattaaactcagtgagtgttacagaggatttgctgactcagaacgcaaagttattcccatcatttcaaaatgtttggaaggaatgattcttgcagcaaaatcagttgatgaaagaagagactctcaaatggtggtagactccttcaaatctggttttgaacctccaggagactttccatttgaagattacagtcaacatatatatagaaccatttctgatgggactatcagtgcatccaaacaggagagtgggaagatggatgccaaaaccacagtaggaaaggccaagggcaaattgtggctctttggaaagaagccaaagggcccagcactagaagatttcagtcatctgccaccagaacagagacgtaaaaaactacagcagcgcattgatgaacttaacagagaactacagaaagaatcagaccaaaaagatgcactcaacaaaatgaaagatgtatatgagaagaatccacaaatgggggatccagggagtttgcagcctaaattagcagagaccatgaataacattgaccgcctacgaatggaaatccataagaatgaggcttggctctctgaagtcgaaggcaaaacaggtgggagaggagacagaagacatagcagtgacataaatcatcttgtaacacagggacgagaaagtcctgagggaagttacactgatgatgcaaaccaggaagtccgtgggccaccccagcagcatggtcaccacaatgagtttgatgatgaatttgaggatgatgatcccttgcctgctattggacactgcaaagctatctacccttttgatggacataatgaaggtactctagcaatgaaagaaggtgaagttctctacattatagaggaggacaaaggtgacggatggacaagagctcggagacagaacggtgaagaaggctacgttcccacgtcatacatagatgtaactctagagaaaaacagtaaaggttcctgaagagggtttctgaggaaatgggcaagatgttgaaggaggttacatgcagctgcttttgggggagggtattagagttgtcaggctcaaagagagtgagagaagcaagttgcatgagtgcatgcagacatgattttttttttactaacttcattagcatttccatacattgtttttaaaaatcataataccaacccttaagttcctagttcacagttattcccacaaaagaaaaagccaacaatagtgtaccatttttctatttattttattgctgtctaatcaataaagaatgcagagctgtcaaaaaatgtgtcttacattagctgtcccaacaggattgtcttccctcccagctctgttttaattggcttttagacccactatctgtcagatccttgccatctgtcagtgtctgcctgcgccacctccgtgcttgcttaacatcctgttgcatgtctagcgtgattgagctagatttttcaggcatgtctttagattcccttgttcttgtcaaagccttgttttgttttacatttgtagtgcaaatcactttgtcaaacatctccagcactaatgtttccatcttagtatttgtgcacactgctataacttccccactgcaaacattccagttttggcattacgaagaagtagctgtgaacctgaagtatttatgataagaaaaagaaaacatctctgctgtagcctacagcccagttgaaagaactctttgaaacgtgatacatcttcagcacctcagtctgggaagaatctagtcagcactgaaatcctggcataataaacacagaagatattcaccacctcaagacaaaggactattgtcaaaagtcagctgcttccattcaaatgctgccttaaacttgagtgcctaaatctgttgattgccaacactaccactacagtatcccacaaagggctttatgtgtcagctcagtgcgacctgctttaactctgcagcaccgctgcagctgccgatgtagcctcggtaggtggctattagagctctaccatatacagtggtgcatcttcaaatttatgcatcaaactaaagacatgtccaagtccattttaatttcctcagtggttttatgagaagttttatgggcctcccccaattgtctttttattttgggttatgacgatcatgtttgataattacaatgatagtctctttccacgtgatgcttttgtttgaacctgataaaatttagtgaaactttgtaatgatctatgtgcacttttacttgtaaaatggaatttctgtatgtttatacttgtaaatatgattgttgttagtgctcctgttgctcatggtgtcctgcctcgcatttgtgattctgttaatgacatgtatcttaactaatttcttagtggtgttgtaatagggagatggggcaggtggggggttatttgtaccactgaatcttcattaatttggttctttactgttttgaggggagaaagaacgtgaaatggtttgtgtattattgaattttaagcaatattttagaagctgtgtgactgctttaataactttttcccagtgttatttgaatcatactacccgttatactaaagctgaatgacaattgtgtgaaagttactgccttcataagatcaagtcaccactgttacacagctgacatatagtgtattacctttgcagctagtaaactataaagtttagatattgaatctcgttacagggttatttatataatgtgacattattcagtactgacagactacatgaagtagttttaaaatctagtgctatttttattttaaaggttagcaatgaggaggaaatgtgatctggctgtgtttgtcttctgtacaaagcctgaagtgcttatggttttttggctaacagccacagagggcaaagtttaagactttcttgtaaggactaactgttcttttcaagctactgtttgtttttctaaaagcaggatttgcttccgtaggaggcaagttccttgatgtggaatagtgcaacctgtatatgggttattataataggaaagacatttgtacttgcacagtttaaatcattcttaaattttgaacatgtgaattgtcccaaaaaatctttaattttttggtaatttttactctttttgtgcacatgttgatttcttaatggtaaatccttcatttaaagatagtgttctctgttgagaatatttacatggaataaaacaatcttttcatggcctgttaaaaaaaaaaaaaaaaaaaaaaaaaaaaaa

SEQ ID NO: 900 - protein, 330 aa, Homo sapiens
MDERRTIKLSECYRGFADSERKVIPIISKCLEGMILAAKSVDERRDSQMVVDSFKSGFEPPGDFPFEDYSQHIYRTISDGTISASKQESGKMDAKTTVGKAKGKLWLFGKKPKGPALEDFSHLPPEQRRKKLQQRIDELNRELQKESDQKDALNKMKDVYEKNPQMGDPGSLQPKLAETMNNIDRLRMEIHKNEAWLSEVEGKTGGRGDRRHSSDINHLVTQGRESPEGSYTDDANQEVRGPPQQHGHHNEFDDEFEDDDPLPAIGHCKAIYPFDGHNEGTLAMKEGEVLYIIEEDKGDGWTRARRQNGEEGYVPTSYIDVTLEKNSKGS

SEQ ID NO: 901 - DNA, 1887 bp, Homo sapiens
ccatggcggcgcggcggcgacggagcaccggcggcggcagggcgagagcattaaatgaaagcaaaagagttaataatggcaacacggctccagaagactcttcccctgccaagaaaactcgtagatgccagagacaggagtcgaaaaagatgcctgtggctggaggaaaagctaataaggacaggacagaagacaagcaagatggtatgccaggaaggtcatgggccagcaaaagggtctctgaatctgtgaaggccttgctgttaaagggcaaagctcctgtggacccagagtgtacagccaaggtggggaaggctcatgtgtattgtgaaggaaatgatgtctatgatgtcatgctaaatcagaccaatctccagttcaacaacaacaagtactatctgattcagctattagaagatgatgcccagaggaacttcagtgtttggatgagatggggccgagttgggaaaatgggacagcacagcctggtggcttgttcaggcaatctcaacaaggccaaggaaatctttcagaagaaattccttgacaaaacgaaaaacaattgggaagatcgagaaaagtttgagaaggtgcctggaaaatatgatatgctacagatggactatgccaccaatactcaggatgaagaggaaacaaaaaaagaggaatctcttaaatctcccttgaagccagagtcacagctagatcttcgggtacaggagttaataaagttgatctgtaatgttcaggccatggaagaaatgatgatggaaatgaagtataataccaagaaagccccacttgggaagctgacagtggcacaaatcaaggcaggttaccagtctcttaagaagattgaggattgtattcgggctggccagcatggacgagctctcatggaagcatgcaatgaattctacaccaggattccgcatgactttggactccgtactcctccactaatccggacacagaaggaactgtcagaaaaaatacaattactagaggctttgggagacattgaaattgctattaagctggtgaaaacagagctacaaagcccagaacacccattggaccaacactatagaaacctacattgtgccttgcgcccccttgaccatgaaagttacgagttcaaagtgatttcccagtacctacaatctacccatgctcccacacacagcgactataccatgaccttgctggatttgtttgaagtggagaaggatggtgagaaagaagccttcagagaggaccttcataacaggatgcttctatggcatggttccaggatgagtaactgggtgggaatcttgagccatgggcttcgaattgcccaccctgaagctcccatcacaggttacatgtttgggaaaggaatctactttgctgacatgtcttccaagagtgccaattactgctttgcctctcgcctaaagaatacaggactgctgctcttatcagaggtagctctaggtcagtgtaatgaactactagaggccaatcctaaggccgaaggattgcttcaaggtaaacatagcaccaaggggctgggcaagatggctcccagttctgcccacttcgtcaccctgaatgggagtacagtgccattaggaccagcaagtgacacaggaattctgaatccagatggttataccctcaactacaatgaatatattgtatataaccccaaccaggtccgtatgcggtaccttttaaaggttcagtttaatttccttcagctgtggtgaatgttgatcttaaataaaccagagatctgatcttcaagcaagaaaataagcagtgttgtacttgtgaattttgtgatattttatgtaataaaaactgtacaggtctaaaaaaaaaaaaaaaaaaaaaaaaaaa

SEQ ID NO: 902 - protein, 534 aa, Homo sapiens
MPVAGGKANKDRTEDKQDGMPGRSWASKRVSESVKALLLKGKAPVDPECTAKVGKAHVYCEGNDVYDVMLNQTNLQFNNNKYYLIQLLEDDAQRNFSVWMRWGRVGKMGQHSLVACSGNLNKAKEIFQKKFLDKTKNNWEDREKFEKVPGKYDMLQMDYATNTQDEEETKKEESLKSPLKPESQLDLRVQELIKLICNVQAMEEMMMEMKYNTKKAPLGKLTVAQIKAGYQSLKKIEDCIRAGQHGRALMEACNEFYTRIPHDFGLRTPPLIRTQKELSEKIQLLEALGDIEIAIKLVKTELQSPEHPLDQHYRNLHCALRPLDHESYEFKVISQYLQSTHAPTHSDYTMTLLDLFEVEKDGEKEAFREDLHNRMLLWHGSRMSNWVGILSHGLRIAHPEAPITGYMFGKGIYFADMSSKSANYCFASRLKNTGLLLLSEVALGQCNELLEANPKAEGLLQGKHSTKGLGKMAPSSAHFVTLNGSTVPLGPASDTGILNPDGYTLNYNEYIVYNPNQVRMRYLLKVQFNFLQLW

SEQ ID NO: 903 - DNA, 4096 bp, Homo sapiens
gggaggggtcgcgtaggcgcctcacctgaccctgcggctgtgcggttgctgctccggggcaggtctccttccaggccaggggcccggaatcatgtacataaagcaggtgattatccagggttttcgaagttacagagatcaaacaattgtagatcccttcagttcaaaacataatgtgattgtgggcagaaatggatctggaaaaagtaactttttttatgcaattcagtttgttctcagtgatgagtttagtcatcttcgtccagaacagcggttggctttattgcatgaaggtactggtcctcgtgttatttctgcttttgtggagattatttttgataattcagacaaccggttaccaatcgataaagaggaagtttcacttcgaagagttattggtgccaaaaaggatcagtatttcttagacaagaagatggtcacgaaaaatgatgtgatgaacctccttgaaagcgctggtttttctcgaagcaatccttattatattgttaaacaaggaaagatcaaccagatggcaacagcaccagattctcagagattaaagctattaagagaagtagctggtactagagtgtatgacgaacgaaaggaagaaagcatctccttaatgaaagaaacagagggcaaacgggaaaaaatcaatgagttgttaaaatacattgaagagagattacatactctagaggaagaaaaggaagaactagctcagtatcagaagtgggataaaatgagacgagccctggaatataccatttacaatcaggaacttaacgagactcgtgccaaacttgatgagctttctgctaagcgagagactagtggagaaaaatccagacaattaagagatgctcagcaggatgcaagagataaaatggaggatatcgaacgccaagttagagaattgaaaacaaaaatttcagctatgaaagaagaaaaagaacagcttagtgctgaaagacaagagcagattaagcagaggactaagttggagcttaaagccaaggatttacaagatgaactagcaggcaatagtgaacaaaggaaacgtttattaaaagagaggcagaagctgcttgaaaaaatagaagaaaagcagaaagaactggcagaaacagaacccaaattcaacagtgtgaaagagaaagaagaacgaggaattgctagattggctcaagctacccaggaaagaacggatctttatgcaaagcagggtcgaggaagccagtttacatcaaaagaagaaagggataagtggattaaaaaggaactcaagtctttagatcaggctattaatgacaagaaaagacagattgctgctatacataaggatttggaagacactgaagcaaataaagagaaaaatctggagcagtataataaactggaccaggatcttaatgaagtcaaagctcgagtagaagaactggacagaaaatattacgaagtaaaaaataagaaagatgaactacaaagtgaaagaaactacttgtggagagaagagaatgcagaacagcaagcacttgctgctaaaagagaagatcttgaaaagaagcaacaacttcttagagcagcaacaggaaaggccattttaaatggaatagacagcataaacaaagtgctagaccacttccgtcgaaaaggaataaaccagcatgttcaaaatggctatcatggtattgtaatgaataactttgaatgtgaaccagctttctacacatgcgtggaagtcactgctggaaacaggttattttatcacattgttgattcagatgaagtcagcacgaagattttaatggagtttaataaaatgaatcttcctggagaggttacttttctgcctcttaacaagttagatgtcagggatacagcctatcctgaaaccaatgatgctattcctatgatcagcaaactgaggtacaatcccagatttgacaaagctttcaaacatgtgtttggaaagactcttatttgtcgtagcatggaagtttcaacccagctggcccgtgctttcactatggactgtattactttggaaggtgaccaagtcagccatcggggtgctctaactgggggttattatgacacaaggaagtctcgacttgaattgcaaaaagatgttagaaaagcagaagaagaactaggtgaacttgaagcaaagctcaatgaaaacctgcgcagaaatattgaaaggattaataatgaaattgatcagttgatgaaccaaatgcaacagatcgagacccagcaaaggaaatttaaagcatctagagatagcatattatcagaaatgaagatgctaaaagagaagaggcagcagtcagagaaaaccttcatgcctaagcaacgtagcttacagagtttggaggcaagcttgcatgctatggagtctaccagagagtcattgaaagcagaactgggaactgatttgctttctcaactgagtttggaagatcagaagagagtagatgcactgaatgatgagattcgtcaacttcagcaggaaaacagacagttgctaaatgaaagaattaaattagaaggtattattactcgagtagagacttatctcaatgagaatctgagaaaacgcttggaccaagtagaacaggaacttaatgagctgagagagacagaagggggtactgttctcacagccacaacatcagaacttgaagccatcaataaaagagtaaaagacactatggcacgatcagaagatttggacaattccattgataaaacagaagctggaattaaggagcttcagaagagtatggagcgctggaaaaatatggaaaaagaacatatggatgctataaatcatgatactaaagaactggaaaagatgacaaatcggcaaggcatgctattgaagaagaaagaagagtgtatgaagaaaattcgagaacttggatcacttccccaggaagcatttgaaaagtaccagacactgagcctcaaacagttgtttcgaaaacttgagcagtgcaacacagaattaaagaagtacagccatgttaacaaaaaggctttggatcagtttgtaaatttctccgagcagaaagaaaagttaataaagcgtcaagaagagttagataggggttacaaatcgatcatggaactgatgaatgtacttgaacttcggaaatatgaagctattcagttaactttcaaacaggtatctaagaacttcagtgaagtattccagaagttagtacctggtggcaaagctactttggtgatgaagaaaggagatgtggagggcagtcagtctcaagatgaaggagaagggagtggtgagagtgagaggggttctggctcacaaagcagtgtcccatcagttgaccagtttactggagttggaattagggtgtcatttacaggaaaacaaggtgaaatgagagaaatgcaacagctttcaggtggacagaaatccttggtagcccttgctctgatttttgccattcagaaatgtgacccggctccattttacttgtttgatgaaattgaccaggctctggatgctcagcacagaaaggctgtgtcagatatgattatggaacttgctgtacatgctcagtttattacaactacttttaggcctgaactgcttgagtcagctgacaaattctatggtgtaaagttcagaaataaggttagtcatattgatgtgatcacagcagagatggccaaagactttgtagaagatgataccacacatggttaattggaaaatactacctactggtttgggagatgtatatagtaatatgattctcatacccaggaactgtaaatttaaacctaaatatttggccaatagttttcagacttaaagcatcatagtccttttatatttgtctttgtattttataagatactctgtaatgtcatgtttgtactgatagtttaagaatttaatttcctgtacaactttttgtaaaatgttctgctcctattttaaatgttttgaaacatgctaaatattctttcctaattattttatcacttatactaccttttttatagcttcaattaaataatcggttttatgactaaaaaaaaaaaaaaaaaaaaa

SEQ ID NO: 904 - protein, 1217 aa, Homo sapiens
MYIKQVIIQGFRSYRDQTIVDPFSSKHNVIVGRNGSGKSNFFYAIQFVLSDEFSHLRPEQRLALLHEGTGPRVISAFVEIIFDNSDNRLPIDKEEVSLRRVIGAKKDQYFLDKKMVTKNDVMNLLESAGFSRSNPYYIVKQGKINQMATAPDSQRLKLLREVAGTRVYDERKEESISLMKETEGKREKINELLKYIEERLHTLEEEKEELAQYQKWDKMRRALEYTIYNQELNETRAKLDELSAKRETSGEKSRQLRDAQQDARDKMEDIERQVRELKTKISAMKEEKEQLSAERQEQIKQRTKLELKAKDLQDELAGNSEQRKRLLKERQKLLEKIEEKQKELAETEPKFNSVKEKEERGIARLAQATQERTDLYAKQGRGSQFTSKEERDKWIKKELKSLDQAINDKKRQIAAIHKDLEDTEANKEKNLEQYNKLDQDLNEVKARVEELDRKYYEVKNKKDELQSERNYLWREENAEQQALAAKREDLEKKQQLLRAATGKAILNGIDSINKVLDHFRRKGINQHVQNGYHGIVMNNFECEPAFYTCVEVTAGNRLFYHIVDSDEVSTKILMEFNKMNLPGEVTFLPLNKLDVRDTAYPETNDAIPMISKLRYNPRFDKAFKHVFGKTLICRSMEVSTQLARAFTMDCITLEGDQVSHRGALTGGYYDTRKSRLELQKDVRKAEEELGELEAKLNENLRRNIERINNEIDQLMNQMQQIETQQRKFKASRDSILSEMKMLKEKRQQSEKTFMPKQRSLQSLEASLHAMESTRESLKAELGTDLLSQLSLEDQKRVDALNDEIRQLQQENRQLLNERIKLEGIITRVETYLNENLRKRLDQVEQELNELRETEGGTVLTATTSELEAINKRVKDTMARSEDLDNSIDKTEAGIKELQKSMERWKNMEKEHMDAINHDTKELEKMTNRQGMLLKKKEECMKKIRELGSLPQEAFEKYQTLSLKQLFRKLEQCNTELKKYSHVNKKALDQFVNFSEQKEKLIKRQEELDRGYKSIMELMNVLELRKYEAIQLTFKQVSKNFSEVFQKLVPGGKATLVMKKGDVEGSQSQDEGEGSGESERGSGSQSSVPSVDQFTGVGIRVSFTGKQGEMREMQQLSGGQKSLVALALIFAIQKCDPAPFYLFDEIDQALDAQHRKAVSDMIMELAVHAQFITTTFRPELLESADKFYGVKFRNKVSHIDVITAEMAKDFVEDDTTHG

SEQ ID NO: 905 - DNA, 2808 bp, Homo sapiens
agggactggcgcgccaggtgtatgatagtgggccgtcggccgctacgtcgcacggagcccacgaaggggacatgcgcagccggcccagagctcgggtctccggggaccgagccttatgatctcctcattgcgtccccctctgcccactggacttggacttcagatctgaccccagacctgccggctacctcgggagggcccacctccccgcccatccagcaagatgccaatcctcaagcaactggtgtccagctcggtgcactccaagcgccgttcccgagcggacctcacggccgagatgatcagcgccccgctgggcgacttccgccacaccatgcacgttggccgggccggagacgcctttggggacacctccttcctcaatagcaaggctggcgagcccgacggcgagtccttggacgaacagccctcttcttcatcttccaaacgcagtctcctgtccaggaagttccggggcagcaagcggtcacagtcggtgaccaggggggagcgggagcagcgtgacatgctgggctccctgcgggactcggccctgtttgtcaagaatgccatgtccctgccccagctcaatgagaaggaggccgcggagaagggcaccagtaagctgcccaagagcctgtcatccagccccgtgaagaaggccaatgacggggagggcggcgatgaggaggcgggcacggaggaggcagtgccccgtcggaatggggccgcgggtccacattcccctgaccccctcctcgatgagcaggcctttggggatctgacagatctgcctgtcgtgcccaaggccacgtacgggctgaagcatgcggagtccatcatgtccttccacatcgacctggggccctccatgctgggtgacgtcctcagcatcatggacaaggaggagtgggaccccgaggagggggagggtggttaccatggcgatgagggcgccgctggcaccatcacccaggctcccccgtacgccgtggcggcccctcccctggcaaggcaggaaggcaaggctggcccagacttgccctccctcccctcccatgctctggaggatgaggggtgggcagcagcggcccccagccccggctcagcccgcagcatgggcagccacaccacacgggacagcagctccctctccagctgcacctcaggcatcctggaggagcgcagccctgccttccgggggccggacagggcccgggctgctgtctcaagacagccagacaaggagttctccttcatggatgaggaggaggaggatgaaatccgtgtgtgaggcggacagtgggtggccaccgggagctcttggctgcatctcctccctgcccccaccccactatgacctttgaccctacggcgcaggggcagccaggacccttgattcagaccatggaccctggaccttgtagatgagggacactggcctggccctcgggtcttcggaggacgtagggggctggcatgggtgccgactggctgcctgacttcatcacgctccctgcacttaggctgcgtgggacaagggctgtgttgtcacagcaggaataggttttcctctgttggcctcccttttcctccaccctggcctcaaatggatgccagatgccaaccccagttctggccacgtacagccagcgggtcagcccagaggcagcctcagctccagggctaaggactctcggctcccattttctctgctggcgtttctgctgtgcccagcagtggctgctggggaagcagctgcagcaggagggagacggtcttgcctctcagcccctccctgccccaccccagctcctgccctggaaatctggagccccttggagctgagctggacggggggccagctgcgagcatgtgcactaaacgcagccctttccaggggaagagagcaggatggagaatggaaggaaagccccccaggcttcgtgaattgcaagaagggaccctggtgtgtgtgttttccctacgcacctcccatagctattaacaactgaggaaggccagtgcagaatatttttggagaacgattttttttttaaataatatatcattcctatggggggaaagccttttttttctttttggctgagttattccctccctcccctcaataccctcagtactgactacttccctttcttttctcaggcctccccccaccgacttttgaggccagggttggccagatttagcaaaaccaaaacagagtgctgagttaaacgcaaatttcaggtagacaaaagataattttctagcattaatatgccccacgcaatatttggaacacttatgtgaaaaatgatttgtttttctgaaatttacgtttctctctgagtcctgtaactgtccccgaggggattgagcagaagctcgggtatgagcccctgaggttgactgccggttatttttctgtcctgggaacagcctgacccacctccctgtctccatgtagccagtggggggagggggagacacagaacctaccacagccaggggcgtccccatggcgactgtggcccggcccctcctctcttgcctgactctcctctcttgcctgactctagacactaacttagttccaggttcggtgccctgttggtgctcctgtttccaatagcttaggtcccatggtgggggaggaacctcaggggctatgcagcccccgccagctgccctcaaatcccgtccaggccagttccagattctaaactgatttttttcatgatattgtcaaaacagtgaggaaacattaaaaaaaaagccctaaagcaaaaaaaaaaaaaaaaa

SEQ ID NO: 906 - protein, 356 aa, Homo sapiens
MPILKQLVSSSVHSKRRSRADLTAEMISAPLGDFRHTMHVGRAGDAFGDTSFLNSKAGEPDGESLDEQPSSSSSKRSLLSRKFRGSKRSQSVTRGEREQRDMLGSLRDSALFVKNAMSLPQLNEKEAAEKGTSKLPKSLSSSPVKKANDGEGGDEEAGTEEAVPRRNGAAGPHSPDPLLDEQAFGDLTDLPVVPKATYGLKHAESIMSFHIDLGPSMLGDVLSIMDKEEWDPEEGEGGYHGDEGAAGTITQAPPYAVAAPPLARQEGKAGPDLPSLPSHALEDEGWAAAAPSPGSARSMGSHTTRDSSSLSSCTSGILEERSPAFRGPDRARAAVSRQPDKEFSFMDEEEEDEIRV

SEQ ID NO: 907 - DNA, 8444 bp, Homo sapiens
ggtatcgataagcttgatcagtgctggaggccacattgcagttgggcagcaagggcttggtagtgtgaaggacccaagtaactgtgggatgcctctgacccctcccacctctccagaacaggctatcctaggtgagagtggaggtatgcagagtgctgccagtcacctggtttcccaagatggagggatgataacgatgcacagtccaaagagatcggggaagattcctccaaaactccacaatcatatggtccatcgagtctggaaggaatgcatcctcaacagaacccagtccaagaggagccaaatgtcaactccaactcttgaagaagagcctgctagcaatcctgctacttgggattttgtggatccaacccaaagagtcagctgttcttgttccaggcataagcttttaaaacgttgtgcagtcgggcccaatcgacctcccacagtatctcaaccagggttcagtgcaggaccatcatcatcttcatctttaccacctcctgcttcttctaagcacaaaacagcagaaagacaggaaaaaggagacaagctgcaaaagagacccttaataccatttcaccataggccctctgtggccgaagaattatgcatggagcaagatacaccaggacagaaactagggttggcagggatagactcctccttagaggtgtctagcagtaggaaatatgataagcaaatggccgtgccttccagaaatacaagcaagcaaatgaatctgaatcctatggattcacctcattcccctatatcccctctgccaccaacactcagccctcagccacgaggtcaggaaacagagagtttggacccaccatcggtccctgtgaatccagccctttatggaaatggactagaactccagcagttgtctactctggatgacagaactgtcctcgtaggccaaagactgcctctcatggcagaggtcagcgagacagccttatattgtgggattaggccctcgaacccggagtcatcagaaaagtggtggcatagttatcgtctcccacccagtgatgatgctgagttcaggcctccagagctccagggtgagagatgtgatgccaaaatggaggtaaactcagagagcactgcattgcaaagactcttagcacaacctaacaaacggtttaaaatctggcaagacaaacagccccagttgcagccactccacttccttgacccattgcctctatcacaacaacctggagacagtttgggagaagtgaatgacccatatacctttgaagatggtgacataaaatacatctttacagccaacaagaaatgcaaacaagggacggagaaagattccctgaaaaagaataagtcagaggatggatttggtaccaaggatgtcactacaccaggtcattccacgccggtgcctgatgggaaaaatgccatgtctattttcagttctgctactaaaacagatgtccggcaggataatgctgctggcagagctggctccagtagccttacacaggtaacagatttggcaccttccctgcatgacttagacaacatctttgataattctgatgacgacgaacttggggctgtatcacctgctctgcgctcatcaaaaatgcctgcagttgggacagaagaccgacctcttgggaaggatggaagagctgctgttccttatccaccaacagttgcagacttgcaaaggatgtttcccactccaccatctttggaacagcatcctgcattttctcctgtgatgaattataaagatgggatcagctcagagacagtgacagcattaggcatgatggagagccctatggtcagtatggtttcaacacaactcacagaattcaaaatggaagtggaagatggattaggaagtcccaagcccgaggaaattaaggacttttcatatgtgcacaaagttccatcctttcaaccttttgtgggatcctccatgtttgctccactgaagatgttgccgagccattgtttgctacctctgaagatacctgatgcctgtctgtttcggccttcatgggcaattcctcctaaaattgaacaactgcccatgccccctgcagccactttcattagagatggctacaataacgtgcctagtgttgggagcctagcagatccagactatctgaacacaccacagatgaacacacccgtgacgttgaacagcgctgccccagccagcaatagtggggcaggagtcctaccatctccagcaacccctcgcttctctgtccccacaccacgaacccccaggaccccaagaactcccagaggtgggggcactgccagtggtcaagggtctgttaagtatgatagcaccgatcaaggatcaccagcctccaccccctctactacacggcccctcaactctgtggagcccgccaccatgcagccaattcccgaagcccacagcctctatgttaccctgattctctccgattccgtgatgaatatctttaaagacagaaactttgacagctgttgcatctgtgcctgcaacatgaacatcaaaggggcggatgtcgggctttacatccccgattcttccaatgaggaccagtaccgctgtacctgtgggtttagtgcgattatgaaccgcaaacttggctacaattcaggactcttccttgaagatgagttggatatttttgggaagaattctgatattggtcaggctgcagagaggcgcttaatgatgtgtcagtccaccttccttcctcaggtggaaggaaccaaaaaaccccaggagccacccataagccttctcctcctcctccagaatcaacacacacaaccttttgcttcactgaatttcctggactacatttcctctaacaatcgccaaactcttccctgtgtaagctggagttatgaccgggtgcaagcagataataatgattactggacggaatgctttaatgcgttggagcaggggcggcagtatgtggataaccccactggtggaaaagtggacgaagctctggtgagaagtgccactgtgcactcttggcctcacagcaatgtgctggacatcagcatgctctcctcccaggatgtggttcgtatgctgttgtccctgcagccctttctccaagatgccatccaaaagaagcgcacgggcaggacctgggagaacatccagcatgtgcagggaccactcacttggcagcagttccataaaatggcaggacggggaacctacggttcggaagaatctcctgagccgttgcccatccccactctgctggtaggctatgacaaggatttcctcaccatctcgccattctccttgccgttttgggagaggctcttgttggacccatatgggggccaccgtgatgttgcctatattgtggtgtgtccagaaaatgaggccttgctcgaaggagccaaaactttcttcagggacttgagtgctgtatacgagatgtgtaggcttgggcagcacaagcccatctgcaaagtgctacgtgacgggatcatgcgcgtgggaaaaactgtggcacagaagctgacagatgagcttgtgagtgagtggtttaaccagccttggagcggcgaggagaatgacaatcattccagactcaaactttatgcgcaagtttgccgccatcacctagcaccttatttagccactctgcagcttgatagcagcctattgataccacctaaataccagaccccaccagcagcagcacagggacaagctacgccagggaatgctgggcccttagctccaaatggatcagcagctcccccagctggcagtgcatttaatcccacctcgaatagtagttctacaaatcctgcagcaagtagttctgcatctggttcctctgtgccaccggtctcatcgtctgcctctgctcctggtattagccagataagcactacctcttcttcaggattcagtggtagtgttggagggcagaaccccagcactgggggcatttctgcggatagaacgcaagggaacataggctgtggtggagacactgaccctgggcagagctcttctcagccctcacaggatggacaagagagtgttacagaaagggagagaataggaattcccacggagcctgactctgcagacagccatgcccaccctccagctgttgtcatttacatggtggacccgttcacgtatgctgcagaggaggactccacttctgggaacttttggctgttgagcttgatgcgctgctacacagaaatgctggataatttacctgagcatatgagaaattctttcattctccagattgtgccttgccagtacatgctgcagacaatgaaggatgagcaagttttctacattcaatacttgaagtccatggcattttcagtgtactgccagtgcaggcgaccactgcctacacagatccacattaaatccctcacgggatttgggcctgcagccagcattgagatgaccctcaagaaccctgagcggcccagcccaatccagctttactcccctccctttatattggccccaatcaaagacaagcagacagagctgggagagacgtttggtgaggcgagccagaaatacaatgtgctcttcgtgggctattgtctgtctcacgaccagcgctggcttttggcttcctgcactgacctccatggggaattattagagacctgcgttgtaaatattgctttaccaaacaggtcacggaggagtaaagtatctgcacgtaaaattggactacagaagttatgggagtggtgcatagggattgtccaaatgacatctctaccctggagagttgtaatcgggcgacttgggcgtcttggccatggggagcttaaagattggagtatcctccttggagaatgttcactacagacaatcagcaaaaagctcaaggatgtgtgccggatgtgtggaatctctgccgcagactctccttctatccttagtgcctgcctggttgccatggagccccaggggtcctttgtagtgatgccagatgctgtcacaatgggctctgtttttggccgaagtaccgcactgaacatgcagtcatctcagctcaacacccctcaagatgcttcttgtacacacatcttggtgttcccaacatcatcaaccatccaggtggctccagccaactaccccaatgaagatgggtttagccccaacaatgatgatatgtttgttgaccttccattcccagatgatatggacaatgatattggcatattaatgactgggaacctccattcctctcccaactcttccccagtaccctccccaggctctccttctggaattggtgtgggctctcacttccagcatagtcggagccagggtgagcgtcttctttctagagaagcaccagaggagctaaagcagcagcccctggcccttgggtattttgtatcaactgccaaagctgagaatcttccccagtggttttggtcatcgtgtccccaggctcaaaaccagtgccctctcttcttaaaggcttcgctgcatcaccacatttcagtagcacagacagacgaacttctgcctgccaggaattctcagcgggttccacaccctcttgactccaaaaccacgtcggatgttttaaggtttgttttggagcagtacaacgctctgtcctggctcacgtgcaatccggccacccaggaccgtacttcctgccttcccgtccactttgtggtgctcactcagttgtacaatgccatcatgaatatactttaattggaaaagcacttgttctctctggctcagttccttctccctgcaacctcagtccaaggaacctgctacactctgcaaataacccacatccttttcttcagaccactctccacagtcctgcactgtgattccttctcagcaggcacatgtcaattctgcagtgttcattaccagagtgactccttgacacttctctcatggacctggaaacttccataagtggtgactttcagccagtgcggtggtgtgtgtagccccaaccactggtccccaggaagtggtggtggttgatggcttttcagcgggaaacagaagagacagtgtccttttgcacaagagtctgtgttttcagcctctgtatacaattgagggcagtctagccctttggatgaaatcctcttagttactggtgtatggcctgtgggttacctgaactccataatcggggactttttaaaaataagaaccagctcaagtacatggtttcatactggggtttctgtctccctagtgttcccatccagattagcatgagtgctttggttgacttcaaacctgtgtgtcaatgcagaaggtctggagacagcttcattttgtttatttattttaatttgttttgtcatatggtttttgtgactttatttttttaattcacaaggaccaggtacagtagctgaaacccaattcagatccaccataggattctttgactacatacctctgtcctagaagccggaaaaggagtaaaaacacattggggagatcatgcctaaaagtaatatattcaaaaccacccagcagtaggttttgttaacaacaaactggattttaaaagttctgccatgttaagtggccagcatttcatgaaggataacatttttatacagaaggcagtcaagctcaactcagagccatggaggcaagtaccttaattagttttatatagtcacaacggaaatatattttctagtgaattcttattggaagccaggtctctcctctcattagatcaaaagggacttatgtacatacaacaattgaaagtgtttgctcatgaaatcagttataaatatggtgaatttttttctggaccataggaatattatttcaaagaaatattacaacttaaccattaaattagtacttgaagttgagcctttgtggtgggactttttaaaaaaatgcctttttaaagcattaatggctaattgaagtattttatgactcctcattcctggcccagagggttgtctttgaaaccctgtttctaacccttgtgttgtgtgtttctgtctgaggacagtgggtgtgtactggcctcccgggagccactgtgaccaggcctttgagctcttgtcatctgtggagagaatcatgcaaattttaaaagttcttccaagagacttccatgtcctggttattaacaaaaaagaaaaaatgtaataattgatatgattttgtaaaagtatttttcttgaaataatctaaagtttaaaacattatattaaaaaaaaagttgtgtggtgggaatgtgaaagcagagaaataacttgtaaatggataattttgttctctgtaccaccagttgaagggggggttgactttcgcaatgtataggataaaaaatctgatatatcaaaccatttgtatctaatgtgtacagtgtaaaattgactttaaaaatattgcagtgctattttttcttaatcagaaaggaaaattctcaaggccttttgaagagcataagaagatgaagattgtaaacttgtataaaattatcttggtgagaagacaaattgtaaagtagatatttgtaatcttttaccactttggggttgcttttttcccggaattcatcagaactttgaattttttttttaaatgggctgtttttaatgcaggggcttttcttccctagaaacccaattctaagcagaaaaagaaaaaaaacacaaaaaataaaaaacccctacaaaaaaactttaaaaaaaatggcagcaaagggtagttttcatctggtgtcttttatttaagttttttaagttaagaaaagctggtgacatatttatacgtttttgtgcaaaaataaatgaatggcaatagattttaaaaaatcttattatgtacttctgtgtgaaaaagtctgtataatatttcccttaaatatgcattattttacttgtgagttttttactgaattaatctgaaatgtacaagccctggatttgctacagagtgagaagttattttatttttttttatttttaattttggaaattctgcagaaatcagaactcttaccatggtttgaacaaaaaaaggggaaatggggaggggaaaagggtgggattgtccagcatgcttgtatgtatatttcagaaccttttttaaatgtaaaagctgtacatttctgggaagttctgaatttcttttgtttccttttttccttcaagcattttgcagtgagcttcttttatatatagcaaacaatttgaaagaatacaaaaatatgtgaagttcatttaaaaaaataactacagtatagcgctggtacagtacactaaaagactttgataaaaagaaacaataataaaaggcctccattttaaatgtcattcatatataccttgtggatgagagctatatacttttacacacttttttagaggaataaattattgaattactg

SEQ ID NO: 908 - protein, 1917 aa, Homo sapiens
VSISLISAGGHIAVGQQGLGSVKDPSNCGMPLTPPTSPEQAILGESGGMQSAASHLVSQDGGMITMHSPKRSGKIPPKLHNHMVHRVWKECILNRTQSKRSQMSTPTLEEEPASNPATWDFVDPTQRVSCSCSRHKLLKRCAVGPNRPPTVSQPGFSAGPSSSSSLPPPASSKHKTAERQEKGDKLQKRPLIPFHHRPSVAEELCMEQDTPGQKLGLAGIDSSLEVSSSRKYDKQMAVPSRNTSKQMNLNPMDSPHSPISPLPPTLSPQPRGQETESLDPPSVPVNPALYGNGLELQQLSTLDDRTVLVGQRLPLMAEVSETALYCGIRPSNPESSEKWWHSYRLPPSDDAEFRPPELQGERCDAKMEVNSESTALQRLLAQPNKRFKIWQDKQPQLQPLHFLDPLPLSQQPGDSLGEVNDPYTFEDGDIKYIFTANKKCKQGTEKDSLKKNKSEDGFGTKDVTTPGHSTPVPDGKNAMSIFSSATKTDVRQDNAAGRAGSSSLTQVTDLAPSLHDLDNIFDNSDDDELGAVSPALRSSKMPAVGTEDRPLGKDGRAAVPYPPTVADLQRMFPTPPSLEQHPAFSPVMNYKDGISSETVTALGMMESPMVSMVSTQLTEFKMEVEDGLGSPKPEEIKDFSYVHKVPSFQPFVGSSMFAPLKMLPSHCLLPLKIPDACLFRPSWAIPPKIEQLPMPPAATFIRDGYNNVPSVGSLADPDYLNTPQMNTPVTLNSAAPASNSGAGVLPSPATPRFSVPTPRTPRTPRTPRGGGTASGQGSVKYDSTDQGSPASTPSTTRPLNSVEPATMQPIPEAHSLYVTLILSDSVMNIFKDRNFDSCCICACNMNIKGADVGLYIPDSSNEDQYRCTCGFSAIMNRKLGYNSGLFLEDELDIFGKNSDIGQAAERRLMMCQSTFLPQVEGTKKPQEPPISLLLLLQNQHTQPFASLNFLDYISSNNRQTLPCVSWSYDRVQADNNDYWTECFNALEQGRQYVDNPTGGKVDEALVRSATVHSWPHSNVLDISMLSSQDVVRMLLSLQPFLQDAIQKKRTGRTWENIQHVQGPLTWQQFHKMAGRGTYGSEESPEPLPIPTLLVGYDKDFLTISPFSLPFWERLLLDPYGGHRDVAYIVVCPENEALLEGAKTFFRDLSAVYEMCRLGQHKPICKVLRDGIMRVGKTVAQKLTDELVSEWFNQPWSGEENDNHSRLKLYAQVCRHHLAPYLATLQLDSSLLIPPKYQTPPAAAQGQATPGNAGPLAPNGSAAPPAGSAFNPTSNSSSTNPAASSSASGSSVPPVSSSASAPGISQISTTSSSGFSGSVGGQNPSTGGISADRTQGNIGCGGDTDPGQSSSQPSQDGQESVTERERIGIPTEPDSADSHAHPPAVVIYMVDPFTYAAEEDSTSGNFWLLSLMRCYTEMLDNLPEHMRNSFILQIVPCQYMLQTMKDEQVFYIQYLKSMAFSVYCQCRRPLPTQIHIKSLTGFGPAASIEMTLKNPERPSPIQLYSPPFILAPIKDKQTELGETFGEASQKYNVLFVGYCLSHDQRWLLASCTDLHGELLETCVVNIALPNRSRRSKVSARKIGLQKLWEWCIGIVQMTSLPWRVVIGRLGRLGHGELKDWSILLGECSLQTISKKLKDVCRMCGISAADSPSILSACLVAMEPQGSFVVMPDAVTMGSVFGRSTALNMQSSQLNTPQDASCTHILVFPTSSTIQVAPANYPNEDGFSPNNDDMFVDLPFPDDMDNDIGILMTGNLHSSPNSSPVPSPGSPSGIGVGSHFQHSRSQGERLLSREAPEELKQQPLALGYFVSTAKAENLPQWFWSSCPQAQNQCPLFLKASLHHHISVAQTDELLPARNSQRVPHPLDSKTTSDVLRFVLEQYNALSWLTCNPATQDRTSCLPVHFVVLTQLYNAIMNIL

SEQ ID NO: 909 - DNA, 4666 bp, Homo sapiens
aagtcagcgctggagtcggctaggcggctggaaacggcggctgccgccggtgactcagggaggcgggaggcgggggaggagctcttcctgcaggcgtggaaaccatggtgctcacgctcggagaaagttggccggtattggtggggaggaggtttctcagtctgtccgcagccgacggcagcgatggcagccacgacagctgggacgtggagcgcgtcgccgagtggccctggctctccgggaccattcgagctgtttcccacaccgacgttaccaagaaggatctgaaggtgtgtgtggaatttgatggggaatcttggaggaaaagaagatggatagaagtctacagccttctaaggagagcatttttagtagaacataatttggttttagctgaacgaaagtcacctgaaatttctgaacgaattgtacagtggcctgcaataacgtacaaacctctgttggacaaagctggtttgggatccataacttctgttcgctttctgggagatcaacaaagagtatttctttctaaagaccttttgaagcctatacaggatgtaaacagtcttcgactttctcttacggataatcagattgtcagtaaagaatttcaagctttgattgtgaagcatttagatgaaagccatcttttaaaaggtgacaaaaacttagttggttcagaagtaaaaatttatagcttggacccatctactcagtggttttcagcaaccgttataaatggaaacccagcatcaaaaactcttcaagtcaactgtgaggagattccagcactgaaaattgttgatccgtcactgattcatgttgaagttgtacacgataaccttgtgacatgtggtaattctgcaagaattggagctgtaaaacgcaagtcttctgagaataatggaaccctggtttccaaacaagcaaaatcttgctctgaggcctctcccagtatgtgtcctgtgcagtctgtacctacaacagtttttaaggagatactgcttggctgtactgcggcaactccacctagtaaggacccaagacagcaaagtactccccaggctgccaactctccacctaaccttggagcaaaaattcctcaaggatgtcataaacaaagtttaccagaggaaatttcttcctgtctaaatacaaagtctgaagctctgagaacaaaaccagatgtctgcaaagcagggttgctctcaaagtcctctcagattggaactggagacttgaaaattctgactgagccaaaaggcagctgtactcagcctaagacaaacactgatcaggaaaacagattggagtctgttccacaagcattgactggccttcctaaggagtgcttacctacaaaggcttcttctaaggcagaattggaaattgccaatcctcctgaactgcagaagcacctagaacatgcaccttccccatcggatgtttcaaatgcaccagaagtgaaagcaggtgtcaatagtgatagccctaataactgttcaggaaaaaaggtagaaccttcagctttagcttgccgatcacagaatttaaaggaatcttcagtaaaagtagataatgaaagctgttgttcaagaagcaacaataaaatccagaatgccccatccaggaagtcggttttgacagacccagctaaactcaaaaagctgcaacagagtggcgaggccttcgtacaggatgattcttgtgtgaacatcgtggcacagttgcctaaatgccgagagtgtcgcttggacagtctccgcaaggataaggagcaacagaaggactcacctgtgttttgccgcttctttcacttcaggaggttacaattcaacaaacatggtgtgttgcgggtagaaggcttcttaacaccaaacaagtatgacaatgaagcaattggcttgtggttacctttaaccaaaaacgttgtggggattgatttggacacagcaaagtacatcttggccaacattggagaccacttctgtcaaatggtgatttctgaaaaggaagctatgtcaactattgagccacacagacaggttgcttggaagcgagctgtcaaaggtgttcgagaaatgtgtgatgtgtgcgacaccaccatcttcaacctgcactgggtgtgtcctcggtgtgggtttggagtatgtgtggactgctaccggatgaagagaaagaattgccaacagggtgctgcttacaagactttctcttggctaaaatgtgtgaagagtcagatacatgaaccagagaacttaatgcccacacagatcattcctggaaaagcactctatgatgttggagacattgttcattctgtaagagcgaaatggggaataaaggcaaactgcccttgttcaaacaggcaattcaaactcttttcaaagccagcctcaaaggaagacctaaaacagacttctttagctggagaaaaaccgactcttggtgcagtgctccagcagaatccctcagtgttggagccagcagctgtgggtggggaagcagcctccaagccagccggcagcatgaagcctgcctgtccagccagcacatctcctctaaactggctggccgacctaaccagcgggaatgtcaacaaggaaaacaaggaaaaacaaccaacaatgccaattttaaagaatgaaatcaaatgccttccacccctcccacctttaagcaaatccagcacagtcctccatacgtttaacagcacaattttgacacccgtaagcaacaacaattctggtttcctccggaatctcttgaattcttctacaggaaagacagaaaatggactcaagaatacaccaaaaatccttgatgacatctttgcctctttggtgcaaaataagacgacttctgatttatctaagaggcctcaaggactaaccatcaagcccagcattctgggctttgacactcctcactattggctttgtgataatcgcttgctgtgcttgcaagaccccaacaataagagcaactggaatgtgtttagggagtgctggaaacaagggcagccagtgatggtgtctggagtgcatcataaattgaactctgaactttggaaacctgaatccttcaggaaagagtttggtgagcaggaagtagacctagttaattgtaggaccaatgaaatcatcacaggagccacagtaggagacttctgggatggatttgaagatgttccaaatcgtttgaaaaatgaaaaagaaccaatggtgttgaaacttaaggactggccaccaggagaagattttagagatatgatgccttccaggtttgatgatctgatggccaacattccactgcccgagtacacaaggcgagatggcaaactgaatttggcctctaggctgccaaactactttgttcggccagatctgggccccaagatgtataatgcttatggattaatcactcctgaagatcggaaatatggaacaacaaatcttcacttagatgtatctgatgcagctaatgtcatggtctatgtgggaattcccaaaggacagtgtgagcaagaagaagaagtccttaagaccatccaagatggagattctgacgaactcacaataaagcgatttattgaaggaaaagagaagccaggagcactgtggcacatatatgctgcaaaggacacggagaagataagggaatttcttaaaaaggtatcagaagagcaaggtcaagaaaacccagcagaccacgatcctattcatgatcaaagctggtatttagaccgatcattaagaaaacgtcttcatcaagagtatggagttcaaggctgggctattgtacagtttcttggggatgtggtgtttatcccggcaggagctccacatcaggttcataacttatatagctgcatcaaagtggctgaagattttgtttctccagagcatgttaaacactgcttctggcttactcaggaattccgatatctgtcacagactcataccaatcacgaagataaattacaggtgaagaatgttatctaccatgcagtgaaagatgcagttgctatgctgaaagccagtgaatccagttttggcaaaccttaatctccctgcacattggaaatgaattacaggcagctgttcaaactcttcaggcaggattcctgtggactttgagattcatgttacctcatcttcttttttaaactgtacccaacttgtgagggtactctgtctaatgtatatttctagtgtttacagacagtaaatgtgtatatgtagtaactatttacagaacatgcatccttaaactgtgacttctcacctagtgcagaacttttaccaggctgtaaaagcaaaacctcgtatcagctctggaacaatacctgcagttattcttcagctgtttggacaacttagattgggtttataactattaggaatcactgcacagtttatttgggttgtgttttgtgtctgagtcccctccctcatcccttagggtccagaagagcaatggaggaagtgacagctaatgttgcagttcttattgtatggcataggactggcattatatagcagaaatcaactactgtacaatttcttggggttaaccatctttagttaaatggaattttaatttaaatgacgctttgctaattttaagtgttaagcattttgcattaaaatattcatataat

SEQ ID NO: 910 - protein, 1321 aa, Homo sapiens
MVLTLGESWPVLVGRRFLSLSAADGSDGSHDSWDVERVAEWPWLSGTIRAVSHTDVTKKDLKVCVEFDGESWRKRRWIEVYSLLRRAFLVEHNLVLAERKSPEISERIVQWPAITYKPLLDKAGLGSITSVRFLGDQQRVFLSKDLLKPIQDVNSLRLSLTDNQIVSKEFQALIVKHLDESHLLKGDKNLVGSEVKIYSLDPSTQWFSATVINGNPASKTLQVNCEEIPALKIVDPSLIHVEVVHDNLVTCGNSARIGAVKRKSSENNGTLVSKQAKSCSEASPSMCPVQSVPTTVFKEILLGCTAATPPSKDPRQQSTPQAANSPPNLGAKIPQGCHKQSLPEEISSCLNTKSEALRTKPDVCKAGLLSKSSQIGTGDLKILTEPKGSCTQPKTNTDQENRLESVPQALTGLPKECLPTKASSKAELEIANPPELQKHLEHAPSPSDVSNAPEVKAGVNSDSPNNCSGKKVEPSALACRSQNLKESSVKVDNESCCSRSNNKIQNAPSRKSVLTDPAKLKKLQQSGEAFVQDDSCVNIVAQLPKCRECRLDSLRKDKEQQKDSPVFCRFFHFRRLQFNKHGVLRVEGFLTPNKYDNEAIGLWLPLTKNVVGIDLDTAKYILANIGDHFCQMVISEKEAMSTIEPHRQVAWKRAVKGVREMCDVCDTTIFNLHWVCPRCGFGVCVDCYRMKRKNCQQGAAYKTFSWLKCVKSQIHEPENLMPTQIIPGKALYDVGDIVHSVRAKWGIKANCPCSNRQFKLFSKPASKEDLKQTSLAGEKPTLGAVLQQNPSVLEPAAVGGEAASKPAGSMKPACPASTSPLNWLADLTSGNVNKENKEKQPTMPILKNEIKCLPPLPPLSKSSTVLHTFNSTILTPVSNNNSGFLRNLLNSSTGKTENGLKNTPKILDDIFASLVQNKTTSDLSKRPQGLTIKPSILGFDTPHYWLCDNRLLCLQDPNNKSNWNVFRECWKQGQPVMVSGVHHKLNSELWKPESFRKEFGEQEVDLVNCRTNEIITGATVGDFWDGFEDVPNRLKNEKEPMVLKLKDWPPGEDFRDMMPSRFDDLMANIPLPEYTRRDGKLNLASRLPNYFVRPDLGPKMYNAYGLITPEDRKYGTTNLHLDVSDAANVMVYVGIPKGQCEQEEEVLKTIQDGDSDELTIKRFIEGKEKPGALWHIYAAKDTEKIREFLKKVSEEQGQENPADHDPIHDQSWYLDRSLRKRLHQEYGVQGWAIVQFLGDVVFIPAGAPHQVHNLYSCIKVAEDFVSPEHVKHCFWLTQEFRYLSQTHTNHEDKLQVKNVIYHAVKDAVAMLKASESSFGKP

SEQ ID NO: 911 - DNA, 1779 bp, Homo sapiens
gtgagaggactcaaacgttggaccaagagaaccagcagcttcaggaccagctcagagatgcccagcagcaggtcaaggccctggggacagagcgcacaacactggaggggcatttagccaaggtacaggcccaggctgagcagggccaacaggagctgaagaacttgcgtgcttgtgtcctggagctggaagagcggctgagcacgccaggagggcttggtgcaagagcttcagaaaaaacaggtggaattgcaggaagaacggaggggactgatgtcccaactagaggagaaggagaggaggctgcaacatcagaagcagccctgtcaagcagccaagcagaagtggcatctctgcggcaggagactgtggcccaggcagccttactgactgagcgggaagaacgtcttcatgggctagaaatggagcgccggcgactgcacaaccagctgcaggaactcaagggcaacatccgtgtattctgccgggtccgccctgtcctgccgggggagcccactccaccccctggcctcctcctgtttccctctggccctggtgggccctctgatcctccaacccgccttagcctctcccggtctgacgagcggcgtgggaccctgagtggggcaccagctcccccaactcgccatgatttttcctttgaccgggtattcccaccaggaagtggacaggatgaagtgtttgaagagattgccatgcttgtccagtcagccctggatggctatccagtatgcatctttgcctatggccagacaggcagtggcaagaccttcacaatggagggtgggcctgggggagacccccagttggaggggctgatccctcgggccctgcggcacctcttctctgtggctcaggagctgagtggtcagggctggacctacagctttgtagcaagctacgtagagatctacaatgagactgtccgggacctgctggccactggaacccggaagggtcaagggggcgagtgtgagattcgccgtgcagggccagggagtgaggagctcactgtcaccaatgctcgatatgtccctgtctcctgtgagaaagaagtggacgccctgcttcatctggcccgccagaatcgggctgtggcccgcacagcccagaatgaacggtcatcacgcagccacagtgtattccagctacagatttctggggagcactccagccgaggcctgcagtgtggggcccccctcagtcttgtggacctggccgggagtgagcgacttgaccccggcttagccctcggccccggggagcgggaacgccttcgggaaacacaggccattaacagcagcctgtccacgctggggctggttatcatggccctgagcaacaaggagtcccacgtgccttaccggaacagcaaactgacctacctgctgcagaactctctgggtggtagtgctaagatgctcatgtttgtgaacatttctccactggaagagaacgtctccgagtccctcaactctctacgctttgcctccaaggtgaaccagtgtgttattggtactgctcaggccaacaggaagtgaagacggatccagatctgtgtgtgtgtgtgtgtgtgtgtgtgtgtgtgtgtgtcctatgtctatgtatcgggtgaggggtgggagggttgctggagggtgctttattgggtggagggcaccatgtcccagggctatcaaataaagaatagtttggttttttttttaaataaaggttttattaccatttgcccaagaaggcagatactttcatatctgt

SEQ ID NO: 912 - protein, 519 aa, Homo sapiens
ERTQTLDQENQQLQDQLRDAQQQVKALGTERTTLEGHLAKVQAQAEQGQQELKNLRACVLELEERLSTPGGLGARASEKTGGIAGRTEGTDVPTRGEGEEAATSEAALSSSQAEVASLRQETVAQAALLTEREERLHGLEMERRRLHNQLQELKGNIRVFCRVRPVLPGEPTPPPGLLLFPSGPGGPSDPPTRLSLSRSDERRGTLSGAPAPPTRHDFSFDRVFPPGSGQDEVFEEIAMLVQSALDGYPVCIFAYGQTGSGKTFTMEGGPGGDPQLEGLIPRALRHLFSVAQELSGQGWTYSFVASYVEIYNETVRDLLATGTRKGQGGECEIRRAGPGSEELTVTNARYVPVSCEKEVDALLHLARQNRAVARTAQNERSSRSHSVFQLQISGEHSSRGLQCGAPLSLVDLAGSERLDPGLALGPGERERLRETQAINSSLSTLGLVIMALSNKESHVPYRNSKLTYLLQNSLGGSAKMLMFVNISPLEENVSESLNSLRFASKVNQCVIGTAQANRK

SEQ ID NO: 913 - DNA, 4348 bp, Homo sapiens
gggctcggggtccgcccgcgggctgccggtgcgagcgggcggcccggctcccctcctcccccgcccgccgccgccgctgtgattgggtggaagatggcgctggccggatggaaatcctaatgacagtctccaaattcgcctccatctgtaccatgggcgccaatgcttcggcattagagaaagagattggtccagaacagtttccggtcaatgagcactattttggattagtcaattttgggaatacctgctactgcaattcagttcttcaagcactttatttttgtcgtccatttcgggaaaaagttcttgcgtataagagtcaacctaggaaaaaggagagccttcttacatgcttagcagatctcttccatagcatagccactcagaagaaaaaggttggagtaataccccctaagaagttcatcacaagattacggaaagaaaatgagctttttgacaactacatgcaacaagatgcccatgaattcttaaattacctactaaatacaattgctgatattttacaagaagagagaaagcaggaaaaacaaaatggtcgtttacctaatggtaatattgataatgaaaataataacagcacaccagacccaacgtgggttcatgagatttttcagggaacattaactaatgaaaccagatgtcttacttgtgaaactataagcagcaaagatgaagattttttagacctttctgttgacgtggaacaaaatacatcaattactcactgcttaaggggtttcagcaacacagaaactctgtgcagtgaatacaagtattactgtgaagagtgtcgcagcaaacaggaagcacacaaacggatgaaagttaaaaaactgcccatgattctagctctacacctgaagagatttaaatatatggatcaacttcatcgatatacaaaactctcttaccgggtagtttttcctttagaacttcgtctgtttaacacttcaggtgatgccaccaatccagacagaatgtacgaccttgttgctgttgtggttcactgtggaagtggtcccaatcgaggccattatattgcaatagttaagagtcatgatttttggttgttgtttgatgacgacattgtagaaaaaatagatgcacaagctattgaagaattctacgggttgacatcagatatctcaaagaactctgagtctggttacatccttttctatcagtctcgggactgagagggaaccgtgatgaagagacactttctgcctcatttcttctctggttattttggaaaggatcaagcactgatttttcaagaaaagagaaatgcaggaagctcagggggcagtagcacactttgcacacgataaagcaaagacgatggattgacaagcccttccgatcatggtagttgatttatttgctcaggtatcatgctgtctgtacagttccatacaacaaggaggtgaaatcagagataccagctcctcttttaaaacagccttccagtcattggcacgcattttctctttattaattgcaccaataatgctttgaattccttgggggtgcagtagaaagaatcggaatctgtgccgtattgataaggagatgatgttgaacacactgcataaatttgcctggttcagtatgtatagaaggcatattcagtggtcttttcaagagtaaaccagaaatacttttgggcccaacacttgcagttgccttcctgatgtaaaaactaacatgctagataatccagtgtcgggaagacaaagatgttttgcttctctgaagaagcttataataatatacagtatatgtatatgtagggagcaattggtcaaaagtggctttttgtttccccaagggaaagactggctttgtaattataattttttccttatttattttacttaaaactggtagagtctaagtattatatgaagtgcccatgattctgtcagtaaatttgaacatatttttattagttaatgtcagtttaagttgtccttttgtttgtttctatttttaaggtgaattttaatttctatctgaaatcagttaagataccttgagaaaaactgcagtgagaggagataaatatcctttttcaggaggaactgatatctctggctaaatatttgtccttttattatggtttctaaatcagttattttcttcagctttaatttcataaaattaaaaaactattttaaaaattcctgtagttgttggaataattaaaaattctggtgcagtggtggtataccaatctttagaattcttaagtattctaatgtttcaagttgagatcatgcttgggaaaatcatgtcatagcatttatgttattttcagatgccattttttaccctggaaagaagtcataatgttcatcataaccctagcagcctggatagtgagctaaacaaacccttcaaagattaaattttaatcaagtagaccgggaatacaaaagacaagtccttccttcccttccccccacctttacaaatcttactggaagggtgttcagaaattaaaatctgtgtttgctaagacttcattctgttgggggttttaagaagtaatatatgtaacataaaatatatgtaaacgattgcagtttttttggacgtttttccatgcatcagtaagttgtctgacagtagccaaatgtaacttgcagaaaattattgaaaattatattcagaataatagcaatcaggccttggatgttctttattaaactcttttcaggcagtaaatttaaaaaaaattgtcattttctaaagtccttttgctaaaactgttgactatggaaaacaacaaaaaggaattttttagtctgctgctattattaacatttattatctgtatcttttggctcaggaaatgacttcacctattttttccataagcagacctttaacagagtcacttaattgggctgcttaaacggatgttctgggagaaaattataatatttagtatttgtacaaaatatcaaaaagtattttgacaagtttctttttaagatagttcctaaagccttaccctggctagaggtgttttgtacaaattatatataagccagcctgatctaccaacatgccacagagaatcacaatcaacagtgtggggaaagtcagggcagtggaagtggatgcactctttttattttgaaggcttaaaccaaattgtcttggaattaaagctgtatttctgcagctttcggtacagagaaaaagaggaaagtgaagctgtgtcagttttaacattagctatatcaacatgtttaagaaagatagatgaagtcatttgcataaaggtacagcattgaaatactatgttgtgtttgtttttacatttttgcattaaaaaaaaacatgccgtaaaagccaagttaaatttcatattaaagcaagttctagtgtatgtgttgagttcctggtaatcacatacttgttcacatctacaccgtacttcatagtatgatttgtcaggggagggattgtggggtgacagttttacatttactttttcttcttaatgcagctggatctaagtaaaatgttttgaagtttatcagaaactaaatgtacttttaaaacgtatagggtcagggttgggggaaaaatacaggtatagtaagtaagaaaagtgacccatgaagaaagcatcgtgaggttgtatgttggttgactgtgattaaaatgcggggctggtgtaagttgtaagtggtggctgattgccgtgtaactatgtacatgattgttgggatggctgtcccatattttgtatattggaataaaaatttctataaattattgtaactaaaagtaaatattctaaattaagtcccacttcttaagtcacatggcttctgtcttggaaattttacctttaaaagattatttaagacaggaaccaggaggcttgggaacagggaaagagggaaatgttgtattatgtgggtcttggggcctctaaccatcagtatagggttttttctttccttgatggcagtagaaagacctcattttcataacataactactcttgatactttctttaaaaacactttttattaaagattctatcatgaggtatttggctgggagctgggaggctaaagcgctcatgtcctggctcttcagtgaatttaactgtgtgaccttgggcaagtcacttaacctctctgtgcttcagtctccctgtcttgtaaaatgggagtaatacctacctcacagggttgttgtggggattaattagagataatgtctgtaaagcatttaaggttcttgaagaaggcactatataaatacaaaataatatctattaaagttggtttatttgtga

SEQ ID NO: 914 - protein, 355 aa, Homo sapiens
MGANASALEKEIGPEQFPVNEHYFGLVNFGNTCYCNSVLQALYFCRPFREKVLAYKSQPRKKESLLTCLADLFHSIATQKKKVGVIPPKKFITRLRKENELFDNYMQQDAHEFLNYLLNTIADILQEERKQEKQNGRLPNGNIDNENNNSTPDPTWVHEIFQGTLTNETRCLTCETISSKDEDFLDLSVDVEQNTSITHCLRGFSNTETLCSEYKYYCEECRSKQEAHKRMKVKKLPMILALHLKRFKYMDQLHRYTKLSYRVVFPLELRLFNTSGDATNPDRMYDLVAVVVHCGSGPNRGHYIAIVKSHDFWLLFDDDIVEKIDAQAIEEFYGLTSDISKNSESGYILFYQSRD

SEQ ID NO: 915 - DNA, 2001 bp, Homo sapiens
gaagggcggcgcgcttaggcaggcggtggcgcggctggagtgccgcggggagggctgtgccggttgctttctgcagccgcatctcggccagctctcctcgccgtccccggggcgctgtgcgtctccagtccgggaccgaagccgcctgccgtagcgggcggccagatccgcgtcccgcctcagcggccggaggacatgcgggagagagaatgagccagagggacacgctggtgcatctgtttgccggaggatgtggtggtacagtgggagctattctgacatgtccactggaagttgtaaaaacacgactgcagtcatcttctgtgacgctttatatttctgaagttcagctgaacaccatggctggagccagtgtcaaccgagtagtgtctcccggacctcttcattgcctaaaggtgatcttggaaaaagaagggcctcgttccttgtttagaggactaggccccaatttagtgggggtagccccttccagagcaatatactttgctgcttattcaaactgcaaggaaaagttgaatgatgtatttgatcctgattctacccaagtacatatgatttcagctgcaatggcaggttttactgcaatcacagcaaccaaccccatttggcttataaagactcggttacagcttgatgcaaggaaccgcggggaaaggcgaatgggtgcttttgaatgtgttcgtaaagtgtatcagacagatggactaaaaggattttataggggcatgtctgcttcatatgctggtatatcagagactgttatccattttgttatttatgaaagtataaaacaaaaactactggaatataagactgcttctacaatggaaaatggtgaagagtctgtgaaagaagcatcagattttgtgggaatgatgctagctgctgccacctcaaaaacttgtgccacaactatagcatatccacatgttgtaagaacaagactacgtgaagagggaacaaaatacagatctttttttcagactctatctttgcttgttcaagaagaaggttatgggtctctttatcgtggtctgacaactcatctagtgagacagattccaaacacagccattatgatggccacctatgaattggtggtttacctactcaatggatagcagcacgaggactgctgtactgcaaaaaaagaagaccaaaagattacagtggaccatgggatacagaagccagcatggcagacagaagaaaaatagtttgggaacatgtaactattctaagtggaagttttgttgtaggaattatagtaatcacaccacattacttggcctttcggtaatgtgaaaaaaaaaaaaaaacctcagagcctccaaggaaatgcctttagaagcactcctctctcaaaattgccattttctctaccatgtcccccagacacagttgggttttgttgatttatggcagtcttctaaacaaagccatccttaattttacatactgtattgtaactatccaaagatagtattggcagtcataaatttataacttctggcctttgtttaattccagtaaaataacagcaatgacaatgagatcgtcagtattattttcacatttccctgagaggacctggcacaatattttaaatttaattatttggcagtagtcactgtttttgacaaccaatgaaatagcgtctaaatatcttgtatattttttagcatcaaaatgttttggtttccactgctgacaggtgcttgttgtttagcctaatgtggatatttaaattgttaacataccaaacacacatggtaatagtttgggacaaaataactagtaaaatgttgatttctcggctatttcactgactgcggcatgtcctcgtgtcttctctgattttgtggtacatgaatgaatgcatttatctttttagtgacttactagttacgaacttgaattatcacctctttgtcatacttaagtatcatttacataaagtgtaaaagattttttcacttt

SEQ ID NO: 916 - protein, 310 aa, Homo sapiens
MSQRDTLVHLFAGGCGGTVGAILTCPLEVVKTRLQSSSVTLYISEVQLNTMAGASVNRVVSPGPLHCLKVILEKEGPRSLFRGLGPNLVGVAPSRAIYFAAYSNCKEKLNDVFDPDSTQVHMISAAMAGFTAITATNPIWLIKTRLQLDARNRGERRMGAFECVRKVYQTDGLKGFYRGMSASYAGISETVIHFVIYESIKQKLLEYKTASTMENGEESVKEASDFVGMMLAAATSKTCATTIAYPHVVRTRLREEGTKYRSFFQTLSLLVQEEGYGSLYRGLTTHLVRQIPNTAIMMATYELVVYLLNG

SEQ ID NO: 917 - DNA, 4460 bp, Homo sapiens
ggcacgcccggaggcggggccgggtgcgtcctggcggggggattggcggagccggagagtggcagcgggcatggggcggggctgtctccagggaaacgcgacgctctccgtaggcgcagggctggcaagcagtcgggacgggagcgcgggcgtccgcggtggctgcagtcccgtcggtctccctgctgtccggcgcgagctcttcgagtcttgcttggtgcggtctcgcgacaggagcgctgggagccggggctagggggatcccggagctccgtggggcggcgggtgcgggcggggctgccggggccgggactgggggagccgggcccgcgggccgcctgctgcctccgcccgcgccggggtccccagccgcccccgctgccgtgtcccctgcggccggccagccgcgtcccccagccccggcctcccgcggacccatgcccgcccgtatcggctactacgagatcgaccgcaccatcggcaagggcaacttcgcggtggtcaagcgggccacgcacctcgtcaccaaggccaaggttgctatcaagatcatagataagacccagctggatgaagaaaacttgaagaagattttccgggaagttcaaattatgaagatgctttgccacccccatatcatcaggctctaccaggttatggagacagaacggatgatttatctggtgacagaatatgctagtggaggggaaatatttgaccacctggtggcccatggtagaatggcagaaaaggaggcacgtcggaagttcaaacagatcgtcacagctgtctatttttgtcactgtcggaacattgttcatcgtgatttaaaagctgaaaatttacttctggatgccaatctgaatatcaaaatagcagattttggtttcagtaacctcttcactcctgggcagctgctgaagacctggtgtggcagccctccctatgctgcacctgaactctttgaaggaaaagaatatgatgggcccaaagtggacatctggagccttggagttgtcctctacgtgcttgtgtgcggtgccctgccatttgatggaagcacactgcagaatctgcgggcccgcgtgctgagtggaaagttccgcatcccattttttatgtccacagaatgtgagcatttgatccgccatatgttggtgttagatcccaataagcgcctctccatggagcagatctgcaagcacaagtggatgaagctaggggacgccgatcccaactttgacaggttaatagctgaatgccaacaactaaaggaagaaagacaggtggaccccctgaatgaggatgtcctcttggccatggaggacatgggactggacaaagaacagacactgcagtcattaagatcagatgcctatgatcactatagtgcaatctacagcctgctgtgtgatcgacataagagacataaaaccctgcgtctcggagcacttcctagcatgccccgagccctggcctttcaagcaccagtcaatatccaggcggagcaggcaggtactgctatgaacatcagcgttccccaggtgcagctgatcaacccagagaaccaaattgtggagccggatgggacactgaatttggacagtgatgagggtgaagagccttcccctgaagcattggtgcgctatttgtcaatgaggaggcacacagtgggtgtggctgacccacgcacggaagttatggaagatctgcagaagctcctacctggctttcctggagtcaacccccaggctccattcctgcaggtggcccctaatgtgaacttcatgcacaacctgttgcctatgcaaaacttgcaaccaaccgggcaacttgagtacaaggagcagtctctcctacagccgcccacgctacagctgttgaatggaatgggcccccttggccggagggcatcagatggaggagccaacatccaactgcatgcccagcagctgctgaagcgcccacggggaccctctccgcttgtcaccatgacaccagcagtgccagcagttacccctgtggacgaggagagctcagacggggagccagaccaggaagctgtgcagagctctacctacaaggactccaacactctgcacctccctacggagcgtttctcccctgtgcgccggttctcagatggggctgcgagcatccaggccttcaaagctcacctggaaaaaatgggcaacaacagcagcatcaaacagctgcagcaggagtgtgagcagctgcagaagatgtacggggggcagattgatgaaagaaccctggagaagacccagcagcagcatatgttataccagcaggagcagcaccatcaaattctccagcaacaaattcaagactctatctgtcctcctcagccatctccacctcttcaggctgcatgtgaaaatcagccagccctccttacccatcagctccagaggttaaggattcagccttcaagcccaccccccaaccaccccaacaaccatctcttcaggcagcccagtaatagtcctccccccatgagcagtgccatgatccagcctcacggggctgcatcttcttcccagtttcaaggcttaccttcccgcagtgcaatctttcagcagcaacctgagaactgttcctctcctcccaacgtggcactaacctgcttgggtatgcagcagcctgctcagtcacagcaggtcaccatccaagtccaagagcctgttgacatgctcagcaacatgccaggcacagctgcaggctccagtgggcgcggcatctccatcagccccagtgctggtcagatgcagatgcagcaccgtaccaacctgatggccaccctcagctatgggcaccgtcccttgtccaagcagctgagtgctgacagtgcagaggctcacagcttgaacgtgaatcggttctcccctgctaactacgaccaggcgcatttacacccccatctgttttcggaccagtcccggggttcccccagcagctacagcccttcaacaggagtggggttctctccaacccaagccctgaaagtccctccacttgaccaattccccaccttccctcccagtgcacatcagcagccgccacactataccacgtcggcactacagcaggccctgctgtctcccacgccgccagactatacaagacaccagcaggtaccccacatccttcaaggactgctttctccccggcattcgctcaccggccactcggacatccggctgcccccaacagagtttgcacagctcattaaaaggcagcagcaacaacggcagcagcagcagcaacagcagcaacagcaagaataccaggaactgttcaggcacatgaaccaaggggatgcggggagtctggctcccagccttgggggacagagcatgacagagcgccaggctttatcttatcaaaatgctgactcttatcaccatcacaccagcccccagcatctgctacaaatcagggcacaagaatgtgtctcacaggcttcctcacccaccccgccccacgggtatgctcaccagccggcactgatgcattcagagagcatggaggaggactgctcgtgtgagggggccaaggatggcttccaagacagtaagagttcaagtacattgaccaaaggttgccatgacagccctctgctcttgagtaccggtggacctggggaccctgaatctttgctaggaactgtgagtcatgcccaagaattggggatacatccctatggtcatcagccaactgctgcattcagtaaaaataaggtgcccagcagagagcctgtcatagggaactgcatggatagaagttctccaggacaagcagtggagctgccggatcacaatgggctcgggtacccagcacgcccctccgtccatgagcaccacaggccccgggccctccagagacaccacacgatccagaacagcgacgatgcttatgtacagctggataacttgccaggaatgagtctcgtggctgggaaagcacttagctctgcccggatgtcggatgcagttctcagtcagtcttcgctcatgggcagccagcagtttcaggatggggaaaatgaggaatgtggggcaagcctgggaggtcatgagcacccagacctgagtgatggcagccagcatttaaactcctcttgctatccatctacgtgtattacagacattctgctcagctacaagcaccccgaagtctccttcagcatggagcaggcaggcgtgtaacaagaaacagagagttttgtgtacagcttgggaatgaaaaggttgattgtaaacccacagtatctagcagcgttgtgccaaattgcccttgtgtttctctccacccaaaatatcacagctgctttcctcacatttggttcatccgtgtgctgttcttttgggttctgagagggttttgccatgtttgcttgtatgaccaagtcaccaaggaaataaacaggaaggaaatcc

SEQ ID NO: 918 - protein, 1371 aa, Homo sapiens
AQGWQAVGTGARASAVAAVPSVSLLSGASSSSLAWCGLATGALGAGARGIPELRGAAGAGGAAGAGTGGAGPAGRLLPPPAPGSPAAPAAVSPAAGQPRPPAPASRGPMPARIGYYEIDRTIGKGNFAVVKRATHLVTKAKVAIKIIDKTQLDEENLKKIFREVQIMKMLCHPHIIRLYQVMETERMIYLVTEYASGGEIFDHLVAHGRMAEKEARRKFKQIVTAVYFCHCRNIVHRDLKAENLLLDANLNIKIADFGFSNLFTPGQLLKTWCGSPPYAAPELFEGKEYDGPKVDIWSLGVVLYVLVCGALPFDGSTLQNLRARVLSGKFRIPFFMSTECEHLIRHMLVLDPNKRLSMEQICKHKWMKLGDADPNFDRLIAECQQLKEERQVDPLNEDVLLAMEDMGLDKEQTLQSLRSDAYDHYSAIYSLLCDRHKRHKTLRLGALPSMPRALAFQAPVNIQAEQAGTAMNISVPQVQLINPENQIVEPDGTLNLDSDEGEEPSPEALVRYLSMRRHTVGVADPRTEVMEDLQKLLPGFPGVNPQAPFLQVAPNVNFMHNLLPMQNLQPTGQLEYKEQSLLQPPTLQLLNGMGPLGRRASDGGANIQLHAQQLLKRPRGPSPLVTMTPAVPAVTPVDEESSDGEPDQEAVQSSTYKDSNTLHLPTERFSPVRRFSDGAASIQAFKAHLEKMGNNSSIKQLQQECEQLQKMYGGQIDERTLEKTQQQHMLYQQEQHHQILQQQIQDSICPPQPSPPLQAACENQPALLTHQLQRLRIQPSSPPPNHPNNHLFRQPSNSPPPMSSAMIQPHGAASSSQFQGLPSRSAIFQQQPENCSSPPNVALTCLGMQQPAQSQQVTIQVQEPVDMLSNMPGTAAGSSGRGISISPSAGQMQMQHRTNLMATLSYGHRPLSKQLSADSAEAHSLNVNRFSPANYDQAHLHPHLFSDQSRGSPSSYSPSTGVGFSPTQALKVPPLDQFPTFPPSAHQQPPHYTTSALQQALLSPTPPDYTRHQQVPHILQGLLSPRHSLTGHSDIRLPPTEFAQLIKRQQQQRQQQQQQQQQQEYQELFRHMNQGDAGSLAPSLGGQSMTERQALSYQNADSYHHHTSPQHLLQIRAQECVSQASSPTPPHGYAHQPALMHSESMEEDCSCEGAKDGFQDSKSSSTLTKGCHDSPLLLSTGGPGDPESLLGTVSHAQELGIHPYGHQPTAAFSKNKVPSREPVIGNCMDRSSPGQAVELPDHNGLGYPARPSVHEHHRPRALQRHHTIQNSDDAYVQLDNLPGMSLVAGKALSSARMSDAVLSQSSLMGSQQFQDGENEECGASLGGHEHPDLSDGSQHLNSSCYPSTCITDILLSYKHPEVSFSMEQAGV

SEQ ID NO: 919 - DNA, 4071 bp, Homo sapiens
gagtccagccgctggtgcgcggagcggttcaccgtcttcggagcggttcggcccagcctttcgcccaggcgcccaggcccgctgcgcgcgtgcgtgagcgcgcctgcgccgccagggccgctgcaaggggaggagagcggccgcctcaggaggatcccttttcccccagaaattactcaatgctgaaacctctcaaagtggtattagagacgctgaaagcaccatggacgggttttatgatcagcaagtcccttttatggtcccagggaaatctcgatctgaggaatgcagagggcggcctgtgattgacagaaagaggaagtttttggacacagatctggctcacgattctgaagagctatttcaggatctcagtcaacttcaagaggcttggttagctgaagcacaagttcctgatgatgaacagtttgtcccagattttcagtctgataacctggtgcttcatgccccacctccaaccaagatcaaacgggagctgcacagcccctcctctgagctgtcgtcttgtagccatgagcaggctcttggtgctaactatggagaaaagtgcctctacaactattgtgcctatgataggaagcctccctctgggttcaagccattaacccctcctacaacccccctctcacccacccatcagaatcccctatttcccccacctcaggcaactctgcccacctcagggcatgcccctgcagctggcccagttcaaggtgtgggccccgcccccgccccccattcgcttccagagcctggaccacagcagcaaacatttgcggtcccccgaccaccacatcagcccctgcagatgccaaagatgatgcctgaaaaccagtatccatcagaacagagatttcagagacaactgtctgaaccctgccaccccttccctcctcagccaggagttcctggagataatcgccccagttaccatcggcaaatgtcagaacctattgtccctgcagctcccccgccccctcagggattcaaacaagaataccatgacccactctatgaacatggggtcccgggcatgccagggcccccagcacacgggttccagtcaccaatgggaatcaagcaggagcctcgggattactgcgtcgattcagaagtgcctaactgccagtcatcctacatgagagggggttatttctccagcagccatgaaggtttttcatatgaaaaagatccccgattatactttgacgacacttgtgttgtgcctgagagactggaaggcaaagtcaaacaggagcctaccatgtatcgagaggggcccccttaccagaggcgaggttcccttcagctgtggcagttcctggtcacccttcttgatgacccagccaatgcccacttcattgcctggacaggtcgaggcatggagttcaagctgatagaaccggaagaggttgctcggcgctggggcatccagaagaaccggccagccatgaactatgacaagctgagccgctctctccgctattactatgaaaagggcatcatgcagaaggtggctggagagcgatacgtctacaaatttgtctgtgacccagatgccctcttctccatggctttcccggataaccagcgtccgttcctgaaggcagagtccgagtgccacctcagcgaggaggacaccctgccgctgacccactttgaagacagccccgcttacctcctggacatggaccgctgcagcagcctcccctatgccgaaggctttgcttactaagtttctgagtggcggagtggccaaaccctagagctagcagttcccattcaggcaaacaagggcagtggttttgtttgtgtttttggttgttcctaaagcttgccctttgagtattatctggagaacccaagctgtctctggattggcacccttaaagacagatacattggctggggagtgggaacagggaggggcagaaaaccaccaaaaggccagtgcctcaactcttgattctgatgaggtttctgggaagagatcaaaatggagtctccttaccatggacaatacatgcaaagcaatatcttgttcaggttagtacccgcaaaacgggacatgatgtgacaatctcgatcgatcatggactactaaatggcctttacatagaagggctctgatttgcacaatttgttgaaaaatcacaaacccatagaaaagtgagtaggctaagttggggaggctcaaaccattaagggttaaaaatacatcttaaacattggaaagctcttctagctgaatctgaaatattaccccttgtctagaaaaaggggggcagtcagaacagctgttccccactccgtgttctcaaaatcataaaccatggctactcttgggaaccacccggccatgtggtcgccaagtagagcaagccccctttctcttcccaatcacgtggctgagtgtggatgacttttattttaggagaagggcgattaacacttttgacagtattttgttttgccctgatttgggggattgttttgttttggtggttgttttggaaaaacagtttataaactgatttttgtagttttggtatttaaagcaaaaaaacgaaaaacaaaaaacaaaaacaaaccttttggtaatgtgcactgtgtctttagccagggccgtgcaacttatgaagacactgcagcttgagaggggctttgctgaggcttccccttggccatgtgaaagcccgccttgttgcctgctttgtgctttctgcaccagacaacctgatggaacatttgcacctgagttgtacatttttgaagtgtgcagggcagcctggacacaagcttagattctctatgtatagttccccgtgttcactaacatgccctctctggaaagcatatgtatataacatgtgtcatgtcctttggaaacctggtcacctggtgaaaacccttgggattcttccctgggcatgactgatgacaatttccatttcatcagtttgttttgttttcctttttctttaaatcttggactttaaaccctacctgtgtgattcagtagggtttgagacttagctgtgatactgacaggtaagcaacagtgctagcattctagattcctgcctttttttaaaaagaaattattctcattgctgtattatattggaaaagttttaaacaaccaagctaaagctatgtgaaagttgagctcaaagtagaggaaaagttactggtggtaccttgctgcctgctctgctggtagaattctgtgctccccgtgacacttagtacattaagaatgactacactgttcctcgtatgtgaaggaggcagtgctgactccgtgagtgtgagacacgtgctttgaactgcttttctattcatggagcactccatagtctcaaactgtcccccttatgaccaacagcacatttgtgaagaggttcgcagggataaggggtgcactttatagctatggaaacatgagattctcctctattggaagctaattagcccacaaaggtggtaaacctgtagattgggccttaattagcattgtactctaatcaaaggactctttctaaaccatatttatagctttcttaacctacacatagtctatacatagatgcatattttacccccagctggctagagatttatttgttgtaaatgctgtatagatttggttttcctttctttacttaccctggtttggattttttttttttttttttttgaatggatttatgctgtcttagcaatatgacaataatcctctgtagcttgagctacccctcccctgctgtaacttacgtgacctgtgctgtcactgggcataggacagcggcatcacggttgcattcccattggactcatgcacctcccggatggtttttgtttttttcgggggttctttggggtttgtttgtttgcttcttttccagagtgtggaaagtctacagtgcagaaaggcttgaacctgccagctgatttgaaatactttcaccctgcgcagggccgtatgcatcctgccaagctgcgttatattctgtactgtgtacaataaagaagtttgcttttcgttta

SEQ ID NO: 920 - protein, 510 aa, Homo sapiens
MDGFYDQQVPFMVPGKSRSEECRGRPVIDRKRKFLDTDLAHDSEELFQDLSQLQEAWLAEAQVPDDEQFVPDFQSDNLVLHAPPPTKIKRELHSPSSELSSCSHEQALGANYGEKCLYNYCAYDRKPPSGFKPLTPPTTPLSPTHQNPLFPPPQATLPTSGHAPAAGPVQGVGPAPAPHSLPEPGPQQQTFAVPRPPHQPLQMPKMMPENQYPSEQRFQRQLSEPCHPFPPQPGVPGDNRPSYHRQMSEPIVPAAPPPPQGFKQEYHDPLYEHGVPGMPGPPAHGFQSPMGIKQEPRDYCVDSEVPNCQSSYMRGGYFSSSHEGFSYEKDPRLYFDDTCVVPERLEGKVKQEPTMYREGPPYQRRGSLQLWQFLVTLLDDPANAHFIAWTGRGMEFKLIEPEEVARRWGIQKNRPAMNYDKLSRSLRYYYEKGIMQKVAGERYVYKFVCDPDALFSMAFPDNQRPFLKAESECHLSEEDTLPLTHFEDSPAYLLDMDRCSSLPYAEGFAY

SEQ ID NO: 921 - DNA, 1940 bp, Homo sapiens
ggggcggtgcagaggcggcaggaagatggagttggggagttgcctggagggcgggagggaggcggcggaggaagagggcgagcctgaggtgaaaaagcggcgacttctgtgtgtggagtttgcctcggtcgcaagctgcgatgccgcagtggctcagtgcttcctggccgagaacgactgggagatggaaagggctctgaactcctacttcgagcctccggtggaggagagcgccttggaacgccgacctgaaaccatctctgagcccaagacctatgttgacctaaccaatgaagaaacaactgattccaccacttctaaaatcagcccatctgaagatactcagcaagaaaatggcagcatgttctctctcattacctggaatattgatggattagatctaaacaatctgtcagagagggctcgaggggtgtgttcctacttagctttgtacagcccagatgtgatatttctacaggaagttattcccccatattatagctacctaaagaagagatcaagtaattatgagattattacaggtcatgaagaaggatatttcacagctataatgttgaagaaatcaagagtgaaattaaaaagccaagagattattccttttccaagtaccaaaatgatgagaaaccttttatgtgtgcatgtgaacgtgtcaggaaatgagctttgccttatgacatcccatttggagagcaccagagggcatgctgcggaacgaatgaatcagttaaaaatggttttaaagaaaatgcaagaggctccagagtcagctacagttatatttgcaggagatacaaatctaagggatcgagaggttaccagatgtggtggtttacccaacaacattgtggatgtctgggagtttttgggcaaacctaaacattgccagtatacatgggatacacaaatgaactctaatcttggaataactgctgcttgtaaacttcgttttgatcgaatatttttcagagcagcagcagaagagggacacattattccccgaagtttggaccttcttggattagaaaaactggactgtggtagatttcctagtgatcactggggtcttctgtgcaacttagatataatattgtaaaatgcttttcaagtgtgggttttgccctgattgttgcaaatacaatttccaccttctggaaaggtaggtttgctgtggaggaaataatgtactagatcattgtcacagaaaaaccaactatgatttatggttgtgttttcagaattcaacattaaagattaatgtttatttaaacgaacacattcctgcattcaggatgtgaggccatttaataaaaagggcacaaagcctgtcagagttttcaacggtgcttatagctgccagctggattccaaacaggtaccacattgtctctgagctaatgtttatatttttccattcaggcaccgaaatagttaatatttgaaataagtcttcaaaagaaaacataagagattattgagttcttgggactggatcctttatttcataagttcagatcatcttaaatgaaaatgccatgattatctgcagttaagtagatgacagctattctacatcagacttgatttttgtcagctaattacataattggtaagctataattgaaaccttatggcttaaaattccttaactcctttttgattcatgtttgtagtcatgttgtcaacagaggcaaagttaagcttgatgatggttaaaatcggtttgatagcaccatgggacatttttctaacaaaaataaatgcatgaagagacatagccttttagttttgctaattgtgaaatggaaatgctttacaggaagtaaatgcaaattacttttaagtgtgctttaaagaaaaatattttccccacaagagaaatttaaataaagaattttatttgtttaaaaaaaaaaaaaaaa

SEQ ID NO: 922 - protein, 362 aa, Homo sapiens
MELGSCLEGGREAAEEEGEPEVKKRRLLCVRFASVASCDAAVAQCFLAENDWEMERALNSYFEPPVEESALERRPETISEPKTYVDLTNEETTDSTTSKISPSEDTQQENGSMFSLITWNIDGLDLNNLSERARGVCSYLALYSPDVIFLQEVIPPYYSYLKKRSSNYEIITGHEEGYFTAIMLKKSRVKLKSQEIIPFPSTKMMRNLLCVHVNVSGNELCLMTSHLESTRGHAAERMNQLKMVLKKMQEAPESATVIFAGDTNLRDREVTRCGGLPNNIVDVWEFLGKPKHCQYTWDTQMNSNLGITAACKLRFDRIFFRAAAEEGHIIPRSLDLLGLEKLDCGRFPSDHWGLLCNLDIIL

SEQ ID NO: 923 - DNA, 5515 bp, Homo sapiens
cgaactgctacagaatgtgacgttcgtatgagcaagtctaagtcagacaatcagatcagtgacagagctgctttggaggccaaagtgaaggatcttctcacgctggcaaaaaccaaagacgtagaaattttacatttgagaaatgaactgcgagacatgcgtgcccagctgggcattaatgaggatcattctgagggtgatgaaaaatctgagaaggaaactattatggctcaccagccgactgatgtggagtccactttattgcagttgcaggaacagaatactgccatccgtgaagaactcaaccagctgaaaaatgaaaacagaatgttaaaggacaggttgaatgcattgggcttttccctagagcagaggttagacaattctgaaaaactgtttggctatcagtccctgagcccagaaatcacccctggtaaccagagcgatggaggaggaactctgacttcttcagtggaaggctctgcccctggctcagtggaggatctcttgagtcaggatgaaaatacactaatggaccatcagcacagtaactccatggacaatttagacagtgagtgcagtgaggtctaccagcccctcacatcgagcgatgatgcgctggatgcaccatcctcctcagagtcggaaggcatccccagcatagagcgctcccggaaggggagcagcgggaatgccagtgaagtgtccgtggcttgcctgactgaacggatacaccagatggaagagaaccaacacagtacaagtgaggaactccaggcaaccctgcaagagctagctgatttacagcagattacccaggaactgaatagtgaaaacgaaaggcttggagaagagaaggttattctgatggagtctttatgtcagcagagcgataagttggaacactttagtcgacagattgaatacttccgctctcttctagatgagcatcacatttcttatgtcatagatgaagatgtaaaaagtgggcgctatatggaattagagcaacgttacatggacctcgctgagaatgcccgttttgaacgggagcagcttcttggtgtccagcagcatttaagcaatactttgaaaatggcagaacaagacaataaggaagctcaagaaatgataggggcactcaaagaacgcagtcaccatatggagcgaattattgagtctgagcagaaaggaaaagcagccttggcagccacgttagaggaatacaaagccacagtggccagtgaccagatagagatgaatcgcctgaaggctcagctggagaatgaaaagcagaaagtggcagagctgtattctatccataactctggagacaaatctgatattcaggacctcctggagagtgtcaggctggacaaagaaaaagcagagactttggctagtagcttgcaggaagatctggctcatacccgaaatgatgccaatcgattacaggatgccattgctaaggtagaggatgaataccgagccttccaagaagaagctaagaaacaaattgaagatttgaatatgacgttagaaaaattaagatcagacctggatgaaaaagaaacagaaaggagtgacatgaaagaaaccatctttgaacttgaagatgaagtagaacaacatcgtgctgtgaaacttcatgacaacctcattatttctgatctagagaatacagttaaaaaactccaggaccaaaagcacgacatggaaagagaaataaagacactccacagaagacttcgggaagaatctgcggaatggcggcagtttcaggctgatctccagactgcagtagtcattgcaaatgacattaaatctgaagcccaagaggagattggtgatctaaagcgccggttacatgaggctcaagaaaaaaatgagaaactcacaaaagaattggaggaaataaagtcacgcaagcaagaggaggagcgaggccgggtatacaattacatgaatgccgttgagagagatttggcagccttaaggcagggaatgggactgagtagaaggtcctcgacttcctcagagccaactcctacagtaaaaaccctcatcaagtcctttgacagtgcatctcaagtaccaaaccctgctgcagctgcaattcctcgaacgcccctgagcccaagtcctatgaaaacccctcctgcagcagctgtgtcccctatgcagagacattccataagtggaccaatctcaacatccaaacccctgacagccctgtcagataagagaccaaactatggggaaatccctgttcaagagcatctgttaagaacatcttcagccagccggcctgcttccctgccaagagtgcctgcgatggaaagtgccaagaccctctcagtgtctcgacgaagtagtgaagaaatgaaacgggacatttctgcacaggagggagcgtcgccagcctctctgatggctatgggaaccacgtctccacagctttccctgtcctcttctccaacggcatctgtgactcccaccacccgaagccgaataagagaagaaaggaaagaccctctctcagcattggccagagaatatggaggatcaaagaggaacgccttgctgaagtggtgtcagaagaaaacagaaggctatcagaatattgacattacaaacttcagcagcagctggaaatgatgggctggccttctgtgccctcctgcatacatatctccctgcccacattccatatcaagaactgaacagccaggataagagaaggaacttcatgctggctttccaggcagctgaaagtgtcggcatcaaatccacactggacattaatgaaatggtacggactgaacgacccgactggcagaacgtgatgctgtatgtgacggcgatctacaagtactttgagacctgagcatgccgggaggagccgccccaatagcgggggtacccctccacagcgaccgagcgacaccgacgccattagctacgcacccctgtaaagcttccagcaactctgggctgccccacagcgtgtgagcctccagctcggggcttccgtattggaagaactcagccgtgtggcccacagctcccaccagggcccctcccacatgacccgtccattcaggtcatgtgggctcagcacacatcctgcaggccggtggctgctggagttttccttctgaagagaatattgaactacactagtgctccagggcaccaaacaaaaagggctcatgcacagctgaatttgggaaaagggattcagttctgtgggaaactcactagggttgatgaaggctcggccgcggcacttcctgactattggctggggtgggttccggtgctggtgagaacccagaaggagagtcagcgcctggcagttcccagcgccctgggcccttcaccgtcctagtttggaggagcatgttcaccacagacgtgggtcagctgccccacacctgacggggctgtcccggccgacacaatccaggcgtgttcagcctgagctaggagagtatctagagggcgtggtgcgggcacgccagggctggggtgctgctgctgcactcacgcggctgggctttctggcgggaagcagttacgggggccccttgcctggactcagcgacctgtcttccagcctggaaggggtttggagtcccagctctggctttagatttcttcatcataaggagtttttctagttaacatttttgttttgttacgagcaatgctggaaaaggtcgctcctgttctgttagtaccaaagttacattgtttcaataagcatagaaatctaaacaacatctgtacattagcatggtgagagcaaggaataaagcaggaaataggagaaaagtaaacaactttagggagcccaggcagtgtcatttaaactcactgagtcactaagacataattctcctaggccagagttaaagaaagtgccttaactcttcttgtgagggcagccactgccctccatggccaaggcaggacctccaagactcagtggttgagttgtctcctaccaccatgcccgccctccccaggtactgggtccatgccccctgtgcccaccctccccaggtgctgggtccatgctgtttgaaccaaagccttatttaaaggtggtcactggagatgctctcaggccagaactcaacagctatttttgggaatagggatctcccgtgtgcctaacgcagtagctattggtttgaacaatgtccagacaagacctgtacctttgagaatataactgtgtttggcacctgcatagcaccatgaggaagaccagccaccagtggaagcggggtcactgccccacagactggatgcaatgaggggctcacaggaggcccagccagcccgattgtgggctgaggggtctgcattcaagcacgatgttctagaataggagtttaatgtgtctacgtaacctagaatgtggttattaggaaaggggctgtgcatgtgggtgcagctggcggcacacctggtcaccagatggccagaagctgcccatcagccctgcccagatgtcagcctgggagctcaggctgctgccgctggctggatgccctttggtgaaatgcctgttttcagctaagaaaggagaggccaggcaagcaaagtcatgccacaaagcatatcagagacccccgcagactcctggccccgtcccgccccccgtctgagttgtgtttttgttgctgttcctctgttgatggccagctctgctgttggcatgagccactgatgttcatgtgagaattactgtttttaagtgtctctccacttaggtgtcctcagttcccacttttgctctcatttgccttcacagaggccactccacctgtccggatccagctgtctggtcatggtttggtttatttattttgtccttcaggggctgttttgccctaagaatgagggggcttcccctggtctgcagttcccaactttatcccttgctggccatgcgagcccagccctggtgcctcatgggatgggggggtaggggtccccaggatcttctggaggaaggtggccatggatggatgggctgtatctgtgttttccctctgggagtctcatgggtccagcatcaggcctgaggtcagcaacagggaaagagggtgggcacggggagggcttggccccgcctatctagaggcttgcctcgggcccctccttggggaaggtttgcgtgcagagctgcaagggagagggttccagaagcattgccttttgcctcgtctaataggatccttaggacactgtgggctttaggaatgactatagatgctcacacgtgtttaaagtgacatttggagatgctctcagtcctgtggcatctggcacgaagtctccaagaagccactttgcctcttctcccttcaagcacaagctttactgcaaaagggccagtcgcgtttctatttctctcgatcccaggcttctgcggaccgacgatacgtttaaatgttgttctagtaaatattcttgaatgtattaaaatggctgaaacaac

SEQ ID NO: 924 - protein, 885 aa, Homo sapiens
RTATECDVRMSKSKSDNQISDRAALEAKVKDLLTLAKTKDVEILHLRNELRDMRAQLGINEDHSEGDEKSEKETIMAHQPTDVESTLLQLQEQNTAIREELNQLKNENRMLKDRLNALGFSLEQRLDNSEKLFGYQSLSPEITPGNQSDGGGTLTSSVEGSAPGSVEDLLSQDENTLMDHQHSNSMDNLDSECSEVYQPLTSSDDALDAPSSSESEGIPSIERSRKGSSGNASEVSVACLTERIHQMEENQHSTSEELQATLQELADLQQITQELNSENERLGEEKVILMESLCQQSDKLEHFSRQIEYFRSLLDEHHISYVIDEDVKSGRYMELEQRYMDLAENARFEREQLLGVQQHLSNTLKMAEQDNKEAQEMIGALKERSHHMERIIESEQKGKAALAATLEEYKATVASDQIEMNRLKAQLENEKQKVAELYSIHNSGDKSDIQDLLESVRLDKEKAETLASSLQEDLAHTRNDANRLQDAIAKVEDEYRAFQEEAKKQIEDLNMTLEKLRSDLDEKETERSDMKETIFELEDEVEQHRAVKLHDNLIISDLENTVKKLQDQKHDMEREIKTLHRRLREESAEWRQFQADLQTAVVIANDIKSEAQEEIGDLKRRLHEAQEKNEKLTKELEEIKSRKQEEERGRVYNYMNAVERDLAALRQGMGLSRRSSTSSEPTPTVKTLIKSFDSASQVPNPAAAAIPRTPLSPSPMKTPPAAAVSPMQRHSISGPISTSKPLTALSDKRPNYGEIPVQEHLLRTSSASRPASLPRVPAMESAKTLSVSRRSSEEMKRDISAQEGASPASLMAMGTTSPQLSLSSSPTASVTPTTRSRIREERKDPLSALAREYGGSKRNALLKWCQKKTEGYQNIDITNFSSSWK

SEQ ID NO: 925 - DNA, 3432 bp, Homo sapiens
  misc_feature (2741)..(2741): n is a, c, g, or t
ctcgtcatgcgcaatgtggcgctgcggcgggcggcagggcctgtgtgtgctgaggcggctgagcggcggacatgcacaccacagagcgtggcgatggaacagtaaccgggcttgtgagagggctctgcagtataaactaggagacaagatccatggattcaccgtaaaccaggtgacatctgttcccgagctgttcctgactgcagtgaagctcacccatgatgacacaggagccaggtatttacacctggccagagaagacacgaataatctgttcagcgtgcagttccgtaccactcccatggacagtactggtgttcctcacattcttgagcataccgtcctttgtgggtctcaaaaatatccgtgcagaaaccctttcttcaaaatgttgaaccggtccctctccacgttcatgaacgccttcacagctagtgattatactctgtatccattttccacacaaaatcccaaggactttcagaatctcctctcggtgtatttggatgccaccttttccccatgtttacgcgagctggatttctggcaggaaggatggcggctggaacatgagaatccgagcgacccccagacgcccttggtctttaaaggagtcgtctttaatgagatgaagggagcgtttacagacaatgagaggatattctcccagcaccttcagaacagacttcttcccgaccacacgtactcagtggtctccgggggtgacccactgtgcatcccggagcttacatgggagcagcttaagcagtttcatgccactcactatcacccaagcaatgctaggttcttcacgtacggtaattttccattagaacagcatctgaaacaaattcacgaggaagcactgagcaaattccagaaaattgaaccaagcaccgtggtgccagctcagacaccctgggacaagcctagggaattccagataacatgtggcccggattcatttgctacagatccctctaaacaaacaaccgtcagcgttagcttcctcttaccggacatcaccgacacatttgaagccttcacattaagtcttctgtcttcactcttgacttctgggcccaattctcccttttacaaagccttgattgaatctggccttggcacagaattttctcctgatgttggatataatggctacacgagggaggcctactttagtgtcggcctccaagggattgtggagaaagacattgagaccgtcagaagcctcatagacagaacgattgatgaagtagttgagacaaggattgaagatgatcgaattgaggctttacttcataaaattgaaatacagatgaaacatcagtctaccagctttgggctgatgctgacatcatacatagcttcttgctggaaccatgatggggaccctgtggagctcttgaagttgggaaatcagttagctaaattcagacagtgcctgcaggaaaatccaaaatttttgcaagaaaaagtaaaacagtattttaagaataaccagcataagctgactttatcgatgaggccagatgacaagtatcacgagaagcaggcacaggtggaagccacgaagctcaagcagaaggtcgaggctctgtcccccggagacaggcagcagatctacgagaaaggtctagaattacggagtcaacaaagcaaacctcaagatgcctcttgtctgccagcgttgaaagtttccgatattgaacccaccatacctgtcacagagttggacgtggtcctgacagctggagatatccctgttcagtactgcgcccagcccaccaatggcatggtgtatttccgggccttctccagcctgaacacactccccgaggagctgaggccctatgtgcccctcttctgcagcatcctcaccaagctgggctgcggccttcttgactaccgggagcaggctcagcagatagaattgaagaccggagggatgagtgcttctccccacgtgctccccgacgactcacacatggacacctacgagcaggtaggtgtgcttttctcctctctctgcctggatcgaaacctgccagacatgatgcagctatggagtgaaatatttaacaacccgtgctttgaagaagaggagcacttcaaggtgctggtgaagatgaccgcccaggagctcgccaatggaattcctgactctgggcacctgtacgcatccatcagggcaggccggaccctcacgcccgcaggggacctgcaggagaccttcagcgggatggatcaggtgcggctgatgaagaggattgcagaaatgacagatatcaaacccatcctgaggaagctcccgcgtatcaagaaacacttgttaaatggtgataatatgaggtgttcagtgaatgcgactcctcagcagatgcctcagacagaaaaagcggtcgaagacttccttagaagcatcggtcggagtaaaaaggaacggaggcctgtgcgcccacacacggtcgagaaacctgtgcccagcagctctggtggagatgcccacgttccccatggctcccaggtcattaggaagctggtcatggaacccaccttcaagccctggcagatgaagactcacttcctgatgcccttcccggtgaattacgtgggtgaatgcatccgaactgtcccctacacggacccagatcatgccagtcttaaaatccttgcacgtttgatgactgccaaattcttgcatacagaaattcgagaaaaaggcggtgcttatggtggangcgcaaaactcagccacaatgggattttcaccctttactcttacagggacccaaatacaatagagacgctccagtcttttgggaaggctgtcgactgggctaagtctggaaaattcacacagcaagacatcgacgaagccaaactttctgtcttctcaaccgtagatgctcctgtcgctccttcagacaaaggaatggaccacttcttgtacggcctctcggatgagatgaagcaggcccacagagagcagctctttgctgtcagccacgacaagctcctggccgtgagcgataggtacctcggcactgggaagagcacacacggcctggccatcctcggacccgagaacccgaaaattgccaaggacccatcctggatcatccgatgagcagccgtggcgctcgactgcacaggagcccgagacaatacacctccaagctgaatatgaaaagtcagaaatgctactgctttttccaagaatattatgtcattgagtgtcgccaaagcccttgactggcgagtcaaaaactcagatctatcttaagagtgaccaggaagaggttcattgaaataatcatgcatgaagcgccaaagatgcaccatgtagaattttcactttgtactggcaggctcgttttacctgattctagaatatttaagaatctaaaaataaagggcaactctgactta

SEQ ID NO: 926 - protein, 1038 aa, Homo sapiens
  misc_feature (910)..(910): Xaa can be any naturally occurring amino acid
MWRCGGRQGLCVLRRLSGGHAHHRAWRWNSNRACERALQYKLGDKIHGFTVNQVTSVPELFLTAVKLTHDDTGARYLHLAREDTNNLFSVQFRTTPMDSTGVPHILEHTVLCGSQKYPCRNPFFKMLNRSLSTFMNAFTASDYTLYPFSTQNPKDFQNLLSVYLDATFSPCLRELDFWQEGWRLEHENPSDPQTPLVFKGVVFNEMKGAFTDNERIFSQHLQNRLLPDHTYSVVSGGDPLCIPELTWEQLKQFHATHYHPSNARFFTYGNFPLEQHLKQIHEEALSKFQKIEPSTVVPAQTPWDKPREFQITCGPDSFATDPSKQTTVSVSFLLPDITDTFEAFTLSLLSSLLTSGPNSPFYKALIESGLGTEFSPDVGYNGYTREAYFSVGLQGIVEKDIETVRSLIDRTIDEVVETRIEDDRIEALLHKIEIQMKHQSTSFGLMLTSYIASCWNHDGDPVELLKLGNQLAKFRQCLQENPKFLQEKVKQYFKNNQHKLTLSMRPDDKYHEKQAQVEATKLKQKVEALSPGDRQQIYEKGLELRSQQSKPQDASCLPALKVSDIEPTIPVTELDVVLTAGDIPVQYCAQPTNGMVYFRAFSSLNTLPEELRPYVPLFCSILTKLGCGLLDYREQAQQIELKTGGMSASPHVLPDDSHMDTYEQVGVLFSSLCLDRNLPDMMQLWSEIFNNPCFEEEEHFKVLVKMTAQELANGIPDSGHLYASIRAGRTLTPAGDLQETFSGMDQVRLMKRIAEMTDIKPILRKLPRIKKHLLNGDNMRCSVNATPQQMPQTEKAVEDFLRSIGRSKKERRPVRPHTVEKPVPSSSGGDAHVPHGSQVIRKLVMEPTFKPWQMKTHFLMPFPVNYVGECIRTVPYTDPDHASLKILARLMTAKFLHTEIREKGGAYGGXAKLSHNGIFTLYSYRDPNTIETLQSFGKAVDWAKSGKFTQQDIDEAKLSVFSTVDAPVAPSDKGMDHFLYGLSDEMKQAHREQLFAVSHDKLLAVSDRYLGTGKSTHGLAILGPENPKIAKDPSWIIR

SEQ ID NO: 927 - DNA, 2579 bp, Homo sapiens
tgagaccgtcagaagcctcatagacagaacgattgatgaagtagttgagaaaggatttgaagatgatcgaattgaggctttacttcataaaattgaaatacagatgaaacatcagtctaccagctttgggctgatgctgacatcagtaagtgatctctcaacaattttgtttttgttttataatagacattttgtcttgttactagcttaactggcattttgatatttttatgtgaaatagattactttaaatgggtaagggtttataactagtaatctgttggttatttcctaaacattatttcagcctgtgctttttattttattggaacaaaacagggctaaagtaagtttttttgtttctccatccaaagaattacatgacttttgttataaacaatcatctgtggtatatttaaatacagaaactaggattttagtatcaagtctgggctgttggtggaggttgtactgtggtaccagctgcattgtggatgtggaaatcttccttccagtacatagcttcttgctggaaccatgatggggaccctgtggagctcttgaagttgggaaatcagttagctaaattcagacagtgcctgcaggaaaatccaaaatttttgcaagaaaaagtaaaacagtattttaagaataaccagcataagctgactttatcgatgaggccagatgacaagtatcacgagaagcaggcacaggtggaagccacgaagctcaagcagaaggtcgaggctctgtcccccggagacaggcagcagatctacgagaaaggtctagaattacggagtcaacaaagcaaacctcaagatgcctcttgtctgccagcgttgaaagtttccgatattgaacccaccatacctgtcacagagttggacgtggtcctgacagctggagatatccctgttcagtactgcgcccagcccaccaatggcatggtgtatttccgggccttctccagcctgaacacactccccgaggagctgaggccctatgtgcccctcttctgcagcgtcctcaccaagctgggctgcggccttcttgactaccgggagcaggctcagcagatagaattgaagaccggagggatgagtgcttctccccacgtgctccccgacgactcacacatggacacctacgagcagggtgtgcttttctcctctctctgcctggatcgaaacctgccagacatgatgcagctatggagtgaaatatttaacaacccgtgctttgaagaagaggagcacttcaaggtgctggtgaagatgaccgcccaggagctcgccaatggaattcctgactctgggcacctgtacgcatccatcagggcaggccggaccctcacgcccgcaggggacctgcaggagaccttcagcgggatggatcaggtgcggctgatgaagaggattgcagaaatgacagatatcaaacccatcctgaggaagctcccacgtatcaagaaacacttgttaaatggtgataatatgaggtgttcagtgaatgcgactcctcagcagatgcctcagacagaaaaagcggtcgaagacttccttagaagcatcggtcggagtaaaaaggaacggaggcctgtgcgcccacacacggtcgagaaacctgtgcccagcagctctggtggagatgcccacgttccccatggctcccaggtcattaggaagctggtcatggaacccaccttcaagccctggcagatgaagactcacttcctgatgcccttcccggtgaattacgtgggtgaatgcatccgaactgtcccctacacggacccagatcatgccagtcttaaaatccttgcacgtttgatgactgccaaattcttgcatacagaaattcgagaaaaaggcggtgcttatggtggaggcgcaaaactcagccacaatgggattttcaccctttactcttacagggacccaaatacaatagagacgctccagtcttttgggaaggctgtcgactgggctaagtctggaaaattcacacagcaagacatcgacgaagccaaactttctgtcttctcaaccgtagatgctcctgtcgctccttcagacaaaggaatggaccacttcttgtacggcctctcggatgagatgaagcaggcccacagagagcagctctttgctgtcagccacgacaagctcctggccgtgagcgatagatacctcggcactgggaagagcacacacggcctggccatcctcggacccgagaacccgaaaattgccaaggacccatcctggatcatccgatgagcagccgtggcgctcgactgcacaggagcccgagacaatacacctccgagctgaatatgaaaagtcagaaatgctactgctttttccaagaatattatgtcattgagtgtcgccaaagcccttgactggcgagtcaaaaactcagatctatcttaagagtgaccaggaagaggttcattgaaataatcatgcatgaagcgccaaagatgcaccatgtagaattttcactttgtactggcaggctcgttttacctcattctagaatatttaagaatctaaaaataaagggcaactctg

SEQ ID NO: 928 - protein, 595 aa, Homo sapiens
MWKSSFQYIASCWNHDGDPVELLKLGNQLAKFRQCLQENPKFLQEKVKQYFKNNQHKLTLSMRPDDKYHEKQAQVEATKLKQKVEALSPGDRQQIYEKGLELRSQQSKPQDASCLPALKVSDIEPTIPVTELDVVLTAGDIPVQYCAQPTNGMVYFRAFSSLNTLPEELRPYVPLFCSVLTKLGCGLLDYREQAQQIELKTGGMSASPHVLPDDSHMDTYEQGVLFSSLCLDRNLPDMMQLWSEIFNNPCFEEEEHFKVLVKMTAQELANGIPDSGHLYASIRAGRTLTPAGDLQETFSGMDQVRLMKRIAEMTDIKPILRKLPRIKKHLLNGDNMRCSVNATPQQMPQTEKAVEDFLRSIGRSKKERRPVRPHTVEKPVPSSSGGDAHVPHGSQVIRKLVMEPTFKPWQMKTHFLMPFPVNYVGECIRTVPYTDPDHASLKILARLMTAKFLHTEIREKGGAYGGGAKLSHNGIFTLYSYRDPNTIETLQSFGKAVDWAKSGKFTQQDIDEAKLSVFSTVDAPVAPSDKGMDHFLYGLSDEMKQAHREQLFAVSHDKLLAVSDRYLGTGKSTHGLAILGPENPKIAKDPSWIIR

SEQ ID NO: 929 - DNA, 6033 bp, Homo sapiens
cggggcgtgcgcgtcctcctccccaggcccgccgcctccctgccaagaatctgagagaggccgagtggagttcggtccttctctgaacagttttagctgagagtaccagcatccaactgggagcgttgtcattgcatttccacattcccaggaaagcccaggtgctggctgccagctgctgcgccccccatgtagaaggtgcacctcctgggagcaggcacgtcttttggctcttctgaccatggagagataggacggtccctgcagcccgcgcgacagaaagctgtgccgccaccaccggccgcgtccgtccttcggatggatcgcaacagagaggccgagatggagctgaggcgaggccccagccccaccagggccggccggggccacgaggtggatggggacaaggctacctgccacacctgctgcatctgcggcaagagcttccccttccagagctcgctttcgcagcacatgcgcaagcacacgggcgagaagccctacaagtgtccctactgcgaccaccgggcttcccagaagggcaacctgaagattcacatccggagccaccgcacggggactctgattcagggacacgagccggaggcgggcgaggcgccgctgggtgagatgcgcgcctccgagggcctggacgcctgcgccagccccaccaagagcgcctctgcctgcaaccggctgctgaacggggcctcgcaggccgacggcgccagggtcctgaacggggcctcgcaggccgacagcggcagagtcctgctgcggagcagcaagaagggggcagaggggtccgcatgcgccccgggggaggccaaggcagcggtccagtgctccttctgcaagagccagttcgagcgtaagaaggacctggagctgcacgtgcaccaggcgcacaagccgttcaagtgcaggctgtgcagctacgcgacgctgcgggaggagtcgctgctgagccacatcgagagggaccacatcaccgcgcaggggcccggcagcggcgaggcctgcgtggagaacggcaagcccgagctgagccccggggagttcccgtgcgaggtgtgtggccaggccttcagccagacctggttcctgaaggcgcacatgaagaagcaccggggctccttcgaccacggctgccacatctgcggccgtaggttcaaggagccctggttcctcaagaaccacatgaaggcgcacggccccaagacgggcagcaagaacaggcccaagagtgagctggaccccatcgccaccatcaacaacgtggtccaggaggaggtgatcgtcgccggcctgagcctctacgaggtctgcgccaagtgcgggaacctgtttacaaacctggacagcttgaacgcccacaatgccatccaccgcagagtcgaggccagccgcacgcgcgccccggccgaggagggggcggaggggccctcggacaccaagcagttctttctccagtgcctgaacctgaggccgtcggcggccggcgactcgtgccctggcacgcaggccggacggcgggtggctgagctggacccggtcaacagctaccaggcctggcagctggccacgcggggtaaggtggccgagccggccgagtacctcaagtacggggcctgggacgaggcgctggccggggacgtggccttcgacaaggacaggcgcgagtacgtcctggtgagccaggagaagcgcaagcgtgagcaggatgcaccagccgcgcaggggcccccgcggaagcgcgcgagcgggcctggggaccccgcgcccgccggccacctcgatccccgctcggccgcgcgccccaaccgcagggccgcagccaccaccggccagggcaagtcctccgagtgcttcgagtgcggcaagatcttccgcacctatcatcagatggtgctgcactcacgcgtgcatcgccgcgcgcgccgcgagagggacagtgacggggacagggcggcgcgggcccgctgcggatcactcagtgagggtgactcggcctcccagcccagcagccctggctccgcctgtgccgctgctgactccccgggctctggcctggccgacgaggctgccgaagacagtggtgaggagggcgcccctgaacctgcaccagggggacagccgcgccgctgctgcttttccgaagaggtgacttcgaccgagctctccagtggagaccagagtcacaagatgggagataacgcctcggaaagagacaccggcgagtccaaggcagggatcgcagcttctgtgtccatacttgaaaacagtagcagagagacttctagaaggcaagagcagcacagattttctatggacttaaagatgccagcatttcaccccaagcaggaggtgcccgtccctggtgatggtgtggagttcccttccagtacgggagcggagggccagacgggtcaccctgcagaaaagctgtccgatttgcacaacaaggaacactctgggggagggaagcgggcgctggccccagacctcatgccgctagatttaagtgcgaggtcgacgcgggatgaccccagcaataaggagacggcctcctccctgcaggcggctttagtcgttcacccgtgtccttactgcagccacaagacctactaccccgaggtcctgtggatgcacaaacgcatctggcaccgtgtcagctgcaactccgtggctcccccgtggattcagcccaatggttacaaaagcatcagaagcaatttggttttcctttcccggagcggacgcacgggccccccgcctgccctcggtggcaaagaatgccagcctttgctccttgctcggttcacccgcactcaggtgccaggggggatgccggggtccaaaagtggctcttctcccctgggagtggtcacaaaagccgctagcatgcctaagaataaggagagccattccggaggtccctgcgctctgtgggcgcccggccctgacgggtatcgacagaccaaaccttgtcacggccaggagccacatggcgcggccacacaggggcccctggccaagcccaggcaggaggctagctccaaaccggtgcctgccccgggtggcgggggcttcagcaggagcgccacccctacgcccaccgtcatcgcccgggctggcgcgcagccctcggccaatagcaagcctgtggagaagtttggggtccccccagcgggggctggctttgcccccacaaataagcacagtgccccggactccctgaaagccaaattcagtgctcagcctcagggtccacctcctgcaaagggcgaagggggcgctcctcctctacctccccgcgagcccccctcgaaggcagcccaggagctgaggactctggccacctgtgctgcggggtccaggggcgacgcggccttgcaggcccagcccggcgtggctggggcgccccccgtcctacactccatcaaacaggagccagtggccgaggggcatgagaagcgcctggacatcctcaacatctttaagacgtacattccaaaggactttgcgaccctctaccagggatggggtgtcagcggccctgggttggagcacagagggacactccggacgcaggcccggccaggagagttcgtctgcatcgagtgcggaaagagcttccaccagcccggccacctcagggcccacatgcgggcacactcagtggtgtttgagtccgatgggcctcggggttctgaagttcataccacctccgcagacgcccccaaacaagggagagaccattctaacacaggtaccgtccagacagtgcctctgagaaagggaacctaaaggcgtgtttccgacgcaccccaggtccccgtaacggccattagcagtaccctcacgatgtcccagcagcctcccacctgtgacctggccgctccatggaagaacagccggggaactcctgagcagacacctcacatcccgagccgctgcgctggagtggaaactgaaggcagatgcctctccttgttaaacgttcagaaataaatgaagatgctatattctagaaatacatgtagatactatatacgcatttacgtgctcatcgtccatagtcccatattttcttataataaacagtagtactggcaggcacagtaggggcacaaggcatctgtcttattcaagacaagtttgagacactggaaaaaaagatacttgttgtgtgtgttggacagagtggcgaggctgagcactgtcacaggggcctcccatgttaagagggactgtggggatgatgtcagaacaagacgtggtggatttgaggttgatcgagtattaatactactgcctctccttgtcttagtgggtatttaaaatagtaaataagagagaggaaggaggtgacgttcaggtgctgtgggaagcaggcttggcggaggggtatgatgatgagaccctcattgttcactggctccatcgcactcctccctggggccgtgtgcctgttccattcttcccaccattcgaactgagcgaatctggcaaaggagacacgtctgtgggaatgcgtagattccgcctcggaagagagctagcgcaacactaagaaaagcaggcttcttgtttattctcaggacctttttgtaacagggctacattctgcaaactgcttacaaaggaagactatacgtcttaacaaattatttagccactgagtcctcccgattcggacctgttttagtaatggcagaagaatccctgagcaggttcaggtgccctagatgactagggtgctgagctctggcgccttctgtccccactctttgcctccccgccccttccctgagccaccccagcaagtgggtgtcttttctccctgggcctggtgacctccacaggatgagtgactttgttcataaagggtggggatcaccagccccttgggtgggggacggcttcatatacctcttcctcagtaatgcaaatgcgagtttttgtggtgggggttaaggcccataacaaaggatcttaaaccatgcagtgtacgcaattgaaatggtattccacagatataaatattttcttttcccattgccgtgacactatgtgtgatggtaatatttctgagagtttcagatttttgcacatatgattttatgcattatcaaaagttactgctgccttgaatgaaaatgttctgtgaaattttttgcaaaagctttactaggtttttttttaattgtgaaattttgtaaaggcaggaaatggattaaaacgagcatgctaaatatatttttcaaaaaagcaataattttacatgtacagaaattatcctaacctttaatactggcgagagcaacagtttacttaatacggtaatggactagtgcagtttttgtagacagtgggcttctgatacaaagtcttgtttaaacacagacacacacacacacaaacacacacacacaccctaaagtgtgggtttcctgttctaatgatttgttgaatattattatattattattattattattattattattgttattgttattagtaatgtttggttctggattctacttgttactgagtttaaattacttgacggttcaggttactttgcaacactttcaaacgatgcaatgtaactggctagcttatatatatatatatatatatatatatatatttttttttttttttttacttatttttttctgatattcttacaccagatatgtacgaaaatgatctgtcctgttggtgtaattaggaatgtccatgcagatacagttaaacaactgtaattgactgttctgtaaagttattttgggcaaagttgcggagacacattcctctgtccacctaagaaatcagaagactcttctgttgatttatgtttaatcatttcagtagtttccccacagtgatcatttctgcattttctggcttttgttttcttggctgaaagtgaatggtgactgttaggaatgtcagggactagtgacccagtcctgtttctctgtgttttagttattaaaaagaaattctgtacccaaagtg

SEQ ID NO: 930 - protein, 1163 aa, Homo sapiens
MDRNREAEMELRRGPSPTRAGRGHEVDGDKATCHTCCICGKSFPFQSSLSQHMRKHTGEKPYKCPYCDHRASQKGNLKIHIRSHRTGTLIQGHEPEAGEAPLGEMRASEGLDACASPTKSASACNRLLNGASQADGARVLNGASQADSGRVLLRSSKKGAEGSACAPGEAKAAVQCSFCKSQFERKKDLELHVHQAHKPFKCRLCSYATLREESLLSHIERDHITAQGPGSGEACVENGKPELSPGEFPCEVCGQAFSQTWFLKAHMKKHRGSFDHGCHICGRRFKEPWFLKNHMKAHGPKTGSKNRPKSELDPIATINNVVQEEVIVAGLSLYEVCAKCGNLFTNLDSLNAHNAIHRRVEASRTRAPAEEGAEGPSDTKQFFLQCLNLRPSAAGDSCPGTQAGRRVAELDPVNSYQAWQLATRGKVAEPAEYLKYGAWDEALAGDVAFDKDRREYVLVSQEKRKREQDAPAAQGPPRKRASGPGDPAPAGHLDPRSAARPNRRAAATTGQGKSSECFECGKIFRTYHQMVLHSRVHRRARRERDSDGDRAARARCGSLSEGDSASQPSSPGSACAAADSPGSGLADEAAEDSGEEGAPEPAPGGQPRRCCFSEEVTSTELSSGDQSHKMGDNASERDTGESKAGIAASVSILENSSRETSRRQEQHRFSMDLKMPAFHPKQEVPVPGDGVEFPSSTGAEGQTGHPAEKLSDLHNKEHSGGGKRALAPDLMPLDLSARSTRDDPSNKETASSLQAALVVHPCPYCSHKTYYPEVLWMHKRIWHRVSCNSVAPPWIQPNGYKSIRSNLVFLSRSGRTGPPPALGGKECQPLLLARFTRTQVPGGMPGSKSGSSPLGVVTKAASMPKNKESHSGGPCALWAPGPDGYRQTKPCHGQEPHGAATQGPLAKPRQEASSKPVPAPGGGGFSRSATPTPTVIARAGAQPSANSKPVEKFGVPPAGAGFAPTNKHSAPDSLKAKFSAQPQGPPPAKGEGGAPPLPPREPPSKAAQELRTLATCAAGSRGDAALQAQPGVAGAPPVLHSIKQEPVAEGHEKRLDILNIFKTYIPKDFATLYQGWGVSGPGLEHRGTLRTQARPGEFVCIECGKSFHQPGHLRAHMRAHSVVFESDGPRGSEVHTTSADAPKQGRDHSNTGTVQTVPLRKGT

SEQ ID NO: 931 - DNA, 2033 bp, Homo sapiens
gaattccgggactgagctcttgaagacttgggtccttggtcgcaggtggagcgacgggtctcactccattgcccaggccagagtgcgggatatttgataagaaacttcagtgaaggccgggcgcggtgctcatgcccgtaatcccagcattttcggaggccgaggcatcatggaccgatctaaagaaaactgcatttcaggacctgttaaggctacagctccagttggaggtccaaaacgtgttctcgtgactcagcaatttccttgtcagaatccattacctgtaaatagtggccaggctcagcgggtcttgtgtccttcaaattcttcccagcgcgttcctttgcaagcacaaaagcttgtctccagtcacaagccggttcagaatcagaagcagaagcaattgcaggcaaccagtgtacctcatcctgtctccaggccactgaataacacccaaaagagcaagcagcccctgccatcgcacctgaaaataatcctgaggaggaactggcatcaaaacagaaaaatgaagaatcaaaaagaggcagtggctttggaagactttgaaattggtcgccctctgggtaaaggaaagtttggtaatgtttatttggcaagagaaaagcaaagcaagtttattctggctcttaaagtgttatttaaagctcagctggagaaagccggagtggagcatcagctcagaagagaagtagaaatacagtcccaccttcggcatcctaatattcttagactgtatggttatttccatgatgctaccagagtctacctaattctggaatatgcaccacttggaacagtttatagagaacttcagaaactttcaaagtttgatgagcagagaactgctaacttatataacagaattgcaaatgccctgtcttactgtcattcgaagagagttattcatagagacattaagccagagaacttacttcttggatcagctggagagcttaaaattgcagattttgggtggtcagtacatgctccatcttccaggaggaccactctctgtggcaccctggactacctgccccctgaaatgattgaaggtcggatgcatgatgagaaggtggatctctggagccttggagttctttgctatgaatttttagttgggaagcctccttttgaggcaaacacataccaagagacctacaaaagaatatcacgggttgaattcacattccctgactttgtaacagagggagccagggacctcatttcaagactgttgaagcataatcccagccagaggccaatgctcagagaagtacttgaacacccctggatcacagcaaattcatcaaaaccatcaaattgccaaaacaaagaatcagctagcaaacagtcttaggaatcgtgcagggggagaaatccttgagccagggctgccatataacctgacaggaacatgctactgaagtttattttaccattgactgctgccctcaatctagaacgctacacaagaaatattttgtttttactcagcaggtgtgccttaacctccctattcagaaagctccacatcaataaacatgacactctgaagtgaaagtagccacgagaattgtgctacttatactggaacataatctggaggcaaggttcgactgcagtcgaaccttgcctccagattatgaaccagtataagtagcacaattctcgtggctactttcacttcagagtgtcatgtttattgatgtggagctttctgaatagggaggttaaggcacacctgctgagtaaaacaaatatttcttgtgtagcgttcttaggaatctggtgtctgtccggccccggtaggcctgttgggtttctagtcctccttaccatcatctccatatgagagtgtgaaaataggaacacgtgctctacctccatttagggatttgcttgggatacagaagaggccatgtgtctcagagctgttaagggcttatttttttaaaacattggagtcatagcatgtgtgtaaactttaaatatgcaggccttcgtggctcgag

SEQ ID NO: 932 - protein, 402 aa, Homo sapiens
MDRSKENCISGPVKATAPVGGPKRVLVTQQFPCQNPLPVNSGQAQRVLCPSNSSQRVPLQAQKLVSSHKPVQNQKQKQLQATSVPHPVSRPLNNTQKSKQPLPSHLKIILRRNWHQNRKMKNQKEAVALEDFEIGRPLGKGKFGNVYLAREKQSKFILALKVLFKAQLEKAGVEHQLRREVEIQSHLRHPNILRLYGYFHDATRVYLILEYAPLGTVYRELQKLSKFDEQRTANLYNRIANALSYCHSKRVIHRDIKPENLLLGSAGELKIADFGWSVHAPSSRRTTLCGTLDYLPPEMIEGRMHDEKVDLWSLGVLCYEFLVGKPPFEANTYQETYKRISRVEFTFPDFVTEGARDLISRLLKHNPSQRPMLREVLEHPWITANSSKPSNCQNKESASKQS

SEQ ID NO: 933 - DNA, 2253 bp, Homo sapiens
ggaagacttgggtccttgggtcgcaggtgggagccgacgggtgggtagaccgtgggggatatctcagtggcggacgaggacggcggggacaaggggcggctggtcggagtggcggagcgtcaagtcccctgtcggttcctccgtccctgagtgtccttggcgctgccttgtgcccgcccagcgcctttgcatccgctcctgggcaccgaggcgccctgtaggatactgcttgttacttattacagctagaggcatcatggaccgatctaaagaaaactgcatttcaggacctgttaaggctacagctccagttggaggtccaaaacgtgttctcgtgactcagcaaattccttgtcagaatccattacctgtaaatagtggccaggctcagcgggtcttgtgtccttcaaattcttcccagcgcgttcctttgcaagcacaaaagcttgtctccagtcacaagccggttcagaatcagaagcagaagcaattgcaggcaaccagtgtacctcatcctgtctccaggccactgaataacacccaaaagagcaagcagcccctgccatcggcacctgaaaataatcctgaggaggaactggcatcaaaacagaaaaatgaagaatcaaaaaagaggcagtgggctttggaagactttgaaattggtcgccctctgggtaaaggaaagtttggtaatgtttatttggcaagagaaaagcaaagcaagtttattctggctcttaaagtgttatttaaagctcagctggagaaagccggagtggagcatcagctcagaagagaagtagaaatacagtcccaccttcggcatcctaatattcttagactgtatggttatttccatgatgctaccagagtctacctaattctggaatatgcaccacttggaacagtttatagagaacttcagaaactttcaaagtttgatgagcagagaactgctacttatataacagaattggcaaatgccctgtcttactgtcattcgaagagagttattcatagagacattaagccagagaacttacttcttggatcagctggagagcttaaaattgcagattttgggtggtcagtacatgctccatcttccaggaggaccactctctgtggcaccctggactacctgccccctgaaatgattgaaggtcggatgcatgatgagaaggtggatctctggagccttggagttctttgctatgaatttttagttgggaagcctccttttgaggcaaacacataccaagagacctacaaaagaatatcacgggttgaattcacattccctgactttgtaacagagggagccagggacctcatttcaagactgttgaagcataatcccagccagaggccaatgctcagagaagtacttgaacacccctggatcacagcaaattcatcaaaaccatcaaattgccaaaacaaagaatcagctagcaaacagtcttaggaatcgtgcagggggagaaatccttgagccagggctgccatataacctgacaggaacatgctactgaagtttattttaccattgactgctgccctcaatctagaacgctacacaagaaatatttgttttactcagcaggtgtgccttaacctccctattcagaaagctccacatcaataaacatgacactctgaagtgaaagtagccacgagaattgtgctacttatactggttcataatctggaggcaaggttcgactgcagccgccccgtcagcctgtgctaggcatggtgtcttcacaggaggcaaatccagagcctggctgtggggaaagtgaccactctgccctgaccccgatcagttaaggagctgtgcaataaccttcctagtacctgagtgagtgtgtaacttattgggttggcgaagcctggtaaagctgttggaatgagtatgtgattctttttaagtatgaaaataaagatatatgtacagacttgtattttttctctggtggcattcctttaggaatgctgtgtgtctgtccggcaccccggtaggcctgattgggtttctagtcctccttaaccacttatctcccatatgagagtgtgaaaaataggaacacgtgctctacctccatttagggatttgcttgggatacagaagaggccatgtgtctcagagctgttaagggcttatttttttaaaacattggagtcatagcatgtgtgtaaactttaaatatgcaaataaataagtatctatgtctaaaaaaaaaaaaaaaa

SEQ ID NO: 934 - protein, 403 aa, Homo sapiens
MDRSKENCISGPVKATAPVGGPKRVLVTQQIPCQNPLPVNSGQAQRVLCPSNSSQRVPLQAQKLVSSHKPVQNQKQKQLQATSVPHPVSRPLNNTQKSKQPLPSAPENNPEEELASKQKNEESKKRQWALEDFEIGRPLGKGKFGNVYLAREKQSKFILALKVLFKAQLEKAGVEHQLRREVEIQSHLRHPNILRLYGYFHDATRVYLILEYAPLGTVYRELQKLSKFDEQRTATYITELANALSYCHSKRVIHRDIKPENLLLGSAGELKIADFGWSVHAPSSRRTTLCGTLDYLPPEMIEGRMHDEKVDLWSLGVLCYEFLVGKPPFEANTYQETYKRISRVEFTFPDFVTEGARDLISRLLKHNPSQRPMLREVLEHPWITANSSKPSNCQNKESASKQS

SEQ ID NO: 935 - DNA, 1973 bp, Homo sapiens
ggatccggcaacgaaggtaccatggcgggacgtggcgccatggtgctgttgcacgtgctgtttgagcacgcggtcggctacgcgctcgtggcgctgaaggaagtggaggagatcagtctgctgcagccgcaggtggaggagtccgtgctcaacctgggcaaattccacagcatcgttcgtctggtggccttttgtccctttgcctcatcccaggttgccttggaaaatgccaacgccgtgtctgaaggggttgttcatgaggacctccgcctgctcttggagacccacctgccgtccaaaaagaagaaagtactcttgggagttggggatcccaagattggtgccgcaatacaggaggagttagggtacaactgccagactggaggagtcatagctgagatcctgcgaggagttcgtctgcacttccacaatctggtgaagggtctgaccgatctgtcagcttgtaaagcacagctggggctgggacacagctattcccgtgccaaagttaagtttaatgtgaaccgggtggacaatatgatcatccagtccattagcctcctggaccagctggataaggacatcaataccttctctatgcgtgtcagggagtggtacgggtatcactttccggagctggtgaagatcatcaacgacaatgccacatactgccgtcttgcccagtttattggaaaccgaagggaactgaatgaggacaagctggagaagctggaggagctgacaatggatggggccaaggctaaggctattctggatgcctcacggtcctccatgggcatggacatatctgccattgacttgataaacatcgagagcttctccagtcgtgtggtgtctttatctgaataccgccagagcctacacacttacctgcgctccaagatgagccaagtagcccccagcctgtcagccctaattggggaagcggtaggtgcacgtctcatcgcacatgctggcagcctcaccaacctggccaagtatccagcatccacagtgcagatccttggggctgaaaaggccctgttcagagccctgaagacaaggggtaacactccaaaatatggactcattttccactccaccttcattggccgagcagctgccaagaacaaaggccgcatctcccgatacctggcaaacaaatgcagtattgcctcacgaatcgattgcttctctgaggtgcccacgagtgtattcggggagaagcttcgagaacaagttgaagagcgactgtccttctatgagactggagagataccacgaaagaatctggatgtcatgaaggaagcaatggttcaggcagaggcagaggaagcggctgctgagattactaggaagctggagaaacaggagaagaaacgcttaaagaaggaaaagaaacggctggctgcacttgccctcgcgtcttcagaaaacagcagtagtactccagaggagtgtgaggagacgagtgaaaaacccaaaaagaagaaaaagcaaaagccccaggaggttcctcaggagaatggaatggaagacccatctatctctttctccaaacccaagaaaaagaaatctttttccaaggaggagttgatgagtagcgatcttgaagagaccgctggcagcaccagtattcccaagaggaagaagtctacacccaaggaggaaacagttaatgaccctgaggaggcaggccacagaagtcggtccaagaaaaagaggaaattctccaaagaggagccggtcagcagtgggcctgaagaggcggttggcaagagcagctccaagaagaagaaaaagttccataaagcatcccaggaagattagaatgcaaatggacattctctgggaggtggggcataccatagcccaaggtgacatttcccaccctgtgcccgtgttcccaataaaaacaaattcacaagaaaaaaaaaaaaaaaaaaaaaattcctgaggccgcaagggaattc

SEQ ID NO: 936 - protein, 602 aa, Homo sapiens
MAGRGAMVLLHVLFEHAVGYALVALKEVEEISLLQPQVEESVLNLGKFHSIVRLVAFCPFASSQVALENANAVSEGVVHEDLRLLLETHLPSKKKKVLLGVGDPKIGAAIQEELGYNCQTGGVIAEILRGVRLHFHNLVKGLTDLSACKAQLGLGHSYSRAKVKFNVNRVDNMIIQSISLLDQLDKDINTFSMRVREWYGYHFPELVKIINDNATYCRLAQFIGNRRELNEDKLEKLEELTMDGAKAKAILDASRSSMGMDISAIDLINIESFSSRVVSLSEYRQSLHTYLRSKMSQVAPSLSALIGEAVGARLIAHAGSLTNLAKYPASTVQILGAEKALFRALKTRGNTPKYGLIFHSTFIGRAAAKNKGRISRYLANKCSIASRIDCFSEVPTSVFGEKLREQVEERLSFYETGEIPRKNLDVMKEAMVQAEAEEAAAEITRKLEKQEKKRLKKEKKRLAALALASSENSSSTPEECEETSEKPKKKKKQKPQEVPQENGMEDPSISFSKPKKKKSFSKEELMSSDLEETAGSTSIPKRKKSTPKEETVNDPEEAGHRSRSKKKRKFSKEEPVSSGPEEAVGKSSSKKKKKFHKASQED

SEQ ID NO: 937 - DNA, 827 bp, Homo sapiens
ggaacagtgtggcccgccatgttcttctccgcggcgctccgggcccgggcggctggcctcaccgcccactggggaagacatgtaaggaatttgcataagacagctatgcaaaatggagctggaggagctttatttgtgcacagagatactcctgagaataaccctgatactccatttgatttcacaccagaaaactataagaggatagaggcaattgtaaaaaactatccagaaggccataaagcagcagctgttcttccagtcctggatttagcccaaaggcagaatgggtggttgcccatctctgctatgaacaaggttgcagaagttttacaagtacctccaatgagagtatatgaagtagcaactttttatacaatgtataatcgaaagccagttggaaagtatcacattcaggtctgcactactacaccctgcatgcttcgaaactctgacagcatactggaggccattcagaaaaagcttggaataaaggttggggagactacacctgacaaacttttcactcttatagaagtggaatgtttaggggcctgtgtgaacgcaccaatggttcaaataaatgacaattactatgaggatttgacagctaaggatattgaagaaattattgatgagctcaaggctggcaaaatcccaaaaccagggccaaggagtggacgcttctcttgtgagccagctggaggtcttacctctttgactgaaccacccaagggacctggatttggtgtacaagcaggcctttaatttatattgaactgtaaatatgtcactagagaaataaaatatggacttccaatctacgt

SEQ ID NO: 938 - protein, 249 aa, Homo sapiens
MFFSAALRARAAGLTAHWGRHVRNLHKTAMQNGAGGALFVHRDTPENNPDTPFDFTPENYKRIEAIVKNYPEGHKAAAVLPVLDLAQRQNGWLPISAMNKVAEVLQVPPMRVYEVATFYTMYNRKPVGKYHIQVCTTTPCMLRNSDSILEAIQKKLGIKVGETTPDKLFTLIEVECLGACVNAPMVQINDNYYEDLTAKDIEEIIDELKAGKIPKPGPRSGRFSCEPAGGLTSLTEPPKGPGFGVQAGL

SEQ ID NO: 939 - DNA, 1670 bp, Homo sapiens
gaattcaagaccagtctgaccaacatggtgaaaccccgtctctactaaaaatacaaaaattagccgggtgctggccaggcgctgtgactcatgcccgtaatccagcactttgggaggccaaggcgggtggatcacctgaggtcaggagttcaagaccagcttggccaacatggtgaaaccccgtctctactaaaaatcaaaaattagccaggggtggtggcacatgcctgtaacccagctactcagggggctgaggcaggcttgaatcctggacatgaaggttgcagtgagccgagatcgtgccactgcactccagcctggcgacagagtgagactcccatctcaaaaatatatatatatatatattagccgggtgtggtggcaggcacctgtgaatcccagctacacgggaggctgaggcagaagactcgcttgaacctgggaggtggaggttgcagtgagctgagattgcgccattgcactccagactaggagacagagcgaactctgtcaaaaaaaaaagagaagtatagtaatacatataaaagtctgtataaaaatgatatataggagcttccttttctgtcagagaaaattaaatttcttcgtgttatctttttatgtattcatggattttttaaaattaagaaaaaaaatcaggaaatataatgtctgaggtgagctgaatattgttatctgtaattcttttgtgtactcaataatttacagtaaaatatatttagaattgtatagttggctattagaaatagagtttctaccctattgtggtttttaaagtactgtggtccaggggtggtggctcacacctgtaatcccagcactttgggaggccaaggtgggcggatcacttgaggtcaggagttcaagaccagcctagccaacatggtgaaaccccacctctacaaaatatacaaaaattagctgggcgtgctggcgcgtgcctgtagacccagctgcttggcaggctgaggcatgaggatcgcttgaacctaggaggcagaagttgcagtgagccaacatcatgcctctgcactctagcctgggtgacggagcaagactgtctcaaaaaaataaaaataaagtgcctgtgtgcctgtgtatgcaatgggcattcaacaaatagttgttgaatgaataaattaaaaccttgagatttgcaatgcttaatccaaagaaaaaaatatttttaagaaaaatatttaaaagcattttaactatagccatggataagtacataagcacacaaaatgtaatcactgtgttggtaaaaaccttatttcaatacctttatccttcatacaagaataaatctctgaaagagaaaagaaaagaaagccgctctgagcgtacctacctttctactccggagagaggctcttttggcacagatcctgccccgtttagactccagctgctggcactgcttctgagttctttcacttccaaattcttatcatcctgcagccccaccacacagtcaatgactttaagttcctctggattttcacatggatcgtaatagacaacttcatcttgtttttctaaaaatgtattaatgattgtttaaaacatattttattattttaaaaaatgcattgaatttttttaaatgtaagaaaaataaagatcacttgtaatcccaaaaaaaa

SEQ ID NO: 940 - DNA, 549 bp, Homo sapiens
ttgcgtccccagaaccgggagacttaaggcatctttattgcgggatcctcacacggcctcctgggcccggcgatactcatagacgctgccgtgctcgggaaaggccagtgcttgcgggggcgaccccggcggtggggcggggtcctccgggtccccatagccaccgccgccgggcgtgtggagacagaacacatccccggggtacacggtcaccgacgtcttgccgcccagattcaccgtccggccgtttttgcggatcagcaggtttaggccgcgggcgccaggctcgcccccgtggagcccgtatggccggaaggcgcggcgctcggtcagcactgacagcagcgcctcctcacgaaagagcagctcgcgggtgacgccgtcgccgcctcggaagcggcctctgccccccgagccccgccgcagctcgaagcggcgcaggatgaccgggtaccggctctccagatctcagggtcggtgatgcgtgtggggtcatgtggtgtgcacaccgctgcccccgtgccagcttggacccgcgcccgcgcccgc

SEQ ID NO: 941 - DNA, 1769 bp, Homo sapiens
gagagggcgaaggtaggctggcagatacgttcgtcagcttgctcctttctgcccgtggacgccgccgaagaagcatcgttaaagtctctcttcaccctgccgtcatgtctaagtcagagtctcctaaagagcccgaacagctgaggaagctcttcattggagggttgagctttgaaacaactgatgagagcctgaggagccattttgagcaatggggaacgctcacggactgtgtggtaatgagagatccaaacaccaagcgctctaggggctttgggtttgtcacatatgccactgtggaggaggtggatgcagctatgaatgcaaggccacacaaggtggatggaagagttgtggaaccaaagagagctgtctccagagaagattctcaaagaccaggtgcccacttaactgtgaaaaagatatttgttggtggcattaaagaagacactgaagaacatcacctaagagattattttgaacagtatggaaaaattgaagtgattgaaatcatgactgaccgaggcagtggcaagaaaaggggctttgcctttgtaacctttgacgaccatgactccgtggataagattgtcattcagaaataccatactgtgaatggccacaactgtgaagttagaaaagccctgtcaaagcaagagatggctagtgcttcatccagccaaagaggtcgaagtggttctggaaactttggtggtggtcgtggaggtggtttcggtgggaatgacaacttcggtcgtggaggaaacttcagtggtcgtggtggctttggtggcagccgtggtggtggtggatatggtggcagtggggatggctataatggatttggcaatgatggaagcaattttggaggtggtggaagctacaatgattttgggaattacaacaatcagtcttcaaattttggacccatgaagggaggaaattttggaggcagaagctctggcccctatggcggtggaggccaatactttgcaaaaccacgaaaccaaggtggctatggcggttccagcagcagcagtagctatggcagtggcagaagattttaattaggaaacaaagcttagcaggagaggagagccagagaagtgacagggaagctacaggttacaacagatttgtgaactcagccaagcacagtggtggcagggcctagctgctacaaagaagacatgttttagacaaatactcatgtgtatgggcaaaaaactcgaggactgtatttgtgactaattgtataacaggttattttagtttctgttctgtggaaagtgtaaagcattccaacaaagggttttaatgtagatttttttttttgcaccccatgctgttgattgctaaatgtaacagtctgatcgtgacgctgaataaatgtcttttttttaatgtgctgtgtaaagttagtctactcttaagccatcttggtaaatttccccaacagtgtgaagttagaattccttcagggtgatgccaggttctatttggaatttatatacaacctgcttgggtggagaagccattgtcttcggaaaccttggtgtagttgaactgatagttactgttgtgacctgaagttcaccattaaaagggattacccaagcaaaatcatggaatggttataaaagtgattgttggcacatcctatgcaatatatctaaattgaataatggtaccagataaaattatagatgggaatgaagcttgtgtatccattatcatgtgtaatcaataaacgatttaattctcttgaa

SEQ ID NO: 942 - protein, 320 aa, Homo sapiens
MSKSESPKEPEQLRKLFIGGLSFETTDESLRSHFEQWGTLTDCVVMRDPNTKRSRGFGFVTYATVEEVDAAMNARPHKVDGRVVEPKRAVSREDSQRPGAHLTVKKIFVGGIKEDTEEHHLRDYFEQYGKIEVIEIMTDRGSGKKRGFAFVTFDDHDSVDKIVIQKYHTVNGHNCEVRKALSKQEMASASSSQRGRSGSGNFGGGRGGGFGGNDNFGRGGNFSGRGGFGGSRGGGGYGGSGDGYNGFGNDGSNFGGGGSYNDFGNYNNQSSNFGPMKGGNFGGRSSGPYGGGGQYFAKPRNQGGYGGSSSSSSYGSGRRF

SEQ ID NO: 943 - DNA, 1925 bp, Homo sapiens
gagagggcgaaggtaggctggcagatacgttcgtcagcttgctcctttctgcccgtggacgccgccgaagaagcatcgttaaagtctctcttcaccctgccgtcatgtctaagtcagagtctcctaaagagcccgaacagctgaggaagctcttcattggagggttgagctttgaaacaactgatgagagcctgaggagccattttgagcaatggggaacgctcacggactgtgtggtaatgagagatccaaacaccaagcgctctaggggctttgggtttgtcacatatgccactgtggaggaggtggatgcagctatgaatgcaaggccacacaaggtggatggaagagttgtggaaccaaagagagctgtctccagagaagattctcaaagaccaggtgcccacttaactgtgaaaaagatatttgttggtggcattaaagaagacactgaagaacatcacctaagagattattttgaacagtatggaaaaattgaagtgattgaaatcatgactgaccgaggcagtggcaagaaaaggggctttgcctttgtaacctttgacgaccatgactccgtggataagattgtcattcagaaataccatactgtgaatggccacaactgtgaagttagaaaagccctgtcaaagcaagagatggctagtgcttcatccagccaaagaggtcgaagtggttctggaaactttggtggtggtcgtggaggtggtttcggtgggaatgacaacttcggtcgtggaggaaacttcagtggtcgtggtggctttggtggcagccgtggtggtggtggatatggtggcagtggggatggctataatggatttggcaatgatggtggttatggaggaggcggccctggttactctggaggaagcagaggctatggaagtggtggacagggttatggaaaccagggcagtggctatggcgggagtggcagctatgacagctataacaacggaggcggaggcggctttggcggtggtagtggaagcaattttggaggtggtggaagctacaatgattttgggaattacaacaatcagtcttcaaattttggacccatgaagggaggaaattttggaggcagaagctctggcccctatggcggtggaggccaatactttgcaaaaccacgaaaccaaggtggctatggcggttccagcagcagcagtagctatggcagtggcagaagattttaattaggaaacaaagcttagcaggagaggagagccagagaagtgacagggaagctacaggttacaacagatttgtgaactcagccaagcacagtggtggcagggcctagctgctacaaagaagacatgttttagacaaatactcatgtgtatgggcaaaaaactcgaggactgtatttgtgactaattgtataacaggttattttagtttctgttctgtggaaagtgtaaagcattccaacaaagggttttaatgtagatttttttttttgcaccccatgctgttgattgctaaatgtaacagtctgatcgtgacgctgaataaatgtcttttttttaatgtgctgtgtaaagttagtctactcttaagccatcttggtaaatttccccaacagtgtgaagttagaattccttcagggtgatgccaggttctatttggaatttatatacaacctgcttgggtggagaagccattgtcttcggaaaccttggtgtagttgaactgatagttactgttgtgacctgaagttcaccattaaaagggattacccaagcaaaatcatggaatggttataaaagtgattgttggcacatcctatgcaatatatctaaattgaataatggtaccagataaaattatagatgggaatgaagcttgtgtatccattatcatgtgtaatcaataaacgatttaattctcttgaa

SEQ ID NO: 944 - protein, 372 aa, Homo sapiens
MSKSESPKEPEQLRKLFIGGLSFETTDESLRSHFEQWGTLTDCVVMRDPNTKRSRGFGFVTYATVEEVDAAMNARPHKVDGRVVEPKRAVSREDSQRPGAHLTVKKIFVGGIKEDTEEHHLRDYFEQYGKIEVIEIMTDRGSGKKRGFAFVTFDDHDSVDKIVIQKYHTVNGHNCEVRKALSKQEMASASSSQRGRSGSGNFGGGRGGGFGGNDNFGRGGNFSGRGGFGGSRGGGGYGGSGDGYNGFGNDGGYGGGGPGYSGGSRGYGSGGQGYGNQGSGYGGSGSYDSYNNGGGGGFGGGSGSNFGGGGSYNDFGNYNNQSSNFGPMKGGNFGGRSSGPYGGGGQYFAKPRNQGGYGGSSSSSSYGSGRRF

SEQ ID NO: 945 - DNA, 1440 bp, Homo sapiens
agacagcccagtagctgtgagtcggtctgacaaagccatattgaagtacggagtacggtttcaaagcagtcagaaaaagaacgggaatgctgttcaggaaattcttcaggcatgggcagggacttggctgcagttctgcagttggaaaatctgactggggcagcttctgagcgcaggctgggcctgcacacactcagcgggccgagtggccacctccttcagagctgctcagcacgccctgggatcgcgggcggttttcatcggccggtttgtgaaacggacaagagagagacattactgccgggagtgttgagtgaagggaccaggtggagatgatgcctcaggagcagtacactcaccaccggagcaccatgcctggctctgtggggccacaggtatacaaggtggggatttatggctggcggaaacgatgcctgtatttctttgtcctgctcctcatgattttaatactggtgaacttggccatgaccatctggattctcaaagtcatgaacttcacaattgatggaatgggaaacctgaggatcacagaaaaaggtctaaagctagaaggagactctgaattcttacaacctctctacgccaaagaaatccagtcccgaccaggtaatgccctgtacttcaagtctgccagaaatgttacagtgaacattctcaatgaccagactaaagtgctaactcagcttataacaggtccaaaagccgtagaagcttatggtaaaaaatttgaggtaaaaactgtttctggaaaattgctcttctctgcagacaataatgaagtggtagtaggagctgaaagattacgagttttaggagcggagggcacagtgttccctaaatctatagaaacacctaatgtcagggcagaccccttcaaagaactaaggttggagtccccaacccggtctctagtgatggaggccccaaaaggagtggaaatcaatgcagaagctggcaatatggaagccacctgcaggacagagctgagactggaatccaaagatggagagattaagttagatgctgcgaaaatcaggctacctagactgcctcatggatcctacacgcctacaggaacgaggcagaaggtcttcgagatctgcgtctgcgccaatgggagattattcctgtctcaggcaggagctgggtccacttgtcagataaacacaagtgtctgcctctgaaagactatccatagtggacattgttggcagcataaaggccttttttggctttagacactggctgccagctatttttactagaacacagaaagcctatcaaagaccttgtgtgtatgtgtacgtgtgtgtgcgtgcttgagtgtgttcgcgtgtgtgggtggatataaatatatataaatatatataaataaatatatatatcctctgtataaaaaaaaaaaaaaaaaaaaaaaaa

SEQ ID NO: 946 - protein, 290 aa, Homo sapiens
MMPQEQYTHHRSTMPGSVGPQVYKVGIYGWRKRCLYFFVLLLMILILVNLAMTIWILKVMNFTIDGMGNLRITEKGLKLEGDSEFLQPLYAKEIQSQPGNALYFKSARNVTVNILNDQTKVLTQLITGPKAVEAYGKKFEVKTVSGKLLFSADNNEVVVGAERLRVLGAEGTVFPKSIETPNVRADPFKELRLESPTRSLVMEAPKGVEINAEAGNMEATCRTELRLESKDGEIKLDAAKIRLPRLPHGSYTPTGTRQKVFEICVCANGRLFLSQAGAGSTCQINTSVCL

SEQ ID NO: 947 - DNA, 1404 bp, Homo sapiens
agacagcccagtagctgtgagtcggtctgacaaagccatattgaagtacggagtacggtttcaaagcagtcagaaaaagaacgggaatgctgttcaggaaattcttcaggcatgggcagggacttggctgcagttctgcagttggaaaatctgactggggcagcttctgagcgcaggctgggcctgcacacactcagcgggccgagtggccacctccttcagagctgctcagcacgccctgggatcgcgggcggttttcatcggccggtttgtgaaacggacaagagagagacattactgccgggagtgttgagtgaagggaccaggtggagatgatgcctcaggagcagtacactcaccaccggagcaccatgcctggctctgtggggccacaggtatacaaggtggggatttatggctggcggaaacgatgcctgtatttctttgtcctgctcctcatgattttaatactggtgaacttggccatgaccatctggattctcaaagtcatgaacttcacaattgatggaatgggaaacctgaggatcacagaaaaaggtctaaagctagaaggagactctgaattcttacaacctctctacgccaaagaaatccagtcccgaccaggtaatgccctgtacttcaagtctgccagaaatgttacagtgaacattctcaatgaccagactaaagtgctaactcagcttataacaggtccaaaagccgtagaagcttatggtaaaaaatttgaggtaaaaactgtttctggaaaattgctcttctctgcagacaataatgaagtggtagtaggagctgaaagattacgagttttaggagcggagggcacagtgttccctaaatctatagaaacacctaatgtcagggcagaccccttcaaagaactaaggttggagtccccaacccggtctctagtgatggaggccccaaaaggagtggaaatcaatgcagaagctggcaatatggaagccacctgcaggacagagctgagactggaatccaaagatggagaggtgagggatgagaaggacagaagttcaaagagctacagcttcaacaggccaacccttcccataactggttgacctcggagttggatcctacagtgtatcaacaaaaggagccaagcaggttttatttctgaaacaattaattgagcagcatgattataagccaaacccacaatccatcaaagtgatgatttcttatttgtaaaatgcagagataatggcatgtattccaagtacagaattatatgaccatgaaaatgaatgctattttcaaattctctcttgtcaccttaaaataagattttgttagccaacataattaagctgtatatattatacacatctggctcaagaaaaaaaaaaaaaaaaaaaaaaa

SEQ ID NO: 948 - protein, 256 aa, Homo sapiens
MMPQEQYTHHRSTMPGSVGPQVYKVGIYGWRKRCLYFFVLLLMILILVNLAMTIWILKVMNFTIDGMGNLRITEKGLKLEGDSEFLQPLYAKEIQSRPGNALYFKSARNVTVNILNDQTKVLTQLITGPKAVEAYGKKFEVKTVSGKLLFSADNNEVVVGAERLRVLGAEGTVFPKSIETPNVRADPFKELRLESPTRSLVMEAPKGVEINAEAGNMEATCRTELRLESKDGEVRDEKDRSSKSYSFNRPTLPITG

SEQ ID NO: 949 - DNA, 1619 bp, Homo sapiens
ggggatatggcggggcctttgtctctcgctgtcgccggagtcccaggtctgtcttcactgctctgtgtcctctgctcctagaggcccagcctctgtggcgctgttaccagcagtattggagatccacagctaagatgccaggaccccctagaagcctagaaatgggactgttgacatttagggatgtggccatagaattctctctggaggagtggcaacacctggacattgcacagcagaatttatatagaaatgtgatgttagagaactacagaaacctggccttcctgggtattgctgtctctaagccagacctgatcacctgtctggaacaagggaaagagccctggaatatgaagcgacatgagatggtggatgaacccccaggtatgtgtcctcattttgctcaagacctttggccagagcagggcatggaagattcttttcaaaaagcaatactgagaagatatggaaaatatggacatgagaatttacagttaagaaaaggctgtaaaagtgtggatgagtataaggtgaacaaagaaggttataatggacttaaccagtgtttcacaactgcccagagcaaagtatttcaatgtgataaatatttgaaagtcttctataaatttttaaattcaaacagacctaagataagacatactgaaaagaaatctttcaaatgtaaaaaacgtgtcaaattattttgcatgctttcacataaaacccaacacaaaagcatttatcatagagagaagtcctacaaatgtaaagaatgtggaaaaacctttaattggtcctcaacccttactaatcataggaaaatttatactgaagagaaaccttacaaatgtgaagaatataacaaatctcctaagcaactctcaacccttactacacatgaaataattcatgctggagagaaactctacaaatgtgaagaatgtggcaaagcttttaatcggtcctcaacttttactaaacataaggtaattcatactggagtaaaaccctacaaatgtgaagaatgtggcaaagcatttttctggtcctcaaccctaactaaacataagagaattcatactggagagcaaccctacaaatgggaaaaatttggcaaagcctttaatcggtcctcgcacctcaccacagataagataactcatactggagagaaatcttacaagtatgaataatgtgccaaagcctaagaaaaccctcaattcttaatagatataagattattcctactggagagaaactacaaacctgagagaggcgctaatgcttttgacagtacctaaaactttaaagaaaatcattctgctgaaaaatcctagaaatgtgaagaatgtgaaaaagcctttaaatgattgtcacacttgattgtaggtaagataattcatactggagaaaactaccagtgtgaacaacgtggccaagcttcgacaatgctcacaccctattgcacaggaaagcatttatacttgagaagaaatgtacaaatattggcaaagtaaaaaatccattaacacctgctcacatcttactcaaaattgtagagttcatagtaaataaaagcattaaaattcaaaaaaaaaaaaaaaaaaaaaaaaaaa

SEQ ID NO: 950 - protein, 353 aa, Homo sapiens
MPGPPRSLEMGLLTFRDVAIEFSLEEWQHLDIAQQNLYRNVMLENYRNLAFLGIAVSKPDLITCLEQGKEPWNMKRHEMVDEPPGMCPHFAQDLWPEQGMEDSFQKAILRRYGKYGHENLQLRKGCKSVDEYKVNKEGYNGLNQCFTTAQSKVFQCDKYLKVFYKFLNSNRPKIRHTEKKSFKCKKRVKLFCMLSHKTQHKSIYHREKSYKCKECGKTFNWSSTLTNHRKIYTEEKPYKCEEYNKSPKQLSTLTTHEIIHAGEKLYKCEECGKAFNRSSTFTKHKVIHTGVKPYKCEECGKAFFWSSTLTKHKRIHTGEQPYKWEKFGKAFNRSSHLTTDKITHTGEKSYKYE

SEQ ID NO: 951 - DNA, 4185 bp, Homo sapiens
cgcgaggcgagcgcgggagcctgggcggcgagccgggtgtgagctgcctgaaaatgcactcggatgccgccgctgtcaattttcagctgaactctcatctctcaacactggcaaatattcataagatctaccacacccttaataagctgaacctaacagaagacattggccaagacgatcaccaaacaggaagtctgcggtcttgcagttcttcagactgctttaataaagtgatgccaccaaggaaaaagagaagacctgcctctggagatgatttatctgccaagaaaagtagacatgatagcatgtatagaaaatatgattcgactagaataaagactgaagaagaagccttttcaagtaaaaggtgcttggaatggttctatgaatatgcaggaactgatgatgttgtaggccctgaaggcatggagaaattttgtgaagacattggtgttgaaccagaaaacgtagttatgcttgtcctagcttggaaattggatgcacaaaacatgggttattttactctacaggagtggttaaaaggaatgacttctctccaatgtgatacaacagaaaaactcagaaatactttggattacttaagatcattcttaaatgattctacaaactttaaacttatttacagatatgcgtttgactttgcacgggaaaaggaccagcgcagcctagacataaacactgccaagtgcatgttgggactgttattaggaaaaatctggcccctttttccagtttttcaccaattcttagagcaatcaaaatacaaagttattaataaagaccagtggtgcaatgtcctagagtttagcagaacaattaatcttgacctcagcaactatgatgaagatggagcatggccagttttgttggacgagtttgtggagtggtataaagacaaacagatgtcctaggactttatgcatagcagcgagagagtcactgttaccacagttttgtcacccattagccataaattgctgtttgtatcaaagcgcatgctgcttctcttgcactgtttccctttcgcagggacatgttggtgtttgctattgaattggccagctctgcttgctgtgtggcattgttctcttggaaggctgctttgcagtttgtatttacactacagattggtgaatttgccaacgtcctcactgtgattatgtgtatattgctgtttaaattttgtatatgtgtataaaaggaaaaaggttcacctagagattatttctgaaaaatgtattgtaaaaataattttgtggcatttctagtccctttttttgaatgaaccaattatactttatttggtctcctatgtagcatttcagaaaacaagagaaaactgttaccatgaacaaacattgccagaattaaccttactgtttaagaggccaacttctggaaggaggtaggagtcataactttttagaggcatatgccaaatatcatttggtatacttaacaatattagtgttttaaaatgatgagttataattatttgaacatatagatatgtaacatgccacaaatcatttctaccatgcaaggtgtataagttgtttattttttagtgttaaaactataatagcttgaatataggtaccaatgaacaaattcaaattgcacctcttttcttaaaagaatgggatttaaactcttataaacattctttaacttttttgtttgtttgttctctttttttccttttgcattcttctagccagtgattgatctgctaatgctttctttgccactctaagtaaaatttatttcacctcctcaatgaaaacctcatggttttgctggctgtttataactgcatcgcacttctagttgtggcttgaattttcagttaagctttcatggtatgtaattttccagccttttgagaaaacaagcatactataagtgagagctgttttgttttccttgtttgtttgtttcatgctaggcttttcctggcagcatgtccattgcaggcagtggacaagaaaccaccagcattgagctaacccagtacatgctaggacctgtcctagaggggccacttttcattacctgagttatttgtacagaagggcaatagccattatttttgtggatgaggaaacaagaataaacagaatggtatttttaggtttgtattttatgtctttttttttttttttttttttgccattcttgaggaaatatagagatgacatgttttcaccccaactatctggtgctattgaatgactaattcagtccctaaagttctgtgaaaacacaaaagtctaatgatttgagtgagtaaaaggtaatggtgcatttgaacaagtaaatgctgtcgtggtcagcaagatccgtgatttgaacatgtgatgactggaaaaaggtttgggttatttggaactctggctaaaacttctttcgggtgacatgtgatcgtttaaatggcattaagtgaataaagcacacagacagtgctactcttgaccactattttaccatttctttgcaaacagtgttcacattttcatattttttccctaactaaaccaccaaagaaagaaattttgtatgtatatacagtgtgtgtgtatacaaaatcatgatatagtagaatgcaactactttctttttctaccaaacgaaaggttttatttgctgtgaaataaaccagaagtttaaaaaaccctgtagtgattaagcatacttaaccactccttatttgtagattcactttcaaccttaaaaattaataccagtttgcataaaccaatatctgaaaagaacaggaaatgttaatggcaagcaacagctattaatactgatgtgatggatgcatttgttttgcagtggtgactggcctaggcaggtttggatctgtgaagaattgattcattttcaaaattattccataaagttaaaaagttacactttaaaggcaacaggtcatacagttctttaaatctgatcaactgtagctttatttaaagcaaatataaatcatagatgaagttattttaaacactatgttagaatatagagatttttaaaaaatgctgataagcacagttaattctaaaatgagaggattgttacaggagggagatgttacagttaatccacaatcaacattttgatggtagggaaaaaactgcgtaaaaactattgcattatgtatgataagaaagtaagtattccaaagggataatcttgcatattaagaaaactccaaataatctttaaactgccttgaaaaataaacctctttgactgctgagcggcagagtgcttacccttgattgtcttgattttatatatttatttctaaggggagaaaaaggggtcagacagagtaatatgatacattttcttaaaaacttctctaagttgcacaaaactgaacaatcatcaagcacttatttactggctaatgttgaataaattagggtgccttcatctgggttttctttagtacctaagtctacaaccctttctctttttctattgtgtttcgaactccacattgcaatactctgttgtcatggaatacaacctttagatgtttactgctgaagtaggtcagaaattgtattatttgatttgcctcaaacatccactgtaatgttacatgcaccttttttgaagcatgaactctgaattatgtttttataaatctgactaggcaaacctagattctggtttcacaatggatttattttctctctcagtctccattttaacagtgcttttgaagtttatacagaaagctttaaaagttagtttgtgcccttggtttttattcttaaaactgctaaaatacctctgtaagccttatcctttattctttcatatgttgtataataaatgtatagatttcattgaccaactaaaatgttgggtgtctgtaaatgagaccaaaacgtgggttgcttttttcataaaataatttctattgggggttactgttcaatgacagcaggtaacctataactgtgaatgcttcgtgtcgtcagtatttgcattacattcataaaagtgtgcaagtcctgtgactcccagcttaactgaaatactgttatgccacctaacttgagtacagcaaactggttttaggtttcaatgacattgatgtaaaatgatatcccatgaataaaaagtatttgtgtttggtttcag

SEQ ID NO: 952 - protein, 309 aa, Homo sapiens
RGERGSLGGEPGVSCLKMHSDAAAVNFQLNSHLSTLANIHKIYHTLNKLNLTEDIGQDDHQTGSLRSCSSSDCFNKVMPPRKKRRPASGDDLSAKKSRHDSMYRKYDSTRIKTEEEAFSSKRCLEWFYEYAGTDDVVGPEGMEKFCEDIGVEPENVVMLVLAWKLDAQNMGYFTLQEWLKGMTSLQCDTTEKLRNTLDYLRSFLNDSTNFKLIYRYAFDFAREKDQRSLDINTAKCMLGLLLGKIWPLFPVFHQFLEQSKYKVINKDQWCNVLEFSRTINLDLSNYDEDGAWPVLLDEFVEWYKDKQMS

SEQ ID NO: 953 - DNA, 3128 bp, Homo sapiens
cggacaggagccattgtgggcgagagcaagttaaggggagggggtgtaagagccagcgaataagagagagagtaagagggagagagaagaagaggaagaagaggaggcggcggcgcggaggaggaggaggactagtgtggggtggaaaggaagagtgagcgagcaagttaaggggagggggtgtaagagccagcgaattctttttctttttctattattattttgacgactcctgagttgcgcccatgctcttgtcagcttcgttttaggcgtagcatggccaggcagaagaaaatggggcaaagcgtgctccgggcggtcttctttttagtcctggggcttttgggtcattctcacggaggattccccaacaccatcagcataggtggacttttcatgagaaacacagtgcaggagcacagcgctttccgctttgccgtgcagttatacaacaccaaccagaacaccaccgagaagcccttccatttgaattaccacgtagatcacttggattcctccaatagtttttccgtgacaaatgctttctgctcccagttctcgagaggggtgtatgccatctttggattctatgaccagatgtcaatgaacaccctgacctccttctgtggggccctgcacacatcctttgttacgcctagcttccccactgacgcagatgtgcagtttgtcatccagatgcgcccagccttgaagggcgctattctgagtcttctgggtcattacaagtgggagaagtttgtgtacctctatgacacagaacgaggattttccatcctccaagcgattatggaagcagcagtgcaaaacaactggcaagtaacagcaaggtctgtgggaaacataaaggacgtccaagaattcaggcgcatcattgaagaaatggacaggaggcaggaaaagcgatacttgattgactgcgaagtcgaaaggattaacacaattttggaacaggttgtgatcctagggaaacactcaagaggttatcactacatgctcgctaacctgggttttactgatattttactggaaagagtcatgcatgggggagccaacattacaggtttccagattgtcaacaatgaaaaccctatggttcagcagttcatacagcgctgggtgaggctggatgaaagggaattccctgaagccaagaatgcaccactaaagtatacatctgcattgacacacgacgcaatactggtcatagcagaagctttccgctacctgaggaggcaacgagtagatgtgtcccggagaggaagtgctggagactgcttagcaaatcctgctgtgccctggagtcaaggaattgatattgagagagctctgaaaatggtgcaagtacaaggaatgactggaaatattcaatttgacacttatggacgtaggacaaattataccatcgatgtgtatgaaatgaaagtcagtggctctcgaaaagctggctactggaacgagtatgaaaggtttgtgcctttctcagatcagcaaatcagcaatgacagtgcatcctcagagaatcggaccatagtagtgactaccattctggaatcaccatatgtaatgtacaaaaagaaccatgagcaactggaaggaaatgaacgatatgaaggctattgtgtagacctagcctatgaaatagccaaacatgtaaggatcaaatacaaattgtccatcgttggtgacgggaaatatggtgcaagggatccagagactaaaatatggaacggcatggttggggaacttgtctatgggagagctgatatagctgttgctccactcactataacattggtccgtgaagaagtcatagatttttcaaagccattcatgagcctgggcatctccatcatgataaagaagcctcagaaatcaaaaccaggcgtattctcatttctggatcccctggcttatgaaatctggatgtgcattgtctttgcttacattggagtcagcgtagttcttttcctagtcagcaggttcagtccttatgaatggcacttggaagacaacaatgaagaacctcgtgacccacaaagtcctcctgatcctccaaatgaatttggaatatttaacagtctttggttttccttgggtgcctttatgcagcaaggatgtgatatttctccaagatcactctccgggcgcattgttggaggggtttggtggttcttcaccctgatcataatttcttcctatactgccaatctcgctgctttcctgactgtggagaggatggtttctcccatagagagtgctgaagacttagctaaacagactgaaattgcatatgggaccctggactccggttcaacaaaagaatttttcagaagatccaaaattgctgtgtacgagaaaatgtggtcttacatgaaatcagcggagccatctgtgtttaccaaaacaacagcagacggagtggcccgagtgcgaaagtccaagggaaagttcgccttcctgctggagtcaaccatgaatgagtacattgagcagagaaaaccatgtgatacgatgaaagttggtggaaatctggattccaaaggctatggtgtggcaacccctaaaggctcagcattaggaaatgctgttaacctggcagtattaaaactgaatgagcaaggcctcttggacaaattgaaaaacaaatggtggtacgacaaaggagagtgcggcagcgggggcggtgactccaaggacaagaccagcgctctgagcctgagcaatgtggcaggcgttttctatatacttgtcggaggtctggggctggccatgatggtggctttgatagaattctgttacaaatcacgggcagagtccaaacgcatgaaactcacaaagaacacccaaaactttaagcctgctcctgccaccaacactcagaattatgctacatacagagaaggctacaacgtgtatggaacagagagtgttaagatctaggatcccttcccactggaggcatgtgatgagaggaaatcaccgaaaacggcgtgcatggcatgcacgttcagacagctgcattgtaagagttctgtcatgcagtctgaaaagggaagaaacaggatggctttctgtagccacacctgtgaggcgtgatgattgttggg

SEQ ID NO: 954 - protein, 894 aa, Homo sapiens
MARQKKMGQSVLRAVFFLVLGLLGHSHGGFPNTISIGGLFMRNTVQEHSAFRFAVQLYNTNQNTTEKPFHLNYHVDHLDSSNSFSVTNAFCSQFSRGVYAIFGFYDQMSMNTLTSFCGALHTSFVTPSFPTDADVQFVIQMRPALKGAILSLLGHYKWEKFVYLYDTERGFSILQAIMEAAVQNNWQVTARSVGNIKDVQEFRRIIEEMDRRQEKRYLIDCEVERINTILEQVVILGKHSRGYHYMLANLGFTDILLERVMHGGANITGFQIVNNENPMVQQFIQRWVRLDEREFPEAKNAPLKYTSALTHDAILVIAEAFRYLRRQRVDVSRRGSAGDCLANPAVPWSQGIDIERALKMVQVQGMTGNIQFDTYGRRTNYTIDVYEMKVSGSRKAGYWNEYERFVPFSDQQISNDSASSENRTIVVTTILESPYVMYKKNHEQLEGNERYEGYCVDLAYEIAKHVRIKYKLSIVGDGKYGARDPETKIWNGMVGELVYGRADIAVAPLTITLVREEVIDFSKPFMSLGISIMIKKPQKSKPGVFSFLDPLAYEIWMCIVFAYIGVSVVLFLVSRFSPYEWHLEDNNEEPRDPQSPPDPPNEFGIFNSLWFSLGAFMQQGCDISPRSLSGRIVGGVWWFFTLIIISSYTANLAAFLTVERMVSPIESAEDLAKQTEIAYGTLDSGSTKEFFRRSKIAVYEKMWSYMKSAEPSVFTKTTADGVARVRKSKGKFAFLLESTMNEYIEQRKPCDTMKVGGNLDSKGYGVATPKGSALGNAVNLAVLKLNEQGLLDKLKNKWWYDKGECGSGGGDSKDKTSALSLSNVAGVFYILVGGLGLAMMVALIEFCYKSRAESKRMKLTKNTQNFKPAPATNTQNYATYREGYNVYGTESVKI

SEQ ID NO: 955 - DNA, 3056 bp, Homo sapiens
tgacgactcctgagttgcgcccatgctcttgtcagcttcgttttaggcgtagcatggccaggcagaagaaaatggggcaaagcgtgctccgggcggtcttctttttagtcctggggcttttgggtcattctcacggaggattccccaacaccatcagcataggtggacttttcatgagaaacacagtgcaggagcacagcgctttccgctttgccgtgcagttatacaacaccaaccagaacaccaccgagaagcccttccatttgaattaccacgtagatcacttggattcctccaatagtttttccgtgacaaatgctttctgctcccagttctcgagaggggtgtatgccatctttggattctatgaccagatgtcaatgaacaccctgacctccttctgtggggccctgcacacatcctttgttacgcctagcttccccactgacgcagatgtgcagtttgtcatccagatgcgcccagccttgaagggcgctattctgagtcttctgggtcattacaagtgggagaagtttgtgtacctctatgacacagaacgaggattttccatcctccaagcgattatggaagcagcagtgcaaaacaactggcaagtaacagcaaggtctgtgggaaacataaaggacgtccaagaattcaggcgcatcattgaagaaatggacaggaggcaggaaaagcgatacttgattgactgcgaagtcgaaaggattaacacaattttggaacaggttgtgatcctagggaaacactcaagaggttatcactacatgctcgctaacctgggttttactgatattttactggaaagagtcatgcatgggggagccaacattacaggtttccagattgtcaacaatgaaaaccctatggttcagcagttcatacagcgctgggtgaggctggatgaaagggaattccctgaagccaagaatgcaccactaaagtatacatctgcattgacacacgacgcaatactggtcatagcagaagctttccgctacctgaggaggcagcgagtagatgtgtcccggagaggaagtgctggagactgcttagcaaatcctgctgtgccctggagtcaaggaattgatattgagagagctctgaaaatggtgcaagtacaaggaatgactggaaatattcaatttgacacttatggacgtaggacaaattataccatcgatgtgtatgaaatgaaagtcagtggctctcgaaaagctggctactggaacgagtatgaaaggtttgtgcctttctcagatcagcaaatcagcaatgacagtgcatcctcagagaatcggaccatagtagtgactaccattctggaatcaccatatgtaatgtacaagaagaaccatgagcaactggaaggaaatgaacgatatgaaggctattgtgtagacctagcctatgaaatagccaaacatgtaaggatcaaatacaaattgtccatcgttggtgacgggaaatatggtgcaagggatccagagactaaaatatggaacggcatggttggggaacttgtctatgggagagctgatatagctgttgctccactcactataacattggtccgtgaagaagtcatagatttttcaaagccattaatgagcctgggcatctccatcatgataaagaagcctcagaaatcaaaaccaggcgtattctcatttctggatcccctggcttatgaaatctggatgtgcattgtctttgcttacattggagtcagcgtagttcttttcctagtcagcaggttcagtccttatgaatggcacttggaagacaacaatgaagaacctcgtgacccacaaagtcctcctgatcctccaaatgaatttggaatatttaacagtctttggttttccttgggtgcctttatgcagcaaggatgtgatatttctccaagatcactctccgggcgcattgttggaggggtttggtggttcttcaccctgatcataatttcttcctatactgccaatctcgctgctttcctgactgtggagaggatggtttctcccatagagagtgctgaagacttagctaaacagactgaaattgcatatgggaccctggactccggttcaacaaaagaatttttcagaagatccaaaattgctgtgtacgagaaaatgtggtcttacatgaaatcagcggagccatctgtgtttaccaaaacaacagcagacggagtggcccgagtgcgaaagtccaagggaaagttcgccttcctgctggagtcaaccatgaatgagtacattgagcagagaaaaccatgtgatacgatgaaagttggtggaaatctggattccaaaggctatggtgtggcaacccctaaaggctcagcattaggaacgcctgtaaaccttgcagtattgaaactcagtgaacaaggcatcttagacaagctgaaaaacaaatggtggtacgataagggggaatgtggagccaaggactccgggagtaaggacaagaccagcgctctgagcctgagcaatgtggcaggcgttttctatatacttgtcggaggtctggggctggccatgatggtggctttgatagaattctgttacaaatcacgggcagagtccaaacgcatgaaactcacaaagaacacccaaaactttaagcctgctcctgccaccaacactcagaattatgctacatacagagaaggctacaacgtgtatggaacagagagtgttaagatctagggatcccttcccactggaggcatgtgatgagaggaaatcaccgaaaacgtggctgcttcaaggatcctgagccagatttcactctccttggtgtcgggcatgacacgaatattgctgatggtgcaatgacctttcaataggaaaaactgattttttttttccttcagtgccttatggaacactctgagactcgcgacaatgcaaaccatcattgaaatctttttgctttgcttgaaaaaaaataattaaaataaaaaccaacaaaaatggacatgcatcaaacccttgatgtattaatatttattatagttttcatta

SEQ ID NO: 956 - protein, 894 aa, Homo sapiens [sequence omitted]

SEQ ID NO: 957 - DNA, 895 bp, Homo sapiens
gccatcttgcgtccccgcgtgtgtgcgcctaatctcaggtggtccacccgagaccccttgagcaccaaccctagtcccccgcgcggccccttattcgctccgacaagatgaaagaaacaatcatgaaccaggaaaaactcgccaaactgcaggcacaagtgcgcattggtgggaaaggaactgctcgcagaaagaagaaggtggttcatagaacagccacagcagatgacaaaaaacttcagttctccttaaagaagttaggggtaaacaatatctctggtattgaagaggtgaatatgtttacaaaccaaggaacagtgatccactttaacaaccctaaagttcaggcatctctggcagcgaacactttcaccattacaggccatgctgagacaaagcagctgacagaaatgctacccagcatcttaaaccagcttggtgcggatagtctgactagtttaaggagactggccgaagctctgcccaaacaatctgtggatggaaaagcaccacttgctactggagaggatgatgatgatgaagttccagatcttgtggagaattttgatgaggcttccaagaatgaggcaaactgaattgagtcaacttctgaagataaaacctgaagaagttactgggagctgctattttatattatgactgctttttaagaaatttttgtttatggatctgataaaatctagatctctaatatttttaagcccaagccccttggacactgcagctcttttcagtttttgcttatacacaattcattctttgcagctaattaagccgaagaagcctgggaatcaagtttgaaacaaagattaataaagttctttgcctagtaaaaaaaaaaaaaaaaaaaaaaataaaaaaaaaaaaaaaaaaa

SEQ ID NO: 958 - protein, 158 aa, Homo sapiens
MRRTGAPAQADSRGRGRARGGCPGGEATLSQPPPRGGTRGEEPQMKETIMNQEKLAKLQAQVRIGGKVNMFTNQGTVIHFNNPKVQASLAANTFTITGHAETKQLTEMLPSILNQLGADSLTSLRRLAEALPKQSVDGKAPLATGEDDDDEVPGGFQE

SEQ ID NO: 959 - DNA, 1839 bp, Homo sapiens
atgtggctggaccgccgcggatggctcagggttcttggacattggcgctacgaccttaggcgccctagctttaccaggacttggagtggcgataagggcccaatggcagaaacagtgtctacccaggttgggacagagggcgggctgagggcttcgcatcagcaaaacggtgacgctggtggcgacgcgaaggttgagctgtcccccgggcccccgaagccggctggccgggaagtggagccggccccagtaggcggggagcatccctcggctgcagccccaggcccgggcaagcataagaagcggcggggcgcaaccagggagcgtgtcgtgccgcccccgaagaagcggcggaccggggtgagcttcggagatgagcactttgcagaaaccagttattacttcgagggcggcctgcgtaaggtgcggccctattactttgacttccggacctactgcaaaggtcgctgggtgggccacagcttgctgcacgtcttcagtaccgagttccgagctcagcccctggcctactatgaggccgcggtccgggcgggccgcctgcaactcaacgagaagccggtgcaggacctcaacatcgtgctcaaggacaatgatttcttgcggaacacagtgcacaggcatgagccaccagtcacagcagagcccattcgcctgctagctgagaacgaagatgtggtggttgtagacaagccttcctccattcccgttcacccctgtggccgcttccgacacaacacagtcatcttcatcctaggcaaggagcaccaactcaaggagctacaccccttgcatcggcttgaccgccttacctcaggggtgcttatgtttgccaagacagctgcagtctctgagagaattcacgagcaggttcgggaccggcagctggagaaggagtacgtgtgccgggtggaaggggagttccccactgaggaagtgacctgtaaagaacccatcttagtggtgtcttacaaagtaggggtgtgccgtgtagatccccggggcaagccctgtgagacagtgttccagaggctaagctacaatggccagtccagtgtggtacggtgccggccactcacaggccgcacacaccagattcgagtccaccttcagttcttgggccatcccattctcaacgaccccatctacaactcagttgcctggggtccttctcgaggccggggcggctacattcccaagacaaacgaggagttgctacgggacctggtagcagagcaccaggccaaacagagcctggatgtgctagatctctgtgagggtgacctgtccccaggactcacagactctacggccccctcctcagagttgggcaaggacgacctggaagagttggctgcagctgcccagaagatggaggaagtagctgaggcagcccctcaggagttggacacaatagccttggcatcagagaaggcagttgaaacagatgtcatgaatcaagagacagacccactctgtgcagagtgccggctggtgcgacaggatcccttgccccaagaccttgtgatgttcctacatgccctacgctataaagggccaggctttgagtacttttcaccaatgcctgcctgggcacaggatgactggcaaaaggactgagggtgtggccaatggagggattgcttcttgggttgtgacaaggatgggctatagggcaagggctgaccccatgggctagtacttggggtttctataggaatgaggacgggcttctaaagagacctgctcatacttgctacctccttccagtgggaatttggagactttttggtttgtaaatatatccctttttctaacatc

SEQ ID NO: 960 - protein, 545 aa, Homo sapiens
MWLDRRGWLRVLGHWRYDLRRPSFTRTWSGDKGPMAETVSTQVGTEGGLRASHQQNGDAGGDAKVELSPGPPKPAGREVEPAPVGGEHPSAAAPGPGKHKKRRGATRERVVPPPKKRRTGVSFGDEHFAETSYYFEGGLRKVRPYYFDFRTYCKGRWVGHSLLHVFSTEFRAQPLAYYEAAVRAGRLQLNEKPVQDLNIVLKDNDFLRNTVHRHEPPVTAEPIRLLAENEDVVVVDKPSSIPVHPCGRFRHNTVIFILGKEHQLKELHPLHRLDRLTSGVLMFAKTAAVSERIHEQVRDRQLEKEYVCRVEGEFPTEEVTCKEPILVVSYKVGVCRVDPRGKPCETVFQRLSYNGQSSVVRCRPLTGRTHQIRVHLQFLGHPILNDPIYNSVAWGPSRGRGGYIPKTNEELLRDLVAEHQAKQSLDVLDLCEGDLSPGLTDSTAPSSELGKDDLEELAAAAQKMEEVAEAAPQELDTIALASEKAVETDVMNQETDPLCAECRLVRQDPLPQDLVMFLHALRYKGPGFEYFSPMPAWAQDDWQKD

SEQ ID NO: 961 - DNA, 878 bp, Homo sapiens
gtcccgcgggtctgtctcttgcttcaacagtgtttggacggaacagatccggggactctcttccagcctccgaccgccctccgatttcctctccgcttgcaacctccgggaccatcttctcggccatctcctgcttctgggacctgccagcaccgtttttgtggttagctccttcttgccaaccaaccatgagctcccagattcgtcagaattattccaccgacgtggaggcagccgtcaacagcctggtcaatttgtacctgcaggcctcctacacctacctctctctgggcttctatttcgaccgcgatgatgtggctctggaaggcgtgagccacttcttccgcgaattggccgaggagaagcgcgagggctacgagcgtctcctgaagatgcaaaaccagcgtggcggccgcgctctcttccaggacatcaagaagccagctgaagatgagtggggtaaaaccccagacgccatgaaagctgccatggccctggagaaaaagctgaaccaggcccttttggatcttcatgccctgggttctgcccgcacggacccccatctctgtgacttcctggagactcacttcctagatgaggaagtgaagcttatcaagaagatgggtgaccacctgaccaacctccacaggctgggtggcccggaggctgggctgggcgagtatctcttcgaaaggctcactctcaagcacgactaagagccttctgagcccagcgacttctgaagggccccttgcaaagtaatagggcttctgcctaagcctctccctccagccaataggcagctttcttaactatcctaacaagccttggaccaaatggaaataaagctttttgatgcaaaaaaaaaaaaaaaaaaa

SEQ ID NO: 962 - protein, 175 aa, Homo sapiens
MSSQIRQNYSTDVEAAVNSLVNLYLQASYTYLSLGFYFDRDDVALEGVSHFFRELAEEKREGYERLLKMQNQRGGRALFQDIKKPAEDEWGKTPDAMKAAMTLEKKLNQALLDLHALGSARTDPHLCDFLETHFLDEEVKLIKKMGDHLTNLHRLGGPEAGLGEYLFERLTLKHD

SEQ ID NO: 963 - DNA, 750 bp, Homo sapiens
  misc_feature (2)..(3): n is a, c, g, or t
  misc_feature (5)..(8): n is a, c, g, or t
  misc_feature (11)..(12): n is a, c, g, or t
  misc_feature (15)..(15): n is a, c, g, or t
  misc_feature (18)..(18): n is a, c, g, or t
  misc_feature (21)..(21): n is a, c, g, or t
  misc_feature (26)..(26): n is a, c, g, or t
  misc_feature (28)..(28): n is a, c, g, or t
  misc_feature (45)..(45): n is a, c, g, or t
  misc_feature (82)..(82): n is a, c, g, or t
  misc_feature (146)..(146): n is a, c, g, or t
  misc_feature (166)..(166): n is a, c, g, or t
  misc_feature (279)..(279): n is a, c, g, or t
  misc_feature (351)..(353): n is a, c, g, or t
  misc_feature (379)..(379): n is a, c, g, or t
  misc_feature (382)..(382): n is a, c, g, or t
  misc_feature (398)..(398): n is a, c, g, or t
  misc_feature (403)..(403): n is a, c, g, or t
  misc_feature (406)..(406): n is a, c, g, or t
  misc_feature (417)..(417): n is a, c, g, or t
  misc_feature (423)..(424): n is a, c, g, or t
  misc_feature (430)..(430): n is a, c, g, or t
  misc_feature (437)..(437): n is a, c, g, or t
  misc_feature (449)..(449): n is a, c, g, or t
  misc_feature (452)..(453): n is a, c, g, or t
  misc_feature (459)..(459): n is a, c, g, or t
  misc_feature (472)..(472): n is a, c, g, or t
  misc_feature (480)..(481): n is a, c, g, or t
  misc_feature (486)..(486): n is a, c, g, or t
  misc_feature (488)..(489): n is a, c, g, or t
  misc_feature (497)..(497): n is a, c, g, or t
  misc_feature (503)..(504): n is a, c, g, or t
  misc_feature (515)..(515): n is a, c, g, or t
  misc_feature (520)..(528): n is a, c, g, or t
  misc_feature (533)..(535): n is a, c, g, or t
  misc_feature (538)..(538): n is a, c, g, or t
  misc_feature (540)..(541): n is a, c, g, or t
  misc_feature (543)..(543): n is a, c, g, or t
  misc_feature (545)..(546): n is a, c, g, or t
  misc_feature (548)..(549): n is a, c, g, or t
  misc_feature (552)..(570): n is a, c, g, or t
  misc_feature (572)..(580): n is a, c, g, or t
  misc_feature (583)..(599): n is a, c, g, or t
  misc_feature (601)..(606): n is a, c, g, or t
  misc_feature (610)..(610): n is a, c, g, or t
  misc_feature (612)..(622): n is a, c, g, or t
  misc_feature (624)..(631): n is a, c, g, or t
  misc_feature (633)..(637): n is a, c, g, or t
  misc_feature (639)..(640): n is a, c, g, or t
  misc_feature (643)..(703): n is a, c, g, or t
  misc_feature (705)..(723): n is a, c, g, or t
  misc_feature (725)..(725): n is a, c, g, or t
  misc_feature (727)..(735): n is a, c, g, or t
  misc_feature (737)..(741): n is a, c, g, or t
cnntnnnnggnnggnttnctncagtngnagccaaagtgctgccgngttagagtagctgatgcctgtatctgccctaacgccnaagggccggaggttgagcggggaagagagaggcctctggtccacggactcagccgaggaggacnaagaaaccaaaagaaatgantccaaagaaaaatatcagaaaaggcatgattctgacaaggaagaaaaaggcagaaaagagccaaaaggattaaagacacttaaggaaatcagaaatgcatttgatttatttanattaactccagaagaaaaaaatgatgtttctgagaataatcggaaaagggaagaaataccactggattttannnccatagacgatcacaaaaaccaaggnaancaaacagtcacttaanggaanggngaaacaccagngacganncggttncttgggnatacattggtgnagnnggtgtncaagggggttttnggcagggnnttccnannggttgagnttccannggttccgtagncaaannnnnnnnnggggnnnaananncntnncnncannnnnnnnnnnnnnnnnnncnnnnnnnnnccnnnnnnnnnnnnnnnnncnnnnnncccncnnnnnnnnnnncnnnnnnnncnnnnncnnccnnnnnnnnnnnnnnnnnnnnnnnnnnnnnnnnnnnnnnnnnnnnnnnnnnnnnnnnnnnnncnnnnnnnnnnnnnnnnnnncncnnnnnnnnncnnnnnccccccccc

SEQ ID NO: 964 - DNA, 1142 bp, Homo sapiens
cttttccaagcggctgccgaagatggcggaggtgcaggtcctggtgcttgatggtcgaggccatctcctgggccgcctggcggccatcgtggctaaacaggtactgctgggccggaaggtggtggtcgtacgctgtgaaggcatcaacatttctggcaatttctacagaaacaagttgaagtacctggctttcctccgcaagcggatgaacaccaacccttcccgaggcccctaccacttccgggcccccagccgcatcttctggcggaccgtgcgaggtatgctgccccacaaaaccaagcgaggccaggccgctctggaccgtctcaaggtgtttgacggcatcccaccgccctacgacaagaaaaagcggatggtggttcctgctgccctcaaggtcgtgcgtctgaagcctacaagaaagtttgcctatctggggcgcctggctcacgaggttggctggaagtaccaggcagtgacagccaccctggaggagaagaggaaagagaaagccaagatccactaccggaagaagaaacagctcatgaggctacggaaacaggccgagaagaacgtggagaagaaaattgacaaatacacagaggtcctcaagacccacggactcctggtctgagcccaataaagactgttaattcctcatgcgttgcctgcccttcctccattgttgccctggaatgtacgggacccaggggcagcagcagtccaggtgccacaggcagccctgggacataggaagctgggagcaaggaaagggtcttagtcactgcctcccgaagttgcttgaaagcactcggagaattgtgcaggtgtcatttatctatgaccaataggaagagcaaccagttactatgagtgaaagggagccagaagactgattggagggccctatcttgtgagtggggcatctgttggactttccacctggtcatatactctgcagctgttagaatgtgcaagcacttggggacagcatgagcttgctgttgtacacagggtatttctagaagcagaaatagactgggaagatgcacaaccaaggggttacaggcatcgcccatgctcctcacctgtattttgtaatcagaaataaattgcttttaaagaaaaaaaaaaaaaaaaaa

SEQ ID NO: 965 - protein, 203 aa, Homo sapiens [sequence omitted]

SEQ ID NO: 966 - DNA, 3545 bp, Homo sapiens
tgaacgcatgcgtgctgtggtcgcctagtaaacggggctgctggtgggccgcgtcgaagacatggaccagggctacggaggctacggggcgtggagtgctggacctgccaacacccagggtgcatatggaactggtgtggccagctggcaaggttatgaaaactacaattactatggcgcccagaacaccagtgtcaccacaggcgcaacctacagctacggcccagcctcgtgggaggccgccaaggccaatgatggcggcctggcggccggggcccctgccatgcacatggcctcttacggcccagagccatgcaccgacaattccgactccctcattgccaagatcaaccagcgtttggacatgatgtccaaggaaggaggcaggggcgggagcggcggcggtggggagggcatacaggaccgggagagctccttccgcttccagccgttcgagtcctatgactccaggccctgcctgccggagcacaacccctaccgccccagctacagctacgactatgagttcgacctggggtccgaccgcaatggcagctttggggggcagtacagtgaatgccgagacccagcccgggagcggggctcccttgatggcttcatgcggggccggggccagggccgcttccaggaccggagcaaccctggcaccttcatgcgcagcgaccccttcgtgccccccgctgcgtcctctgagcccctgtccacgccctggaacgagctgaactacgtgggtggacggggcctgggagggccctcccccagccggccacctccgtccctcttctcccagtccatggctcccgactacggcgtgatgggcatgcagggggcgggcggctatgacagcaccatgccctacggatgtggccgctcgcagcctcggatgcgggatcgggatcggcccaagaggagagggtttgaccgcttcggaccagatggcacgggcaggaaacggaagcagttccaactttacgaggagccagacaccaaactggcccgggttgacagtgaaggagatttctccgaaaatgatgacgcagctggtgacttccgctcaggagatgaagaattcaagggtgaggatgaactctgcgactctgggaggcaaagaggagagaaggaggacgaggacgaggatgtgaagaagagaagggaaaagcaaaggagaagagacaggacgcgggaccgtgcagccgacagaattcagtttgcctgttctgtatgcaagttccgtagctttgatgacgaagagatccagaagcatctgcaaagcaaatttcacaaagagaccctgcggttcataagcaccaagctgcccgacaagaccgtggagttcctccaggaatacattgtaaacagaaataagaaaattgagaagcggcgtcaggaattgatggagaaagaaaccgcaaaaccaaaaccagatcctttcaaagggattggccaggagcacttcttcaagaagatcgaggctgctcactgcctggcctgcgacatgctaattcctgcacagccgcagctcctccagcggcacctgcactccgtggaccacaatcacaaccgcaggttggctgctgaacagttcaagaaaaccagtctccatgtggctaagagtgttttgaacaacagacatatagtgaagatgctggaaaaatacctcaagggtgaggaccctttcaccagtgaaactgttgatccagaaatggaaggagatgacaatttaggaggtgaggataagaaagagacacctgaggaggtggccgcggacgtcttagcagaggtgattacagcagcagtgagggccgtagatggggaaggagcgcccgctccagagagcagcggggagccggctgaggacgaaggccccacggacacagcggaggccggtagtgatcctcaagccgaacagctgctggaagagcaggtgccctgtggaacggcacatgagaagggcgtccccaaggccagaagtgaggctgcagaggctggaaatggcgccgagacaatggcagcagaggcagaaagtgcccaaaccagagttgctcctgccccagctgccgcggatgctgaagtggaacaaactgatgcagagtctaaagacgctgttcccacagaatgatgctcatttccctgttccagggaaggcgttgggatgatggatgcgttggtctttctcccttggtttgtaagcagtacaagggcgtgtgctcccagaatatgctgtaatctaattttggtgaagagacccagcgtttcctcctgagcagtgcctctcacggcttgtctcatgcagtcgtgtggcttcttgcccaggtttcaaagctgaagtacattgtccttagcggctgtaacatgtctcttgacagtagtgcacttggaataataaaggttgggtgattatatcttgatgatacattacttgttcaatacagccactgatggaatgcttccttttttatttttttccttaatttttttttttatttggttgggaacagctgaatactaggaatatatcttgctctatagaggatttttttttgtatgtttcaagcttcagcctttaacctatacctttgtagtgcaccatatggtgtgtgactttcacaggacttcgcagcacctggttcacatgtggcactgaccgcgtcacatccacgcactcccaaaggccagaagtatctgaccgacctacgccactggaaacacacccaccgcaacctcaagaaccagactgtgcagagggcattgcgtcccaatctttagtccttgctgaatcagttctctaatattttacctcatttgtgttccacctctagattacttcaggtttttttcctttaaaattagttactaccactcaaatgtatttacaaagagaatttggccaggcacggtgatgcatacctataatcccagcacttggggaggccgtggtgagaggatagcttaagcccaggagttcaagaccaacctggacaacatagcaagaccccatctcttaaaaaaaaaggaaagaaaacttgatgtgattgccataggtggaataatccaacataaattgccatagatagaaggtatctgtaatatatatatatatataaaatgaaatatatgtttcattttagagaaataactattactttagatctttccaaatctgagaaagggaggctagcatgtgttcaaggttagcacgcaacagaatttcctaaaatcagaagaattggaagatcctccccttttgaaatggccctgctgtgtcagtttccctgtggccttttgaactgtacatctcacatgttgggaaacgctggccactgggaaatcattagaaaggaggctgtagaatatttgccgagcctctactgtataccaggggctaactcaccaagcacattctaggaattgggccctgctcatgaggagccttagtggagattccaggtgaatatttatgaaaaagtcaacattagaactgaaaatggaaataaactgcttgaaaagaaaaaaaaaaaaaaaaa

SEQ ID NO: 967 - protein, 692 aa, Homo sapiens
MDQGYGGYGAWSAGPANTQGAYGTGVASWQGYENYNYYGAQNTSVTTGATYSYGPASWEAAKANDGGLAAGAPAMHMASYGPEPCTDNSDSLIAKINQRLDMMSKEGGRGGSGGGGEGIQDRESSFRFQPFESYDSRPCLPEHNPYRPSYSYDYEFDLGSDRNGSFGGQYSECRDPARERGSLDGFMRGRGQGRFQDRSNPGTFMRSDPFVPPAASSEPLSTPWNELNYVGGRGLGGPSPSRPPPSLFSQSMAPDYGVMGMQGAGGYDSTMPYGCGRSQPRMRDRDRPKRRGFDRFGPDGTGRKRKQFQLYEEPDTKLARVDSEGDFSENDDAAGDFRSGDEEFKGEDELCDSGRQRGEKEDEDEDVKKRREKQRRRDRTRDRAADRIQFACSVCKFRSFDDEEIQKHLQSKFHKETLRFISTKLPDKTVEFLQEYIVNRNKKIEKRRQELMEKETAKPKPDPFKGIGQEHFFKKIEAAHCLACDMLIPAQPQLLQRHLHSVDHNHNRRLAAEQFKKTSLHVAKSVLNNRHIVKMLEKYLKGEDPFTSETVDPEMEGDDNLGGEDKKETPEEVAADVLAEVITAAVRAVDGEGAPAPESSGEPAEDEGPTDTAEAGSDPQAEQLLEEQVPCGTAHEKGVPKARSEAAEAGNGAETMAAEAESAQTRVAPAPAAADAEVEQTDAESKDAVPTE

SEQ ID NO: 968 - DNA, 580 bp, Homo sapiens
  misc_feature (419)..(419): n is a, c, g, or t
  misc_feature (433)..(433): n is a, c, g, or t
  misc_feature (450)..(450): n is a, c, g, or t
  misc_feature (473)..(473): n is a, c, g, or t
  misc_feature (484)..(484): n is a, c, g, or t
  misc_feature (509)..(509): n is a, c, g, or t
  misc_feature (528)..(528): n is a, c, g, or t
  misc_feature (542)..(542): n is a, c, g, or t
  misc_feature (563)..(563): n is a, c, g, or t
ttttttttttgatttatgaaaaataaatttattacataacaccttgtttttaacaatgttcaattattttttattcagaatacttgtgtcattcatgtaaaatagtttgatacagtacattgtatgttataggtttttttttcctcaaaaattctaaggctctcctactccttctcctttgctgaagtaagggcaccctaaacaacgtgcgaacaagttttcaaaagggaaaattaactggaacggaaattttaataggcactacaccaaccagctttaaaatcagggacgaaaatatttgaattgggatggccggcacctttttaagggaagttattcattcatggctttttttcatctttaaaggcatggcttcacaaatcaggcaacaccaacggggaaaaattaaaacactgtcntatgggacaatccntttagggttgttttggntggaacccaacggggtttttatncatggacaacntttttgattactttccataggcggntttaatacccgtcagggcnagggtttggaatanaacaactttagtggggggttntctgggggggttttgaa

SEQ ID NO: 969 - DNA, 4404 bp, Homo sapiens
ttcggcacgaggcgcggttgcacgtcggccccagccctgaggagccggaccgatgtggaaactgctgcccgccgcgggcccggcaggaggagaaccatacagacttttgactggcgttgagtacgttgttggaaggaaaaactgtgccattctaattgaaaatgatcagtcgatcagccgaaatcatgctgtgttaactgctaacttttctgtaaccaacctgagtcaaacagatgaaatccctgtattgacattaaaagataattctaagtatggtacctttgttaatgaggaaaaaatgcagaatggcttttcccgaactttgaagtcgggggatggtattacttttggagtgtttggaagtaaattcagaatagagtatgagcctttggttgcatgctcttcttgtttagatgtctctgggaaaactgctttaaatcaagctatattgcaacttggaggatttactgtaaacaattggacagaagaatgcactcaccttgtcatggtatcagtgaaagttaccattaaaacaatatgtgcactcatttgtggacgtccaattgtaaagccagaatattttactgaattcctgaaagcagttcagtccaagaagcagcctccacaaattgaaagtttttacccacctcttgatgaaccatctattggaagtaaaaatgttgatctgtcaggacggcaggaaagaaaacaaatcttcaaagggaaaacatttatatttttgaatgccaaacagcataagaaattgagttccgcagttgtctttggaggtggggaagctaggttgataacagaagagaatgaagaagaacataatttctttttggctccgggaacgtgtgttgttgatacaggaataacaaactcacagaccttaattcctgactgtcagaagaaatggattcagtcaataatggatatgctccaaaggcaaggtcttagacctattcctgaagcagaaattggattggcggtgattttcatgactacaaagaattactgtgatcctcagggccatcccagtacaggattaaagacaacaactccaggaccaagcctttcacaaggcgtgtcagttgatgaaaaactaatgccaagcgccccagtgaacactacaacatacgtagctgacacagaatcagagcaagcagatacatgggatttgagtgaaaggccaaaagaaatcaaagtctccaaaatggaacaaaaattcagaatgctttcacaagacgcacccactgtaaaggagtcctgcaaaacaagctctaataataatagtatggtatcaaatactttggctaagatgagaatcccaaactatcagctttcaccaactaaattgccaagtataaataaaagtaaagatagggcttctcagcagcagcagaccaactccatcagaaactactttcagccgtctaccaaaaaaagggaaagggatgaagaaaatcaagaaatgtcttcatgcaaatcagcaagaatagaaacgtcttgttctcttttagaacaaacacaacctgctacaccctcattgtggaaaaataaggagcagcatctatctgagaatgagcctgtggacacaaactcagacaataacttatttacagatacagatttaaaatctattgtgaaaaattctgccagtaaatctcatgctgcagaaaagctaagatcaaataaaaaaagggaaatggatgatgtggccatagaagatgaagtattggaacagttattcaaggacacaaaaccagagttagaaattgatgtgaaagttcaaaaacaggaggaagatgtcaatgttagaaaaaggccaaggatggatatagaaacaaatgacactttcagtgatgaagcagtaccagaaagtagcaaaatatctcaagaaaatgaaattgggaagaaacgtgaactcaaggaagactcactatggtcagctaaagaaatatctaacaatgacaaacttcaggatgatagtgagatgcttccaaaaaagctgttattgactgaatttagatcactggtgattaaaaactctacttccagaaatccgtctggcataaatgatgattatggtcaactaaaaaatttcaagaaattcaaaaaggtcacatatcctggagcaggaaaacttccacacatcattggaggatcagatctaatagctcatcatgctcgaaagaatacagaactagaagagtggctaaggcaggaaatggaggtacaaaatcaacatgcaaaagaagagtctcttgctgatgatctttttagatacaatccttatttaaaaaggagaagataactgaggattttaaaaagaagccatggaaaaacttcctagtaagcatctacttcaggccaacaaggttatatgaatatatagtgtatagaagcgatttaagttacaatgttttatggcctaaatttattaaataaaatgcacaaaactttgattcttttgtatgtaacaattgtttgttctgttttcaggctttgtcattgcatctttttttcatttttaaatgtgttttgtttattaaatagttaatatagtcacagttcaaaattctaaatgtacgtaaggtaaagactaaagtcacccttccaccattgtcctagctacttggttcccctcagaaaaaaattcatgatactcatttcttatgaatctttccagggatttttgagtcctattcaaattcctatttttaaataatttcctacacaaatgatagcataacatatgcagtgttctacaccttgcttttttacttagtagattaaaaattataggaatatcaatataatgtttttaatattttttcttttccattatgctgtagtcttacctaaactctggtgatccaaacaaaatggcttcagtggtgcagatgtcacctacatgttattctagtactagaaactgaagaccatgtggagacttcatcaaacatgggtttagttttcaccagaatggaaagacctgtacccctttttggtggtcttactgagctgggtgggtgtctgttttgagcttatttagagtcctagttttcctacttataaagtagaaatggtgagattgttttctttttctaccttaaagggagatggtaagaaacaatgaatgtcttttttcaaactttattgacaagtgattttcaagtctgtgttcaaaaatatattcatgtacctgtgatccagcaagaagggagttccagtcaagagtcactacaactgattagttgtttagagaatgagaaatggaacagtgaggaatggaggccatatttccatgacttcccttgtaaacagaagcaacagaagggacaagaggctggcctctacatcactctcaccttccaaatcttgtggaagtgcatctacttgccagaaccaaattaacttacttccaagttctggctgcttgcaggtggaactccagctgcaagggagttagggaaatgaaggtctttttttaaaagcttctcagccttcctagggaacagaaattgggtgagccaatctgcaatttctactacaggcattgagaccagttagattattgaaatattatagagagttatgaacacttaaattatgatagtggtatgacattggatagaacatgggatactttagaagtagaattgacagggcatattagttgatgaaatggagtcatttgagtctcttaatagccatgtatcataattaccaagtgaagctggtggaacatatggtctccattttacagttaaggaatataatggacagattaatattgttctctgtcatgcccacaatccctttctaaggaagactgccctactatagcagtttttatatttgtcaatttatgaatataatgaatgaggagttctggtacctcctgtctttacaaatattgggtgttgtccagtatttttccctttttaaccattccaatcggtgtgtagtgatgtttcattttggttttaatttgtatatccctgatagctataattgggtcatagaaattctttatacattctagatgcaagtctcttgtcggatatatgtattgagatattacacctagtctgtggcttgactgttttctttatgtcttttgatgaatagaagttttaaattttgacaaggtcaaatttatttttttcttttgtttgatattttttctctccaatttaaccccaagatttcagatattctgctctattatataaactttatatttttatatttgtgatctaccttgaattgatatgtatgttgtgaattatggatcagggttctttttttcccccatacaagtatccagtcattgtaacactgtttattgaaagaattatcctttcctcattaaattaccttgccaattagtaaaaa

SEQ ID NO: 970 - protein, 754 aa, Homo sapiens [sequence omitted]

SEQ ID NO: 971 - DNA, 2301 bp, Homo sapiens
ggcacgaggggagaaaggcaggcagccggcgggcgctgcgtgtgtgtttgagtgtgcgagtgtgagtgagtgtgagtgccgggtcctgcctctcctggtgcccccagcagaggggcccggtggcctggggagggcgggcgggctgctcggaggcagaggcagcaagaggcggcggcggggagagccgagaaggaggaggaggagagaggaaagagcggagcagccattgttgagggaaaccttgcaaacaaagaaggctccggactccccgcggccccccgccccccaggccggccccctggcccccggcccccggcccagtggccattgtaactttcccccgggacagcggccgccgcggggcgggccgaggctgtgcgtgcgagtctttgtgcggccggcggactggagctcccagtcgggcctgcccgtcccactcgggacatgagctgctgaagttgtccccccgtcagccctcacccctgccaggactcctctgggcttgcagtcgctcccccgtacctctcctggccccctcagttctcccaggttgttcctcaaagtcattcaagctgtactcgccgaaggagcccccgaacggcaacgcctttccccccttccatcccggcaccatgctggatagggatgtgggcccaactcccatgtatccgcctacatacctggagccagggattgggaggcacacaccatatggcaaccaaactgactacagaatatttgagcttaacaaacggcttcagaactggacagaggagtgtgacaatctctggtgggatgcattcacgactgagttctttgaggatgatgccatgttgaccatcactttctgcctggaggatggaccaaagagatataccattggccggaccctgatcccacgctacttccgcagcatctttgaggggggtgctacggagctgtactatgttcttaagcaccccaaggaggcattccacagcaactttgtgtccctcgactgtgaccagggcagcatggtgacccagcatggcaagcccatgttcacccaggtgtgtgtggagggccggttgtacctggagttcatgtttgacgacatgatgcggataaagacgtggcacttcagcatccggcagcaccgagagctcatcccccgcagcatccttgccatgcatgcccaagacccccagatgttggatcagctctccaaaaacatcactcggtgtgggctgtccaattccactctcaactacctccgactctgtgtgatactcgagcccatgcaagagctcatgtcacgccacaagacctacagcctcagcccccgcgactgcctcaagacctgccttttccagaagtggcagcgcatggtagcaccccctgcggagcccacacgtcagcagcccagcaaacggcggaaacggaagatgtcagggggcagcaccatgagctctggtggtggcaacaccaacaacagcaacagcaagaagaagagcccagctagcaccttcgccctctccagccaggtacctgatgtgatggtggtgggggagcccaccctgatgggcggggagttcggggacgaggacgagaggctcatcacccggctggagaacacccagtttgacgcagccaacggcattgacgacgaggacagctttaacaactcccctgcactgggcgccaacagcccctggaacagcaagcctccgtccagccaagaaagcaaatcggagaaccccacgtcacaggcctcccagtaaaaggccctgctgtggccacccagtgctctgcctacctgccccacccctcacagccccagggagcagaagacagaatgaagagactgagcatctaaaatgggcagcctccatccacccgcttcagggaggaactggactctctgggggcaggtgccaagatttgcccccccagtggccctgggctgggcctggcctctacagagccttttagggggagggggtactcatgtggatgcctacttggaacctgggcctctgagacatgtcctgaccaccccccagggcatttgcctccatcttcaccccagattgtgggtttcccatccccctgactttacccctttcaagcctggggttgtctatacccacagcccttagggacttaaagttacggggcttcgttgaatgctccttcccctaggcagctggtaatagaggggtaaagctctgggcccctcctccctgctgccacttatcccagctccaagtttttttaaaaataatattattaaaaatgtaagttaaaaaaaaaaaaaaaaaa

SEQ ID NO: 972 - protein, 375 aa, Homo sapiens
MLDRDVGPTPMYPPTYLEPGIGRHTPYGNQTDYRIFELNKRLQNWTEECDNLWWDAFTTEFFEDDAMLTITFCLEDGPKRYTIGRTLIPRYFRSIFEGGATELYYVLKHPKEAFHSNFVSLDCDQGSMVTQHGKPMFTQVCVEGRLYLEFMFDDMMRIKTWHFSIRQHRELIPRSILAMHAQDPQMLDQLSKNITRCGLSNSTLNYLRLCVILEPMQELMSRHKTYSLSPRDCLKTCLFQKWQRMVAPPAEPTRQQPSKRRKRKMSGGSTMSSGGGNTNNSNSKKKSPASTFALSSQVPDVMVVGEPTLMGGEFGDEDERLITRLENTQFDAANGIDDEDSFNNSPALGANSPWNSKPPSSQESKSENPTSQASQ

SEQ ID NO: 973 - DNA, 5341 bp, Homo sapiens
gcgagacgccctctctcttccagccgcagccgcgttgcgggttcttccctgtggaacagtagagacctagtctgccttctttcacaagataatccttcaattatttgaaggtgattattcagcatatatctcttgagtacctgtgcatgcaagacactgtcctggatattgtgagagatccaaagtttagtatgagatcattttcccttgcctgagttttgagctgattgagaaataagaacctacagatgaagaagcaagacagtacctttaaaaaaattagctttttattcagattctctttgtggccagatgggtttgtatggacaggcttgtccatctgtaacttcattaaggatgacatctgaactggagagcagcctaacgtctatggactggttaccacagctcaccatgagagcagccatccaaaaatctgatgctacacaaaatgcacatggaacaggaatttctaagaagaatgcactccttgacccaaatacaactctggaccaggaagaagtccaacagcacaaagatgggaaacctccatacagttatgccagcctcattacatttgcaattaatagctcacccaaaaagaaaatgactttaagtgaaatttatcagtggatttgtgataacttcccatattatagagaggctggcagtggttggaagaattccatacgacataatctgtcattgaacaaatgtttccttaaagtgcctcgatctaaggatgaccctggaaaggggtcctactgggcaatagacaccaatccgaaggaagatgcgctgcctactcggccaaagaagagggcacgatctgtagaacgggcctcaactccatatagcatagattcagattctttgggaatggagtgtattatttcgggaagtgcctctccaactctggcaatcaacactgtgactaacaaagtaacattgtataacactgatcaggatggtagtgatagcccacgcagtagccttaacaacagtctctcagaccagagtttggcatctgttaatttgaacagtgttggaagtgtgcatagttatacaccggtgacaagccatccagaatcagtctctcaatcattaactcctcagcagcaaccacagtacaaccttccagaaagagacaagcaactacttttctcagaatataattttgaagatcttagtgcctcatttcggagcctttataagtcagtttttgagcagtcacttagtcaacaaggtttgatgaacatcccttctgaatcttcccagcagtcccacacttcatgtacctatcagcactctcccagcagtacagtgagcactcacccacacagcaaccaaagcagcctgtccaacagtcatggcagtggcctcaacaccacaggcagtaattcggttgcacaggtctcactgtctcacccccagatgcacccacagccatctccacatcctccccatcgaccgcatggtttaccgcagcatccgcagcgttccccacacccagcaccacacccacagcaacacagccagctccagtcccctcacccccagcatccctctccacatcaacacatacagcaccatccgaaccatcagcatcagacgttaacacatcaggcacccccacccccacaacaggtatcctgtaattctggtgtttcaaatgattggtatgcgacacttgatatgctaaaagaaagctgtcgaattgccagcagtgttaattggtcagatgtagacctttcacagtttcaaggtctgatggagagtatgagacaggcagatctcaagaactggtctttagaccaggttcagtttgccgatctttgttcttctcttaatcagttctttacacaaactggccttatacattcacagagtaatgttcaacaaaatgtttgtcatggtgccatgcatccaacaaaaccttcccaacacattggaacaggaaatttgtacatagattctaggcaaaatctccctccttcagtgatgccaccccctggttatcctcatatcccacaggcactcagcactccaggaacaacgatggcaggccatcacagagccatgaaccagcagcacatgatgccttcccaagccttccagatgcggcgttccctgcctccagatgacatccaggatgactttgattgggattcaattgtgtagggcttgtttctgcaagacaccagaccctaacgttacctttctgtgcagtgaagggaaaggtttaagagaatccagttgagaaaacaaacttgctaatcactttaccaatgttatcaaaattacttttgaagacaatcagaaggattttagctggataacttactgcttttatctgacccaagcaagtactacatgtttgtctccctgccagctgccctatgtagctcctaactgttgtgtgatttggacggctttttgcatatttgtgtcagtttgatgttaaccacaagtgccagactgatttttcagacggagcctattttgctgcaagcagtttatataaagatacatatgtgtaaatatatgtacaaaaattactgaaaggcttcagttttttctaattggattattatgtcttgaaagttattgtcagtttttattccttgttaggctattttctgcaggatgcttttaactgatgtaggaaactgaaaggaaatagattttttccaaaacccagttccccttatttaatcttttttagaaatgtgggtaatgaattctatctaataagtcaaggaaaccagaatttgacacactccaacaatccaaaggggcatgttgctcctgagcagcatgaagaactgaccaaattggttttgatgcttgggggatcatagagtatttatgtctgcttttctaaatctgcattataatagctctaaaatttgttgattggtaagaaattgggcattgcttggctctttaaacacatcagtgcttccacattcacctatgtatttattattcaaaagtgtcattttaatatttattgctaccttctgtgaatgcttagctcctgtcgggttcattaaggagaaatgtgtctgaaagcacagaactattattatttttttctttttttgagatggagtcttgccctgttgcccaggctggagtgcagtggcacgatctcggctcactgcaacctccgcctcccgggttcaagcaattctcctgcctcagcctcccgagtagctgggagtgcaggtgcacaccgccatgcctggctgattttttgtattttagtagagatggggtttcaccatgttgcctgggctggttgcaaactcttgagctcaggcagtctgcctgcctcagcctcctagagtgctgggattacagacatgagccactgcgcctggcccagcgttacttttcttgataagaatttacagataagacactcagagagacattgtgtcattctctatcatcactccttttaccatgtgaatagatttctctgtcttggcattcttgctgattcagacttattagttaaatcggatttttctggaatttgaatcagatttcatttgggcaacaacagcagggcagggtttctaaagcaggtttccccactcatctaggttgtcttgaaaggaggatagagccacttacagttttatttgcttcagtgtttaatgtagatattatgtggcctgctgtttctgttgtcttgtatgtctgtgtatgcatgacatttggtccctttctttgaaatgcagcccctcttacgggttttttagtggtggtagtttgttttgtttcatatcatatcacagtttgcatggactgattatcttagttttatgataaaactagaagaaatgagggttttttttaatgaatagattttgaattgattctttagaccccccaaaaagtgtcagttctaatggggaaatatattccatcaagtcaaagagtaataactgctcactagttgctttttagcatctctggtcttatcagccatgctaaatcactttaattagccttagtgattctgtggttgagtaatctctacttgaactaaacaaacatcttttgtttctgtgtgtgtgtgctgtgtgtgagagtgtgcgcgcgcgtgtgtgtgtgtgtgttttaatggagtgttgccttgaatgaatcactgggaagccagccatggtaagggctggtgaggttggggagaaaggaagagctttatgtttctctgttgtttggaccctacttggcatgaaaaaggaagctcagttccagccccttggatcaacgaaaatcagaggattctggaaaggcagccaacttgcgcctcttagaaggatcagaggcaagatgagatggcagcctgcagagtaaatgcttgaaaaaagaggggtgattttcaatggtttgcttaagtcactgttttctagacaccaaaatagctgttttgaaactgttttaattgcttgggtagcaatgtgcactttaaacaatttggatattggaatgcagtctcatactgagtgatttgagtagaaccactgatgatgattttataaattgtgtgaagcgaatttcccatttggcaatcatttactgatttgcagtgatgaatatttttatgagaatttaaacttagcaagaatggccatggaggcaaagccttcacccagacccatcccactctcctgtgatccaggtggtccaggagcccaggacaggccttttctgtgggccctggccagacagggttacctggtgaggtgcagagagtccctctagtggccattttgtatggtagttgctaatgcagaacaagttctgtcttgggcttaaattgactgaagactttagggggaaagaatagtaaatgcatgtaaacaaatggggacactctgttcaggagaataatccgactggcatttgtggcagtttttgaaatgtaaatgtattcatgtgtgttcttgtaaatacgtgtcgctcagatgtcctttgaagtgggagggaatcaatccggggataatttcaaatggaatagagtattttgatattgttcattcagagggtgatgtgtacatatctatattgtatatatgtgatgaaaatgcattggctttttgtgcagatacaacctgctctctgtactgctgttggacagtcagtgttttaatgtttctacagttttgctattgcacgatttcatattttgcctctatgatgaacggcaaccattatttgtaactgtttagtgctgtaaagaaatattccaagtgtcattaggattgttgctgccagaactgatatgcatgaatggcacttaaaataaatatattatgttaactct

SEQ ID NO: 974 - protein, 622 aa, Homo sapiens [sequence omitted]

SEQ ID NO: 975 - DNA, 3252 bp, Homo sapiens
ggggtgaaccgtgacagcgcttcggcccgcactaaggccggctcttgtgccggaaggaggaaggcgtggggcattcgcccctcggagctagggagtgtgtgcgacgccgctgcgaggtcacgtgagccactgccggcagagagggaaaggggcggggcccagaacgaagcggggaggcgccccttgtttccctggggtcacgcgcagccggaagtggcggctgctgcggagaattggagatggggaccgccctggacatcaagattaaaagagcgaataaagtttatcacgccggggaagtgctctctggcgtggtggtcatatcgagtaaggattcagtccaacaccagggagtgtctttgaccatggaaggaactgtaaacctccagctcagtgccaaaagtgtgggtgtgtttgaagctttttataattctgttaagcctatccagattatcaacagcaccatagaaatggtgaagccggggaaatttcccagcggcaaaacagaaatcccttttgaatttcctctgcacttgaagggtaacaaagttctgtatgagacgtatcatggcgtgtttgtcaacattcagtatacactgcgctgtgacatgaagcggtctctgttggccaaggacttgacaaagacctgtgaatttatcgttcactccgctcctcagaaggggaagtttactcccagtcccgtggacttcacgattacacctgaaaccttacagaacgtcaaagagagagctttgcttcccaaatttctccttcgaggacatctcaactcaacaaactgtgtcatcacgcagccactaacgggagagctggtggtggagagctcggaagccgccatcagaagcgtggagctgcagctggtgcgcgtggagacgtgcgggtgtgcagaaggctatgcccgcgacgccacggagattcagaacattcagatcgccgacggggatgtgtgcaggggcctctctgtccccatctacatggtcttccctaggctgttcacctgccctacactggagaccaccaacttcaaagtggaatttgaggttaacatcgtggtgctgcttcaccctgaccacctcatcacggagaacttcccgctgaagctctgcaggatatagcccggaggagggaagcatagagaacgggagtggccatctggaaatccagctggttatccaaatcctaaggggagctacagccagcggcatatacttgtttttgtgattattctgtatcagaaatgaaacagaccctcaaattaactttccttcctcatttcttgaggcttctgcttccaacaggcacctctaatcagaccttttctttgaaattcaacaagatttcttaatgctatttgccaagaccatttcacagaaaacattgactgtggctcttgccttatctgttcctttttaggtacagtaaaacaattgtgacagcagtttgagcttgctggagagtggcatcatggggacaaaaggaaacctctgacttgctaatggatgtagccagggactccccatagcaaagggtctgtggccagttgacatccaggatggctgcaagcgcacttgatggtcaggaagtttgcagatactcgccaaggcagagcgcaaagtgctagccactggaaatgcatgacttccctccacccctactctattctgtagttttttggttttgtttctgagacggagtctcagtctgtcacccaggctggagtgatctcagctcactgcaacctccacctcccaggttcaagcgactctcctgcctcagcctcccgagtagttgggattacaggtgactgccaccgtgcccggctaatgtttgtatttttagtagagacggggcttcaccatcttggccaggctggtcttgaactcctgacctcgtgacccacccgccttggcctcccaaagtgctgggattacaggtgtgagccaccacacccagcctctgtagttctttttacaacatttttcattataactttaaattttttaagcaactggaaaagtgttccttgctctcttggggggatttggctggtgccgaagtgtttctgaagtctcaagaactgccataaaatctcacgctgccatttccctgaacagatacatacatagagagagacagttttccaaactgtgtcacgcaggctgagtgcactggcaggatcacagctcacggcagcctcaacctccctggctcaagcgatccctcccctcagcctcctgagtagctgagactacaggtgagtgccaccacactcagctaattttcaaattttttgtagacagggtctccctatgttgcccaggctggtcttgaactcctagactcaagtgatcctcctgtcttggcctcccaaagtgctgagattacaggtgtgagccactgtgcccagcagtttcccagaatatatttaaatgcaaagttacatgaggggaaaacatgtatgtttgctcctgttgttactgggtaggttctgaacagcagaaacccatgtgcagggtgggctggtgaaggcccctctccgcaaggtggtagcaggaaaaggtccttgacttgatgaatttggtctgcctctgagccactggaggaagctgttttgagccagggttttttggcctaaagccagcatttcctcagtctccctttgtggttcgaaggatatggactattgcaatacatttcttccttcaaatcctgccactgttttgttggcccacaactaataggacctcaaaataagccatgctgctttgcacacacactagccttcttttgtacttttcattctggatgggcttggccaaaacaggctcaggccaaagacctcccaagctgtatgtacttccagtatcctgaaacagtgtttggtgacataatgccaagggtaaacaagcctgatttaggcactgctttatccaggggcttcacccatgaaattaataaaacttatctgagtcacttgaaacttggttcccagaaaacacatttctggtttataatctccttttatgctcacctgacattaattatctatccttgatgatgtgtttaaactgagtagcagaaaacagaggccacactttctgggaaattttaaaggaagaaaccatttttaatgagatgaaaatatttaacgaatttaaaaagctaatgacaattttgagaaaaggtttgggatgtatattgctatgtaatttaataaactgattttatggatat

SEQ ID NO: 976 - protein, 297 aa, Homo sapiens
MGTALDIKIKRANKVYHAGEVLSGVVVISSKDSVQHQGVSLTMEGTVNLQLSAKSVGVFEAFYNSVKPIQIINSTIEMVKPGKFPSGKTEIPFEFPLHLKGNKVLYETYHGVFVNIQYTLRCDMKRSLLAKDLTKTCEFIVHSAPQKGKFTPSPVDFTITPETLQNVKERALLPKFLLRGHLNSTNCVITQPLTGELVVESSEAAIRSVELQLVRVETCGCAEGYARDATEIQNIQIADGDVCRGLSVPIYMVFPRLFTCPTLETTNFKVEFEVNIVVLLHPDHLITENFPLKLCRI

SEQ ID NO: 977 - DNA, 1249 bp, Homo sapiens
agcgggggtgcagccaggcctggctcgagatgccgaagtcgtgcgcggcccggcagtgctgcaaccgctacagcagccgcaggaagcagctcaccttccaccggtttccgttcagccgcccggagctgctgaaggaatgggtgctgaacatcggccggggcaacttcaagcccaagcagcacacggtcatctgctccgagcacttccggccagagtgcttcagcgcctttggaaaccgcaagaacctaaagcacaatgccgtgcccacggtgttcgcctttcaggaccccacacagcaggtgagggagaacacagaccctgccagtgagagaggaaatgccagctcttctcagaaagaaaaggtcctccctgaggcgggggccggagaggacagtcctgggagaaacatggacactgcacttgaagagcttcagttgcccccaaatgccgaaggccacgtaaaacaggtctcgccacggaggccgcaagcaacagaggctgttggccggccgactggccctgcaggcctgagaaggacccccaacaagcagccatctgatcacagctatgcccttttggacttagattccctgaagaaaaaactcttcctcactctgaaggaaaatgaaaagctccggaagcgcttgcaggcccagaggctggtgatgcgaaggatgtccagccgcctccgtgcttgcaaagggcaccagggactccaggccagacttgggccagagcagcagagctgagcccaacaggctccggacgcagaggtggcagtggcaccagggccggcagagctttggagctctggctgtggacatttttgtctgctgtggacactgagaaagttggccatgaggcctgcttggccggggatcgagacagtagccaagctccccggcgagagccacaatgccgtctgggggacgtttagaggcgtggcactaggagtgcacatctgtgagcatgacaagcttatcctcccatggtaacagaagtccaggctgaggctgattctggacgctgtcctttcagcacacgcagagcaccgttggaagccccagtgtgggagatgctcctcagggaggaagccatgtgagggggctggctctgtggcgggtgagtggtcccctcctccatcagcctggacagccgctcggggttctaaggagtgactcctgtcccggcctggtgtgagtgggcagtgtaataaagtgtctttctatacggaaaaaaaaaaaaaaaa

SEQ ID NO: 978 - protein, 239 aa, Homo sapiens
MPKSCAARQCCNRYSSRRKQLTFHRFPFSRPELLKEWVLNIGRGNFKPKQHTVICSEHFRPECFSAFGNRKNLKHNAVPTVFAFQDPTQQVRENTDPASERGNASSSQKEKVLPEAGAGEDSPGRNMDTALEELQLPPNAEGHVKQVSPRRPQATEAVGRPTGPAGLRRTPNKQPSDHSYALLDLDSLKKKLFLTLKENEKLRKRLQAQRLVMRRMSSRLRACKGHQGLQARLGPEQQS

SEQ ID NO: 979 - DNA, 6537 bp, Homo sapiens
gataatctccatttttgtcatgggactgttaaaaacgtttggaagttccaattctggtcttgatttcccagttaaagatgttctttcacccgaatgcagtctttcctgttggtaaaataagacaaccatcaacattgcctgtttgtctgcttttgaatctcttaaggatggatgtttgtaagatgttgcttaatacagtctggaatactctgtccatttgttgaattgtaaatgactttcaaatgtgcaagttctgttaaatacaaagagaacctctatgggtaacttttgtgttgaagaagtcatttgtcaaccatggtaaaacttgcaaacccactttatacagagtggattcttgaagctatacagaaaataaaaaagcaaaagcaaaggccctctgaagagagaatctgccatgcggtcagtacttcccatgggttggataagaagacagtctctgaacagctggaactcagtgttcaggatggctcagttctcaaagtcaccaacaaaggccttgcctcctataaggacccagacaaccctgggcgcttttcatcagttaaaccaggcacttttcctaagtcagccaaggggtctagaggatcatgtaatgatctccgcaatgtggattggaataaacttttaaggagagcaattgaaggacttgaggagccgaatggctcctccctgaagaacatagagaagtatctcagaagtcaaagtgatctcacaagcaccaccaacaacccagcctttcagcagcggctgcgactgggggccaaacgcgctgtgaataatgggaggttactgaaagacggaccgcagtacagggtcaattatgggagcttagatggcaaaggggcacctcagtatcccagtgcattcccatcctcgctcccacctgtcagccttctaccccatgagaaagaccagccccgtgctgatcccattccaatatgtagcttctgtttggggactaaagaatcaaatcgtgaaaagaaaccagaagaactcctctcttgtgcagattgtggcagtagtggacacccatcctgtttgaaattttgtcctgaattaacaacaaatgtaaaggccttaaggtggcagtgcatcgaatgcaagacatgcagtgcctgtagagtccaaggcagaaatgctgataatatgcttttttgtgattcctgtgatagaggatttcatatggaatgctgtgacccaccactttccagaatgccaaaagggatgtggatttgccaagtctgcagaccaaagaaaaagggaagaaaactacttcatgagaaagctgcacaaataaaacgacgatatgcaaaacccattggacgaccgaaaaataaattaaagcaacgattgttgtctgtaaccagtgatgaaggatccatgaatgcattcacaggaagggggtcacctggtaggggtcaaaagactaaagtctgtaccacaccttcatctggtcatgctgcatctgggaaggactcaagcagcagattggctgttacagaccccactcggcctggtgccaccaccaaaatcaccaccacctccacctacatttctgcctctacacttaaagttaacaagaaaaccaaagggctcattgatggccttactaagttttttacaccatcacctgatggtcgcagatcacgaggtgaaattatagacttttcaaagcactatcgtccaaggaaaaaggtctctcagaaacagtcatgcacttctcatgtgttggctacaggtaccacacaaaagctaaaacctccaccttcttcacttccacccccaacccccatctccggtcagagccccagttcacaaaagtccagcacggccacttcttctccctctccccagagttcttccagccagtgcagtgtgccctccctgagcagccttaccactaacagccagctgaaggcactctttgatgggctttctcatactataccactcagggacagtctcgcaaaaagggacaccccgagttatgcaccacccaaacgtatgcgtcgtaaaactgaattatcttccacggcaaaatctaaagcccacttctttggcaaaagagatattagaagtcggtttatttctcactcctcctcctctagctgggggatggctagaggaagtatttttaaagcaattgctcacttcaagcgaacaactttccttaaaaagcacaggatgctaggcagattaaaatataaagtgacccctcagatggggaccccctcaccagggaaggggagcttgacagacggaaggattaaacctgatcaggatgatgatactgaaataaaaataaacatcaaacaagaaagtgcagatgtaaatgtgattggaaacaaggatgtcgttactgaagaggatttggatgtttttaagcaggcccaggaactttcttgggagaaaatagagtgtgagagtggggtggaagactgtggccggtacccttctgtgattgaatttggtaaatatgaaatccaaacctggtactcctcgccttacccacaggaatatgcaagattaccaaagctttacctgtgtgaattctgtcttaaatatatgaaaagtaaaaatattttgctaagacactccaagaagtgtggatggtttcatcctccagcaaatgaaatttaccgaaggaaagacctttcagtatttgaggttgatgggaatatgagcaaaatttattgccaaaacctttgcttgttagccaagctcttcctggaccacaaaacgttgtattatgatgtcgagccattccttttttatgtccttacaaaaaatgatgaaaagggctgtcatctggttggatacctctctaaggaaaagctttgccagcagaagtataatgtctcctgcataatgatcatgccccagcaccaaaggcaaggatttggacggtttctcattgatttcagctatttgctttctagaagagaaggccaagcagggtctcctgaaaagcctctctccgatctgggccgtctctcctacctggcatattggaagagcgtcatcttggagtatctctaccaccaccatgagaggcacatcagcatcaaggcaattagcagagcgacgggcatgtgcccacatgacattgccaccactctgcagcacctccacatgatcgacaagagagatggcagatttgtcatcattagacgggaaaagttgatattgagccacatggaaaagctgaaaacctgttccagagccaatgaacttgatccagacagtctgaggtggaccccaattttaatttctaatgctgcagtgtctgaagaagagcgagaagctgagaaagaggctgagcggctaatggaacaagctagctgctgggagaaggaggaacaagaaatcctgtcaactagagctaacagtaggcaatcacctgcaaaagtacaatcgaaaaataaatatttgcattccccggagagccggccagtcacaggggagcgagggcagctgctggagctgtctaaagagagcagtgaagaagaagaggaggaggaggacgaggaggaggaagaagaggaggaagaagaggaagaggatgaagaggaggaagaagaggaagaagaagaagaagaagaagaaaatattcaaagctctcccccaagattgacgaaaccacagtcagttgccataaagagaaagaggccttttgtactaaagaagaaaaggggtcgtaaacgcaggaggatcaacagcagtgtaacaacagagaccatttcagagacgacagaagtactgaatgagccctttgacaactcagatgaagagaggccaatgccacagctggagcctacctgtgagattgaagtggaggaagatggcaggaagccagtcctgagaaaagcattccagcatcagcctgggaagaaaagacaaacagaggaagaggaaggaaaagacaatcattgcttcaagaatgctgacccttgtagaaacaatatgaatgatgattcaagtaacttgaaagaaggcagtaaagacaatcccgaacctctaaagtgcaaacaagtgtggccaaaaggaacaaagcgcggtctatctaagtggaggcaaaacaaagagaggaagaccggatttaaactgaatttgtacaccccgccagaaacacccatggagcctgacgagcaggtaacagtggaagaacagaaggagacttcagaaggaaaaaccagccccagtcccatcaggattgaggaggaggtcaaggaaactggggaagccctgttgcctcaagaggaaaacagaagggaagaaacatgtgcccctgtaagtccaaacacatcaccaggtgaaaaaccagaagatgatctcatcaaacctgaggaagaggaagaggaggaggaggaggaagaggaagaagaggaagaagaggaaggggaagaagaagaaggaggaggaaatgtagaaaaagatccagatggtgctaaaagccaagaaaaagaggaaccagaaatctccacggaaaaagaagactctgcacgtttggatgatcacgaagaggaggaggaagaggatgaagagccatcccacaacgaggaccatgatgccgatgacgaggatgacagccacatggagtctgccgaagtggagaaggaagagctgcccagagaaagcttcaaagaagtactggaaaaccaggagacttttttagaccttaatgtgcagcctggtcactcgaacccagaggtcttaatggactgtggcgtcgacctgacagcttcttgtaacagtgagcccaaggagcttgctggggaccctgaagctgtacccgaatctgacgaggagccacccccaggagaacaggcacagaagcaggaccaaaagaacagcaaggaagtcgatacagagttcaaagagggaaacccagcaaccatggaaatcgactctgagactgtccaggccgttcagtctttgacccaggagagcagcgaacaggacgacacctttcaggattgtgccgagactcaagaggcctgtagaagcctacagaactacacccgtgcagaccaaagtccacagattgccaccacgctcgacgattgccaacagtcggaccacagtagcccagtttcatccgtccactcccatcctggccagtccgtacgttctgtcaacagcccaagtgtccctgctctggaaaacagctacgcccaaatcagcccagatcaaagtgccatctcagtgccatctctgcagaacatggaaaccagtcccatgatggatgtcccatcagtttcagatcattcacagcaagtcgtagacagtggatttagtgacctgggcagtatcgagagcacaactgagaactacgaaaacccaagcagctacgattctactatgggaggcagcatctgtggaaacggctcttcacagaacagctgctcctatagcaacctcacctccagcagtctgacacagagcagctgtgctgtcacccagcagatgtccaacatcagcgggagctgcagcatgctgcagcaaaccagcatcagctcccctccgacctgcagcgtcaagtctcctcaaggctgtgtggtggagaggcctccgagcagcagccagcagctggctcagtgcagcatggctgctaacttcaccccacccatgcagctggctgaaatccccgagacgagcaacgccaacattggcttatacgagcgaatgggtcagagtgattttggggctgggcattacccgcagccgtcagccaccttcagccttgccaaactgcagcagttaactaatacacttattgatcattcattgccttacagccattccgctgctgtgacttcctatgcaaacagtgcctctttgtccacaccattaagtaacacagggcttgttcaactttctcagtctccacactccgtccctgggggaccccaagcacaagctaccatgaccccaccccccaacctgactcctcctccaatgaatctgccgccgcctcttttgcaacggaacatggctgcatcaaatattggcatctctcacagccaaagactgcaaacccagattgccagcaagggccacatctccatgagaaccaagtcagcgtctctgtcaccagccgctgccacccatcagtcacaaatctatgggcgctcccagactgtagccatgcagggtcctgcacggactttaacgatgcaaagaggcatgaacatgagtgtgaacctgatgccagcgccagcctacaatgtcaactctgtgaacatgaacatgaacactctcaacgccatgaatgggtacagcatgtcccagccaatgatgaacagtggctaccacagcaatcatggctatatgaatcaaacgccccaataccctatgcagatgcagatgggcatgatgggcacccagccatatgcccagcagccaatgcagaccccaccccacggtaacatgatgtacacggcccccggacatcacggctacatgaacacaggcatgtccaaacagtctctcaatggctcctacatgagaaggtag

SEQ ID NO: 980 - protein, 2073 aa, Homo sapiens
MVKLANPLYTEWILEAIQKIKKQKQRPSEERICHAVSTSHGLDKKTVSEQLELSVQDGSVLKVTNKGLASYKDPDNPGRFSSVKPGTFPKSAKGSRGSCNDLRNVDWNKLLRRAIEGLEEPNGSSLKNIEKYLRSQSDLTSTTNNPAFQQRLRLGAKRAVNNGRLLKDGPQYRVNYGSLDGKGAPQYPSAFPSSLPPVSLLPHEKDQPRADPIPICSFCLGTKESNREKKPEELLSCADCGSSGHPSCLKFCPELTTNVKALRWQCIECKTCSACRVQGRNADNMLFCDSCDRGFHMECCDPPLSRMPKGMWICQVCRPKKKGRKLLHEKAAQIKRRYAKPIGRPKNKLKQRLLSVTSDEGSMNAFTGRGSPGRGQKTKVCTTPSSGHAASGKDSSSRLAVTDPTRPGATTKITTTSTYISASTLKVNKKTKGLIDGLTKFFTPSPDGRRSRGEIIDFSKHYRPRKKVSQKQSCTSHVLATGTTQKLKPPPSSLPPPTPISGQSPSSQKSSTATSSPSPQSSSSQCSVPSLSSLTTNSQLKALFDGLSHTIPLRDSLAKRDTPSYAPPKRMRRKTELSSTAKSKAHFFGKRDIRSRFISHSSSSSWGMARGSIFKAIAHFKRTTFLKKHRMLGRLKYKVTPQMGTPSPGKGSLTDGRIKPDQDDDTEIKINIKQESADVNVIGNKDVVTEEDLDVFKQAQELSWEKIECESGVEDCGRYPSVIEFGKYEIQTWYSSPYPQEYARLPKLYLCEFCLKYMKSKNILLRHSKKCGWFHPPANEIYRRKDLSVFEVDGNMSKIYCQNLCLLAKLFLDHKTLYYDVEPFLFYVLTKNDEKGCHLVGYLSKEKLCQQKYNVSCIMIMPQHQRQGFGRFLIDFSYLLSRREGQAGSPEKPLSDLGRLSYLAYWKSVILEYLYHHHERHISIKAISRATGMCPHDIATTLQHLHMIDKRDGRFVIIRREKLILSHMEKLKTCSRANELDPDSLRWTPILISNAAVSEEEREAEKEAERLMEQASCWEKEEQEILSTRANSRQSPAKVQSKNKYLHSPESRPVTGERGQLLELSKESSEEEEEEEDEEEEEEEEEEEEDEEEEEEEEEEEEEENIQSSPPRLTKPQSVAIKRKRPFVLKKKRGRKRRRINSSVTTETISETTEVLNEPFDNSDEERPMPQLEPTCEIEVEEDGRKPVLRKAFQHQPGKKRQTEEEEGKDNHCFKNADPCRNNMNDDSSNLKEGSKDNPEPLKCKQVWPKGTKRGLSKWRQNKERKTGFKLNLYTPPETPMEPDEQVTVEEQKETSEGKTSPSPIRIEEEVKETGEALLPQEENRREETCAPVSPNTSPGEKPEDDLIKPEEEEEEEEEEEEEEEEEEGEEEEGGGNVEKDPDGAKSQEKEEPEISTEKEDSARLDDHEEEEEEDEEPSHNEDHDADDEDDSHMESAEVEKEELPRESFKEVLENQETFLDLNVQPGHSNPEVLMDCGVDLTASCNSEPKELAGDPEAVPESDEEPPPGEQAQKQDQKNSKEVDTEFKEGNPATMEIDSETVQAVQSLTQESSEQDDTFQDCAETQEACRSLQNYTRADQSPQIATTLDDCQQSDHSSPVSSVHSHPGQSVRSVNSPSVPALENSYAQISPDQSAISVPSLQNMETSPMMDVPSVSDHSQQVVDSGFSDLGSIESTTENYENPSSYDSTMGGSICGNGSSQNSCSYSNLTSSSLTQSSCAVTQQMSNISGSCSMLQQTSISSPPTCSVKSPQGCVVERPPSSSQQLAQCSMAANFTPPMQLAEIPETSNANIGLYERMGQSDFGAGHYPQPSATFSLAKLQQLTNTLIDHSLPYSHSAAVTSYANSASLSTPLSNTGLVQLSQSPHSVPGGPQAQATMTPPPNLTPPPMNLPPPLLQRNMAASNIGISHSQRLQTQIASKGHISMRTKSASLSPAAATHQSQIYGRSQTVAMQGPARTLTMQRGMNMSVNLMPAPAYNVNSVNMNMNTLNAMNGYSMSQPMMNSGYHSNHGYMNQTPQYPMQMQMGMMGTQPYAQQPMQTPPHGNMMYTAPGHHGYMNTGMSKQSLNGSYMRR

SEQ ID NO: 981 - DNA, 2481 bp, Homo sapiens
gccgccgccgccgccctctcggccatcgctgcctccgccgcctgctccacctcgagggacgcgagcgggcggcggggctggccgtgagagagacaggagaggaaggagggcaggggcggagttgcccgccttagcccccgcccccggccgcggccccgggccctgccccgcgcggccctgcccggcccaccgagccctggtgtggcagcggctcatggcggccgtggggcccccgcagcagcaggtgcggatggcccatcagcaggtctgggcggcgctcgaagtggcgctccgggtgccctgcctttacatcatcgacgccatcttcaactcctacccggattccagccaaagccggttctgcatcgtgctccagatcttcctccggctctttggtgtatttgcatccagtattgttctgatcttgtcacaacgatcacttttcaagttttacacgtacagctcagcctttctgttagctgcaacttcagtgttggtgaattattatgcttctttgcacattgacttctatggtgcctacaacacgtcagcttttggaattgagctgcttcctcgaaaaggtccctcgctgtggatggcacttatcgttctacagctaacatttggaattggatacgttacactactccagattcattccatctattcacaattaattattttggatctcttggttcctgtaataggcttaatcacagagctaccattacacatcagagagactttactgtttacttcttccttgattctcacattaaatacagtgtttgtcctggcagtgaaactgaagtggttttattattccacacgatatgtttatcttttggtgaggcacatgtatcgaatttatggattacagttattgatggaggacacatggaagaggattcgtttcccagacatactacgagtcttttggctaacaagagttacagctcaggctacagtgttaatgtacatcttaaggatggcaaatgaaactgattccttctttatttcttgggatgatttttgggacctcatttgcaatcttataattagtgggtgcgattctacactaactgtactgggcatgagtgctgtaatttcctcagtagcccattatttggggcttggaatattggcctttattggatcaactgaggaagatgacaggcgtcttggctttgttgcacctgttttattttttattttggctcttcagactgggttaagtgggctaagaccagaagagagacttattcgcttaagtagaaacatgtgccttttattaactgcagtcctgcattttatccatggaatgacagaccctgtattaatgtctctcagtgcctctcatgtgtcatcttttcgtagacattttcctgtgctgtttgtctctgcttgcctgtttattcttcctgtcttactcagttatgttctttggcatcactatgcactaaatacatggttgtttgcagttacagcattttgtgtggaactgtgcttaaaagtaattgtttctctcactgtttatacgttattcatgattgatggctactataatgtcctctgggaaaagcttgacgattatgtctactacgttcgttcaacaggcagtattattgaatttatatttggagttgtaatgtttggaaatggggcttacactatgatgtttgagtcgggaagtaaaattcgggcttttatgatgtgcctacatgcatattttaacatctacttacaagccaaaaatggctggaagacatttatgaatcgtaggactgctgtgaagaaaattaattcacttcctgaaataaaagggagccgcttacaagaaataaatgatgtatgtgcaatctgctatcatgagtttacaacatctgctcgtattacaccgtgtaatcattatttccatgcactttgccttcggaaatggctgtacattcaagatacttgtccaatgtgccatcagaaagtatacatcgaagatgatatcaaggataattcaaatgtatctaacaacaatggatttattccacccaatgaaactccagaggaagctgtaagagaagctgctgctgaatctgacagggaattgaacgaagatgacagtacagattgtgatgatgatgttcaaagagaaagaaatggagtgattcagcacacaggcgcagcagctgaagaatttaatgatgatactgactgatgaaaatagcatttattaatgattgaggtatttgtttaaaattcagttcatccaaaatggagtaatatccttcaccttcagtgtgtaaccaagcacaaaaacagtatcaatgttgaatctgtgaatggttttccgtttactgtgatgtgctactgtaaatatacctctttaattacttctggtctctttggtgacctgtttaaatttgtgtacattattgtacatagaataaaatgttttcacatttttatgacaaaaaaaaaaaaaaaaaa

SEQ ID NO: 982 - protein, 664 aa, Homo sapiens
MAAVGPPQQQVRMAHQQIWAALEVALRVPCLYIIDAIFNSYPDSSQSRFCIVLQIFLRLFGVFASSIVLILSQRSLFKFYTYSSAFLLAATSVLVNYYASLHIDFYGAYNTSAFGIELLPRKGPSLWMALIVLQLTFGIGYVTLLQIHSIYSQLIILDLLVPVIGLITELPLHIRETLLFTSSLILTLNTVFVLAVKLKWFYYSTRYVYLLVRHMYRIYGLQLLMEDTWKRIRFPDILRVFWLTRVTAQATVLMYILRMANETDSFFISWDDFWDLICNLIISGCDSTLTVLGMSAVISSVAHYLGLGILAFIGSTEEDDRRLGFVAPVLFFILALQTGLSGLRPEERLIRLSRNMCLLLTAVLHFIHGMTDPVLMSLSASHVSSFRRHFPVLFVSACLFILPVLLSYVLWHHYALNTWLFAVTAFCVELCLKVIVSLTVYTLFMIDGYYNVLWEKLDDYVYYVRSTGSIIEFIFGVVMFGNGAYTMMFESGSKIRAFMMCLHAYFNIYLQAKNGWKTFMNRRTAVKKINSLPEIKGSRLQEINDVCAICYHEFTTSARITPCNHYFHALCLRKWLYIQDTCPMCHQKVYIEDDIKDNSNVSNNNGFIPPNETPEEAVREAAAESDRELNEDDSTDCDDDVQRERNGVIQHTGAAAEEFNDDTD

SEQ ID NO: 983 - DNA, 894 bp, Homo sapiens
cggaaactcagagccgggttcctcccgggtttctgccgggtttctccctgcggctcctgggttgttgagactcttgtgaagatggcttgcgctgccgcgcggtccccggccgaccaggacaggtttatttgtatctatcctgcttatttaaataataagaagaccatcgcagagggaaggcgaatccccataagtaaggctgttgaaaatcctacagctacagagattcaagatgtatgttcagcagttggacttaacgtatttcttgagaaaaataaaatgtactctagagaatggaatcgtgatgtccaatacagaggcagagtccgggtccagctcaaacaggaagatgggagcctctgccttgtacagttcccatcacgtaagtcagtaatgttgtatgcagcagaaatgatacctaaactaaaaacaaggacacaaaaaacaggaggtgctgaccaaagtcttcaacaaggagagggaagtaaaaaagggaaaggaaagaaaaagaagtaacctagtatcagcatcaagtatgtggtactactgtaagagacatgaatggagacttctaatttgtatcggagggaaacagaagctttttgtttgcatcatttaactgaactgtgaacccttgtgcctctcatctttatcatcggagttgacagtgaaacaaatttacatcagaagtttgcatctcgcgtatatgccgtataaaagaatttttttgtctttcaatgcagttttttggaagaaaatatttttaaatggacaatggactgtacaataagttacttgaaataagttgtttcagataaatttcaattagatttaaaataaacattatgtccaccttttaagttaatgaaataaaatttgaaactgaaaaaaaaa

SEQ ID NO: 984 - protein, 144 aa, Homo sapiens
MACAAARSPADQDRFICIYPAYLNNKKTIAEGRRIPISKAVENPTATEIQDVCSAVGLNVFLEKNKMYSREWNRDVQYRGRVRVQLKQEDGSLCLVQFPSRKSVMLYAAEMIPKLKTRTQKTGGADQSLQQGEGSKKGKGKKKK

SEQ ID NO: 985 - DNA, 570 bp, Homo sapiens
ctgtacatgaattaaatatattatctgtctctgcactgagtcacacgacgttcacagtaccgtggggaggagtggagggtgggggcctgaggtgggcagggcagggggcctgggtagaaaggcgaggctggcctccccttggcctgtgccattcaggatcagcccagtgttgaggagacctgggggatacagaggggagccttcttcaggggccccggccacccaggcttccagcccccggaggcaagcctctcagcatcagagcctgctcctgttccacgttcctctccctcagatggtggcatctacacctctccctgtcgtggccgccctctggggtggcaggggctgggggaagctggtattgggatcaggtggacagagccacaagggctgggaaggaaggatggggaggctgtgcgagccttcgggagctgaggtcagcctggcaccagtgtcaaggtgactctgcatatctgggtgccgtcccccagaaacttagcaaggcctggtgaataacaaaccccgcgtggaaaaactaaccagaggccccccccccggggggggggg

SEQ ID NO: 986 - DNA, 2895 bp, Homo sapiens
gaattccggtggcggagaccaaggcggcggcggcggacggggagcggcccggccccggccccctgctcgttggctgtggcagggccgccgtggggccggcccggctcccgccccccgcggctccccctccggctcctcctccggggagacgccgggggcctggcccggcccgcactcagactgctgctgcagccgccgccgggggagtcggaggcggtggcggcgccatgggcggcctggcctctgggggggatgtggagccgggactgcccgtcgaggtgcgcggctccaacggggccttctacaagggctttgtgaaggatgtccatgaagactctgtcaccatcttctttgaaaacaactggcagagtgagagacaaattccttttggggatgtccggctaccacctccagctgactataataaggagatcacagaaggggatgaagtggaggtttattctcgagccaatgaacaggaaccttgtggctggtggctggcccgggtgcggatgatgaagggagatttctatgtcattgaatatgctgcctgtgatgccacctacaatgaaattgttaccctggagcgacttcggccagttaatcccaatccccttgcaaccaaaggcagcttcttcaaggttaccatggctgtgcccgaggatctgagagaagcctgctccaatgaaaacgtccataaagagttcaagaaagccctgggagccaactgcatctttctcaacatcacaaacagtgagctcttcattctgtcaaccacagaagcccctgtgaagcgagcatctctgctgggtgatatgcatttccgaagcctgcgcaccaaactgctacttatgtcccgcaatgaagaagctaccaagcacctagagacaagcaagcagttggcagcagccttccaagaggagttcacagtgcgagaggacctgatgggactggcaattgggactcacggtgccaacatccagcaggcccgaaaagtacctggggtgaccgccattgagttgggtgaagagacctgcactttccgcatctatggggagactcccgaggcttgccgacaggcccgaagctaccttgagttttctgaggactcagtgcaagtgcccaggaacctggttggcaaagtgattggaaagaacgggaaagtgatccaggagattgtggataaatctggtgtggtgagggttcgagtggaaggtgataatgacaagaagaaccccagggaggagggaatggttcccttcatttttgttggcacccgagagaacatcagcaatgcccaggctttgctggagtatcacctctcctacctgcaggaggtagagcagcttcgcttggagaggctacaaattgatgagcagcttcggcagattgggctgggctttcgccctcctgggagtgggcggggcagcggtggcagcgacaaggctggatatagcactgatgagagctcctcctcctccctccatgcgactcgaacctatgggggcagctatgggggccgtggccgtggccggaggacaggcggtcctgcctatggccccagctcagatgtgtctacagcttcagagactgagtcagagaagagagaggagcccaaccgagctgggcctggcgacagggatcccccaacccgaggggaagaaagccggaggcggccgactgggggccggggtaggggacccccacctgccccccggcccacttcgagatacaattcttcatctattagctcagtgctgaaggatccagacagtaatccctacagcctattggacacgtctgaaccagagcccccggttgattcagaacctggggaaccccccccagcaagtgccaggcgccgccgctcccgccgccgccgcactgatgaagacaggaccgtcatggatggaggcctggaatcagatgggcccaacatgacagagaatggcctggaagatgaatcaagacctcaacgtcgtaatcgcagccgccgccgccgtaaccgtggtaatcggactgatggctctatcagtggagaccgccagccagtgactgtggctgactatatctcacgagcagagtctcagagccgccagagcgcacccctggaacgcactaaaccctcagaagactctctttcaggacagaagggtgactctgtcagcaagcttcctaagggcccctcggagaatggggagctctccgcccccttggagttgggtagtatggtgaatggggtttcataaaacctccaacctgcacccctcccttctccatctcgcttgctgcccaacaccatggccctcacaggcccaactgacctgcgctggagctgctcttatctaggggggaggggggtggcacagcagcttgggtaccccccaacctccaggagctagtggaggggtgtgtaacagggtcataccccctccctcttgtccaccctacccccagggtaaggggagcctctctccttccccatcagactggatgtgcctttatcctctaatgccccaatctctctctgaacacccccattctccacctgttggtggggggtgctcctcgacccacccagatttgaccgttcagggggcctcccctgctatccctcctcccatcctgtaccccccatttctggggcctcatcactgtggaagacggggatagtaagagataagtgggtgggaggcacggggaaggttttggagtagaaccaggggtgtgtatgaaggggggtgacaaggtccccctggggaggggaccaaccttgtctggtggatgagaaggcgtatttatttttcactgtacagtatttaaaaagagaataaaaaaatccaaatggcaaaaaaaaaaaaaaaaaaaaaaaaaaaaaaaaaaaaaaaaaaaaaa

SEQ ID NO: 987 - protein, 673 aa, Homo sapiens
MGGLASGGDVEPGLPVEVRGSNGAFYKGFVKDVHEDSVTIFFENNWQSERQIPFGDVRLPPPADYNKEITEGDEVEVYSRANEQEPCGWWLARVRMMKGDFYVIEYAACDATYNEIVTLERLRPVNPNPLATKGSFFKVTMAVPEDLREACSNENVHKEFKKALGANCIFLNITNSELFILSTTEAPVKRASLLGDMHFRSLRTKLLLMSRNEEATKHLETSKQLAAAFQEEFTVREDLMGLAIGTHGANIQQARKVPGVTAIELGEETCTFRIYGETPEACRQARSYLEFSEDSVQVPRNLVGKVIGKNGKVIQEIVDKSGVVRVRVEGDNDKKNPREEGMVPFIFVGTRENISNAQALLEYHLSYLQEVEQLRLERLQIDEQLRQIGLGFRPPGSGRGSGGSDKAGYSTDESSSSSLHATRTYGGSYGGRGRGRRTGGPAYGPSSDVSTASETESEKREEPNRAGPGDRDPPTRGEESRRRPTGGRGRGPPPAPRPTSRYNSSSISSVLKDPDSNPYSLLDTSEPEPPVDSEPGEPPPASARRRRSRRRRTDEDRTVMDGGLESDGPNMTENGLEDESRPQRRNRSRRRRNRGNRTDGSISGDRQPVTVADYISRAESQSRQSAPLERTKPSEDSLSGQKGDSVSKLPKGPSENGELSAPLELGSMVNGVS

SEQ ID NO: 988 - DNA, 2031 bp, Homo sapiens
ggcacgagggcgagctgaggtggaggcaggctgcggcagacggcgacagtggcggcggcgccatggcagggcttgcaggatccctgctgccttggtgatcccgggctgacagccagagagcacagcggctcagctcctggagagtgagggttgaagaaagcggagggcagccgcctgcgcccgctggctcccattaggtcggttcctgcagcggtgcccggcagccttggtgaaggccctgcccggcagagatcatgtattgcctccagtggctgctgcccgtcctcctcatccccaagcccctcaaccccgccctgtggttcagccactccatgttcatgggcttctacctgctcagcttcctcctggaacggaagccttgcacaatttgtgccttggttttcctggcagccctgttccttatctgctatagctgctggggaaactgtttcctgtaccactgctccgattccccgcttccagaatcggcgcatgatcccggcgttgtgggcacctaacggcctgccctgttagctttccaaggaagcagaagacgggaggggaggcattgacataggtcataaagcattggagtttcaaatcccgcagcctcgcgggtgtcacattcctgacggcgcctttttggcctgtgatgttttatccttacaatgtgaataatggcactgaccggtgcttttattgtaaagtcctatagtcgtgggtggtcttgtggttgtgtgtgttctgtccccatctaggtcctggctggccgcatgaccacccctctcgcctcattactgtgaggagtctgggtccatcctggtcagctgccccaatgtgacctggggcagataaaatgccagtctcattgtcacctctgtgacccctccttgtcagggtctccttccttcccagaatgttactgactcctcagtccctcttctggtttccctttatttctcttctacccttttccttttttggggagtacctgtccaagacagggctcatttttgcacttatctcgaatttgaagagattgctgacgcccgagagcctcgctttttcatccttctttccttgttcagcaggctagacagaaacatgtcttgactgttagttgtccacaaatcttcagtattttctccacttcatttttaagaaaggaagcaacagatagatgttgctctttcacctgggtgtctgggctcaagctttcccgcccagcctcacttcctttgcccttcctcctgcctttctcaactgtcccaaggagggggcctcattgtgtctcccgtgcatgctctgcagcattgaagtatggtgtgttcacgtagttctagcagtccccagctgagtgagtgggagagtacctgtgtgtttcgtaacggccttgatccccttgatagatgtttggatattttttggtgtgccctgtgtgtgtgtgtgtgtacaaatacatgtgtatattccttttaaagaagctttatcgaacgtggtctgattttgaggtttagcaatagctagctatatatggtaggtgccgctacagtttttatttagcatggggattgcagagtgaccagcacactggactccgaggtggttcagacaagacagaggggagcagtggccatcatcctcccgccaggagcttcttcgttcctgcgcatatagactgtacgttatgaagaatacccaggaagactttgtgactgtcacttgctgctttttctgcgcttcagtaacaagtgttggcaaacgagactttctcctggcccctgcctgctggagatcagcatgcctgtcctttcagtctgatccatccatctctctcttgcctgaggggaaagagagatgggccaggcagagaacagaactggaggcagtccatctagggaatgggactgtgaggccatacttgtgaaacgtctggactgctattctagagcttttatttggtgtgttcgttgcacagctgtttgaaatgtttaataaagctttataaactttaaaaaaaaaaaaaaaaaa

SEQ ID NO: 989 - protein, 87 aa, Homo sapiens
MYCLQWLLPVLLIPKPLNPALWFSHSMFMGFYLLSFLLERKPCTICALVFLAALFLICYSCWGNCFLYHCSDSPLPESAHDPGVVGT

SEQ ID NO: 990 - DNA, 2728 bp, Homo sapiens
ggtggctggttctgcgccggatccgggagaggggcgggcgccattgtgcttcgctgccgactgcatttcctcagtcacgggcctagaactccaaggagaaaggcggcgaaaaatctttaagaatggagtctaaaccttcaaggattccaagaagaatttctgttcaaccttccagctccttaagtgctaggatgatgtctggaagcagaggaagtagtttaaatgatacctatcactcaagagactcttcatttagattggattctgaatatcagtctacatcagcatcagcatctgcgtcaccatttcaatctgcatggtatagtgaatctgagataactcagggagcacgctcaagatcgcagaaccagcaacgggatcatgattcaaaaagacctaaactttcctgtacaaactgtactacctcagctgggagaaatgttggaaatggtttaaacacattatcagattcatcttggaggcatagtcaagttcctagatcttcatcaatggtacttggatcatttggaacagacttaatgagagagaggagagatttggagagaagaacagattcctctattagtaatcttatggattatagtcaccgaagtggtgatttcacaacttcatcatatgttcaagacagagttccttcatattcacaaggagcaagaccaaaagaaaactcaatgagcactttacagttgaatacatcatccacaaaccaccaattgccttctgaacatcagaccatactaagttctagggattccagaaattctttaagatcaaatttttcttcaagagaatcagaatcttcccgaagcaatacgcagcctggattttcttacagttcaagtagagatgaagccccaatcataagcaattcagaaagggttgtttcatctcaaagaccatttcaagaatcttctgacaatgaaggtaggcggacaacgaggagattgctgtcacgcatagcttctagcatgtcatctacttttttttcacgaagatctagtcaggattccttgaatacaagatcattgaattctgaaaattcttacgtttctccaagaatcttgacagcttcacagtcccgtagtaatgtaccatcagcttctgaagttcccgataatagggcgtctgaagcttctcagggatttcgatttcttaggcgaagatggggtttgtcatctcttagccacaatcatagctctgagtcagattcagaaaattttaaccaagaatctgaaggtagaaatacaggaccatggttatcttcctcacttagaaatagatgcacacctttgttctctagaaggaggcgagagggaagagatgaatcttcaaggatacctacctctgatacatcatctagatctcatatttttagaagagaatcaaatgaagtggttcaccttgaagcacagaatgatcctcttggagctgctgccaacagaccacaagcatctgcagcatcaagcagtgccacaacaggtggctctacatcagattcggctcaaggtggaagaaatacaggaatatcagggattcttcctggttccttattccggtttgcagtccccccagcacttgggagtaatttgaccgacaatgtcatgatcacagtagatattattccttcaggttggaattcagctgatggtaaaagtgataaaactaaaagtgcgccttcaagagatccagaaagattgcagaaaataaaagagagcctccttttagaggactcagaagaagaagaaggtgacttatgtagaatttgtcaaatggcagctgcatcatcatctaatttgctgatagagccatgcaagtgcacaggaagtttgcagtatgtccaccaagactgtatgaaaaagtggttacaggccaaaattaactctggttcttcattagaagctgtaaccacctgtgaactatgtaaagagaagttggagcttaacctggaggattttgatattcatgaactacatagagctcatgcaaatgaacaagctgagtatgagtttatcagctctggtctctacctagtggtgttattgcacttgtgcgaacaaagcttttctgatatgatgggaaatacaaatgaaccaagcacacgtgtccgatttattaaccttgcaagaactcttcaggcacatatggaagatctcgaaacttcagaggatgattccgaagaagacggagaccataacaggacatttgatattgcctaacttcatataagacagatggatgatctgtgaacataagtgtttattaaaaatggcaattaaatataaattacttttgtgggggaatgcctaataaatacattgactatatataaaatgaatatatacatacacatgtatgcctgtatatatatattcattctccagtgttgctgaattaaaattctgctggactttttaacatagcaaatccgatgtttataaactggtaatcaaaaaggttttttcttttaggtgagtgggaaagtattacccttgttttaaatatctaagcaatgcctatcaacccttttttgtgttatgattactgtagtcatatttatgaaaaaaggtttgtgttttactcttgctagtgagaaaagtgggacaaaatatacttttgaaataaaatgctatatggcacctaattattttttcttttaaaatgccttaagttgcagtctcattttgataatcatttgcttccagtgttt

SEQ ID NO: 991 - protein, 704 aa, Homo sapiens
MESKPSRIPRRISVQPSSSLSARMMSGSRGSSLNDTYHSRDSSFRLDSEYQSTSASASASPFQSAWYSESEITQGARSRSQNQQRDHDSKRPKLSCTNCTTSAGRNVGNGLNTLSDSSWRHSQVPRSSSMVLGSFGTDLMRERRDLERRTDSSISNLMDYSHRSGDFTTSSYVQDRVPSYSQGARPKENSMSTLQLNTSSTNHQLPSEHQTILSSRDSRNSLRSNFSSRESESSRSNTQPGFSYSSSRDEAPIISNSERVVSSQRPFQESSDNEGRRTTRRLLSRIASSMSSTFFSRRSSQDSLNTRSLNSENSYVSPRILTASQSRSNVPSASEVPDNRASEASQGFRFLRRRWGLSSLSHNHSSESDSENFNQESEGRNTGPWLSSSLRNRCTPLFSRRRREGRDESSRIPTSDTSSRSHIFRRESNEVVHLEAQNDPLGAAANRPQASAASSSATTGGSTSDSAQGGRNTGISGILPGSLFRFAVPPALGSNLTDNVMITVDIIPSGWNSADGKSDKTKSAPSRDPERLQKIKESLLLEDSEEEEGDLCRICQMAAASSSNLLIEPCKCTGSLQYVHQDCMKKWLQAKINSGSSLEAVTTCELCKEKLELNLEDFDIHELHRAHANEQAEYEFISSGLYLVVLLHLCEQSFSDMMGNTNEPSTRVRFINLARTLQAHMEDLETSEDDSEEDGDHNRTFDIA

SEQ ID NO: 992 - DNA, 762 bp, Homo sapiens
taccattcttcaagaaacggtttgaatcagactgcctttccttttgtcttcattgtcataaacatctgcccccgtgtggttctgactggccgcgaacccctacccgaagcttttattccatcattgtgcaccgttggtggggaatgctgtggcaacaggccacgcctccacttactggttggctttgcgcaggcgccaacggaagtgggtcgcaggaagaggaagtcccgcctctctctcctcaggcagcagcaacgcggaggaaacgggagtgaacggagagcgtagtgaccatcatgagcctcctcaacaagcccaagagtgagatgaccccagaggagctgcagaagcgagaggaggaggaatttaacaccggtccactctctgtgctcacacagtcagtcaagaacaatacccaagtgctcatcaactgccgcaacaataagaaactcctgggccgcgtgaaggccttcgataggcactgcaacatggtgctggagaacgtgaaggagatgtggactgaggtacccaagagtggcaagggcaagaagaagtccaagccagtcaacaaagaccgctacatctccaagatgttcctgcgcggggactcagtcatcgtggtcctgcggaacccgctcatcgccggcaagtaggggccgcctgtctgttgacagaactcactcctctgtcctatgaagaccgctgccattggtgttgagaataataaagctctgtgtttttttctaaaaaaaaaaaaaaaaa

SEQ ID NO: 993 - protein, 118 aa, Homo sapiens
MSLLNKPKSEMTPEELQKREEEEFNTGPLSVLTQSVKNNTQVLINCRNNKKLLGRVKAFDRHCNMVLENVKEMWTEVPKSGKGKKKSKPVNKDRYISKMFLRGDSVIVVLRNPLIAGK

SEQ ID NO: 994 - DNA, 346 bp, Homo sapiens
cttttacctcgttgcactgctgagagcaagatgggtcaccagcagctgtactggagccacccgcgaaaattcggccagggttctcgctcttgtcgtgtctgttcaaaccggcacggtctgatccggaaatatggcctcaatatgtgccgccagtgtttccgtcagtacgcgaaggatatcggtttcattaagttggactaaatgctcttccttcagaggattatccggggcatctactcaatgaaaaaccatgataattctttgtatataaaataaacatttgaaaaaaaaaaaaaaaaaaaaaaaaaaaaaaaaaaaaaaaaaaaaaaaaaaaaaaaaaaaaaaa

SEQ ID NO: 995 - protein, 56 aa, Homo sapiens [sequence omitted]

SEQ ID NO: 996 - DNA, 1332 bp, Homo sapiens
ccggcccgcgccccgcaggccgcccgccgcccgcgccgccatgggagtggagggctgcaccaagtgcatcaagtacctgctcttcgtcttcaatttcgtcttctggctggctggaggcgtgatcctgggtgtggccctgtggctccgccatgacccgcagaccaccaacctcctgtatctggagctgggagacaagcccgcgcccaacaccttctatgtaggcatctacatcctcatcgctgtgggcgctgtcatgatgttcgttggcttcctgggctgctacggggccatccaggaatcccagtgcctgctggggacgttcttcacctgcctggtcatcctgtttgcctgtgaggtggccgccggcatctggggctttgtcaacaaggaccagatcgccaaggatgtgaagcagttctatgaccaggccctacagcaggccgtggtggatgatgacgccaacaacgccaaggctgtggtgaagaccttccacgagacgcttgactgctgtggctccagcacactgactgctttgaccacctcagtgctcaagaacaatttgtgtccctcgggcagcaacatcatcagcaacctcttcaaggaggactgccaccagaagatcgatgacctcttctccgggaagctgtacctcatcggcattgctgccatcgtggtcgctgtgatcatgatcttcgagatgatcctgagcatggtgctgtgctgtggcatccggaacagctccgtgtactgaggccccgcagctctggccacagggacctctgcagtgccccctaagtgacccggacacttccgagggggccatcaccgcctgtgtatataacgtttccggtattactctgctacacgtagcctttttacttttggggttttgtttttgttctgaactttcctgttaccttttcagggctgacgtcacatgtaggtggcgtgtatgagtggagacgggcctgggtcttggggactggagggcaggggtccttctgccctggggtcccagggtgctctgcctgctcagccaggcctctcctgggagccactcgcccagagactcagcttggccaacttggggggctgtgtccacccagcccgcccgtcctgtgggctgcacagctcaccttgttccctcctgccccggttcgagagccgagtctgtgggcactctctgccttcatgcacctgtcctttctaacacgtcgccttcaactgtaatcacaacatcctgactccgtcatttaataaagaaggaacatcaggcatgctaaaaaaaaaaaaaaaaaaaaaaaaaaaaaaaaaaaaaaaaaaaaaaaaaaa

SEQ ID NO: 997 - protein, 236 aa, Homo sapiens
MGVEGCTKCIKYLLFVFNFVFWLAGGVILGVALWLRHDPQTTNLLYLELGDKPAPNTFYVGIYILIAVGAVMMFVGFLGCYGAIQESQCLLGTFFTCLVILFACEVAAGIWGFVNKDQIAKDVKQFYDQALQQAVVDDDANNAKAVVKTFHETLDCCGSSTLTALTTSVLKNNLCPSGSNIISNLFKEDCHQKIDDLFSGKLYLIGIAAIVVAVIMIFEMILSMVLCCGIRNSSVY

SEQ ID NO: 998 - DNA, 2875 bp, Homo sapiens
attgtggacccgagaagcagagagcgagagggggaagaggagcgtgcaagcggaaaagacgggcctcttcctccgactcccgagcgcgaggccctcattttgggttctcagcgaacggcggcagcggcggcggctggaacaatcactcggccaagggcgacagccaactgctgtgagtgcacggggagaggcccaggcagcggcggcggcggcggctctcgggttgcggtgaagaatgtcagccactagcgtggatcagagacctaaagggcaaggaaataaagtttcagtacaaaacggttcgattcatcaaaaagatgctgtaaatgatgatgattttgagccatacttaagtagccagacaaatcagagtaacagctatccaccaatgtcagatccatacatgcctagttactatgctccatccattggatttccatattctcttggggaagcagcgtggtccacagctggagaccagcctatgccatatctgacaacctatggacaaatgagtaatggagaacatcactatataccagatggtgtatttagtcaacctggggcattaggaaatacccctccatttcttggtcaacatggatttaacttttttcctggtaatgctgatttctctacatgggggacaagtggatctcagggacaatcaacacaaagttctgcttatagtagcagttatggctatccacctagttctcttgggagagctattactgatggacaggctggatttggcaatgatactttgagtaaggtgcctggcattagcagtattgagcaaggcatgactggactgaaaattggtggtgacctgacagctgcagtgacaaaaactgtaggtacagctttgagcagcagtggtatgactagcattgcaaccaatagtgtgcccccagttagcagtgcagcacctaaaccaacctcctgggctgccattgccagaaagcctgccaaacctcaaccgaaacttaaacccaagggcaatgtgggaattgggggttctgctgtaccaccacctcctataaaacacaacatgaatattggaacttgggatgaaaaagggtcagtggtaaaggctccaccaacccaaccagttctgcctcctcaaactataatccagcagcctcagccattaattcaaccaccaccattggtgcaaagccaactgcctcaacagcagcctcaaccaccacaaccacagcagcaacaaggacctcagccacaggcccagcctcaccaagtgcagcctcaacagcagcagctgcagaatcgctgggtagctcctcgtaacaggggagcaggcttcaaccagaacaatggagcgggcagtgaaaactttggtttaggtgttgtacctgtcagtgcttcaccttctagtgtagaagtgcatcccgtgctggaaaagctaaaggccataaacaactataatcccaaagactttgattggaatctgaagaatggacgtgtgtttataattaaaagctactctgaggatgacatacatcgttccattaaatactctatctggtgtagtactgagcatggtaataagcgtttggatgcagcttaccgttccctgaatgggaaaggcccactctatttactcttcagtgtgaatggcagtggacatttttgtggagtggctgaaatgaagtctgttgtggactataatgcgtatgctggtgtctggtctcaggataagtggaagggcaaatttgaagttaaatggatctttgtcaaagatgttcccaataaccaattacgacatattcgcttagaaaataatgaaaagcgtcaagaagaggaggaagccatgcgtagggagagaaatagaaacaaacaataaccgtatgaagatgtcctgttaaatttacaacactaacgatgtagactttggaaatgcctaataagtcaaagaagacgtattaaagctcttttctgcttaaggtgacatctttgaacactttaacacaaagttgactcttctcgtaatggttttcatcagcgcatctgcccttatactcttcaccaaacacacttgagaactgtaacttcgtcaagcactttctgtcctgaagcttttaccagtatctgctgtcttttgtaattatgcatcctagctaaggcacagaagactgaatgaatgcaaggattcattaactctttgaatttgttaaatactaacagttaaccattagaagtggttcaatgatgtaagagtcacactgcttcaactttttctttgttgtagtttttaaattgtcgatttttagctatttgacagattaaaagcaaaataatcatgccatatttagtcctggagttcaagtctaaatgttgatgtgaaaaattattgtagtaaacttttaatatggcaaagcaaccttaagctctattttagccaaatgaaacataatctgaaattatattagaacatttcccttgtcttcaaactgtttggtgtaacagaatattgatatgcagcttggtggatttcaccagttaatgcacattcttcttccctcctccccccattaatatgtatactgaaaaatgtgcatttgtctgaggaattattttgtttgctaccacttaatgaatctcaaaattttgagtaaatgtacctcagtctaatcagactttttatgacctttataactacatttaaaacccttaattcctatttctgggtgtttgcgagcctgattgctatcatgaagtaaaaatttattactctaggtattcactagctaaataaacatagttcttgtttagcaagcatatgttgttcctcagctcttttctccagcttttgcagtgtcctggcatccttaaaatactttgaaaatatggc

SEQ ID NO: 999 - protein, 543 aa, Homo sapiens
MSATSVDQRPKGQGNKVSVQNGSIHQKDAVNDDDFEPYLSSQTNQSNSYPPMSDPYMPSYYAPSIGFPYSLGEAAWSTAGDQPMPYLTTYGQMSNGEHHYIPDGVFSQPGALGNTPPFLGQHGFNFFPGNADFSTWGTSGSQGQSTQSSAYSSSYGYPPSSLGRAITDGQAGFGNDTLSKVPGISSIEQGMTGLKIGGDLTAAVTKTVGTALSSSGMTSIATNSVPPVSSAAPKPTSWAAIARKPAKPQPKLKPKGNVGIGGSAVPPPPIKHNMNIGTWDEKGSVVKAPPTQPVLPPQTIIQQPQPLIQPPPLVQSQLPQQQPQPPQPQQQQGPQPQAQPHQVQPQQQQLQNRWVAPRNRGAGFNQNNGAGSENFGLGVVPVSASPSSVEVHPVLEKLKAINNYNPKDFDWNLKNGRVFIIKSYSEDDIHRSIKYSIWCSTEHGNKRLDAAYRSLNGKGPLYLLFSVNGSGHFCGVAEMKSVVDYNAYAGVWSQDKWKGKFEVKWIFVKDVPNNQLRHIRLENNEKRQEEEEAMRRERNRNKQ

SEQ ID NO: 1000 - DNA, 2906 bp, Homo sapiens
cggtggtatcggcggcagctgtgagggggttccgggaagatggtgctgatcaaggaattccgtgtggttttgccatgttctgttcaggagtatcaggttgggcagctttactctgttgcagaagctagtaagaatgagactggtggtggagaaggaattgaagtcttaaagaatgaaccttatgagaaggatggagaaaagggacagtatacgcacaaaatttatcacctaaagagcaaagtgcctgcattcgtgaggatgattgctcccgagggctccttggtgtttcatgagaaagcctggaatgcgtacccctactgtagaacaattgtaacgaatgaatatatgaaagatgatttcttcattaaaatcgaaacatggcacaaaccagacttgggaacattagaaaatgtacatggtttagatccaaacacatggaaaactgttgaaattgtccatatagatattgcagatagaagtcaagttgaaccagcagactacaaagctgatgaagacccagcattattccagtcagtcaagaccaagagaggccctttgggacccaactggaagaaggagctggcaaacagccctgactgtccccagatgtgtgcctataagctggtgaccatcaaattcaagtggtggggactgcaaagcaaagtagaaaacttcattcaaaagcaagaaaaacggatatttacaaacttccatcgccagcttttttgttggattgacaagtggatcgatctcacgatggaagacattaggagaatggaagacgagactcagaaagaactagaaacaatgcgtaagaggggttccgttcgaggcacgtcggctgctgatgtctagatgagtcccctgtagggtcagagacaatgtcaaactgtttacgtaatcaaggtcaagtgaggggaacaagcgcagccagtgatgagtgaagaagaatctgaccagtatcttgcagtgttgacgtttcccagatgtgtgcttgtgatgatacacacacatgcacaggttctcaaccacgtgtgtatatatgtatgtgtgcatatgtctgtagctgtatataaagcgcatgtagagctacagatccagatacacacacttgtgtatatatgtacatacagacatactgaagggattagtacaatttctccaaagtactgtacctatcttcagcaagaatgcaaaagaaaatattttcaatatatatacctggaacagattttaataattatcagagtaataccattaatggacaaattgactgcaatgtaatactagctggtatgtttcataaatgtcaagctgtggaccaacatatatagccttttattatttttctcttcttttaagtcagtctgttataaatttttttttagtcccataagcagtagactcccacagaaaatttcttcaaaattttttggtgttccaatgaatctgggatgtaaactctgaatgtatttataactatttatttctggatggtcattatcttgtagccaaatttgacaatataaagtaaggagcaaagttacaggccagtttttacttgtttgccctgagggaaaaatccttttaaaaaaaatttctggtttttattggatttttgtattttaaatttcaaatatttttctacatcaaacctagcaaaaatggagatgacggtttctgatttataataaatactagacagttttcaggctcctgttagacaaacacattgatgaagaaattagtcttaataggattgtaggctgtgtagaaaagttggaaatatagcacttcatggagtcttgttttgaagatgacagttttctgtaactacagcttggaaactatgcaaatggtctagattcctcagagctcacatgataggatatagttagtgatgacattttgctcttcttgtgggaacacacacttcaaggaggagatagtgactttgagataggaacagtttaagatgcagtgtgagtctggcctgcgtgcggtgaggaggccccgccaagagactggtggacatctgactgtgggatgtgctctcaagtaggacgtcatcaggacagattctgaataggcatcatgagagtgctggtcagaaacggctgccactttttttaatttaattttattttttatttaaaggaaggaacaatagctaggtaagatttttatcagctttctctgtctgaatccagtttttcctctgtcagtcctggaagcttgaatagaattatattgttgaagccttcaggtcacaaactgtcttttgtaacctcctgtccctcctaaaacacgccaacccctgcagtcaaatcacattagtaatctgatttgctgacagtcctgccctgcctgctcctcgttttcccacatgtcctgcatccctcccccactggagtgatttcagtgaatcagacaaggaaggatgtgtaggatcactactgcattgcaataccctgttatcctcagcaacaaaacccacatttcatacatcctttgtgtactcaggataaagactgatgtttactctctgggcactgttgtaagataggttttgtcagagcataatcattgtctgcaaagtgtttggtgcgaggaagattattgctaattttgtgaaataaagagtctagccctctccttttaatgaacttaactctcgctggcatctgtagtatcattgggagcttaggcgcacatggaaatgagagcccggcgcatggattttaatgtttttctaacaactgtggagatttgagggaatgtgtggtgaatgtaaaatacctagtttacttgccagtctcttgtgtaaattacagtaaaacaaagtaaatgaaatttaaacaaaaaataaatttgatcacaaaatgaaaaaaaaaaaaaaaaaaaaa

SEQ ID NO: 1001 - protein, 271 aa, Homo sapiens
MVLIKEFRVVLPCSVQEYQVGQLYSVAEASKNETGGGEGIEVLKNEPYEKDGEKGQYTHKIYHLKSKVPAFVRMIAPEGSLVFHEKAWNAYPYCRTIVTNEYMKDDFFIKIETWHKPDLGTLENVHGLDPNTWKTVEIVHIDIADRSQVEPADYKADEDPALFQSVKTKRGPLGPNWKKELANSPDCPQMCAYKLVTIKFKWWGLQSKVENFIQKQEKRIFTNFHRQLFCWIDKWIDLTMEDIRRMEDETQKELETMRKRGSVRGTSAADV

SEQ ID NO: 1002 - DNA, 2724 bp, Homo sapiens
gggcagacaacacacaaaataatgcagttgtggtgtgccatgctatgtgcacagccccttggattactttgttttaaaaagcatcagagttgggggtactttagggaaacctttgcttaccttgttttgccagtgataagagcagtgggttggagggcacttggccagttttctgttcagcttttcagtgaatgtacccctttaaggttcagacttaaacttccttaagaagtggcgttgttcatagaatcgttggactcattaatgaatcgttcaactccactcactgaagcccagacctccgtgcccaggcccaatctcgtcaggctgccagagaaagttggtgctgctcatactggtctcacagtctaagtaagtgtctgtgatgctcccaagcaaaggaaatgcaagctctggaaattcgttaatgtatttgatgtcttagtgttttagtgactagggagaccattaactagtttatcattaaccacttatcagtgtattgatgttaaagcatttccctgttagctaaaagaggcctgttcatacaagccaactggtatatacgtgtggttcatccatcatctgctgcacatagcagactagaattctgggaaccctgtgcaattcagtctgctctcccttgtggaccctggtaaagaaaagcctcagctcatagtgaacacagcagacctagaaatgtagcagcagcctactgagtagctttcatttactgatcatctgctgtgactgtggccctgtctggaggttcctaggttttgagatttagagcaatgcattctggagacagaaccagcagaacagccatttttcaatttttctttaaatcagtattccatcaggcagataactgctgtattcatgaatcttgagagtgtccctgagacagaattaatggtcatttgggaaaactatcgccatggcttcccatctgtggttttcctctaaaagccttggagattagcccttccttgccagtgagaacggtgaccgcctcctgctctgcacggtctgcggcagttgccgcttctggttaggtgtgtcaggttggcttattttgggttcaggcctggcgtagcacccacaagtggcagacatatcacaagagtccccagactctgcctagaaacagtgtttgccctttggccagtgacgtggttcatcccggcccatgttgagccatgagtggagtttccagcagagggaggaatgtgtgccttgttcaaggagggcacgacccttaggcctttttcaaccagatttagctgaagggcttgacacctttgaattacagcagttgactcagagtgcaagaagtctggccattttggaaagcaaggtttcctttcagccctgtctactgaccaataccccgactcaccttgtgtggcgcacttcagaatcagatatacctagagtatacctgtggtttggttttataattaatcagctcgttacttcagcccatgaaaatggcatccagggctgccaggagattcagagctcaaaacaaggcgagcttgagttctgcactccagatgtgtgccaaaactagtaaaacttaacggacttacaaccttgtcagtttttttaatgaggcagggatactctgtttttcacactaaacatatgaatgcagcactgctgcctcagctcagcttcgtgcctgggttccccactggtctgggaagactgttgtgctccatagagcagtgcacatctgacccagagggtgggtgttcataactgctacttgctctgctctaccatgtttaaagaaatatttggatgttaaattaactcactatggtttttcacctgggaaggaaacaaattacgtactagagggcattgattggttaaaaacttgtgtatcccgggaaggacctgcggtacaggagtcagccatgtctgtgctgtgtggaaccacctgatgacatggttaacgaggaagacgatgtgttgaccggctgccgtttgaggactttggtcacccagactagacaccttctgtgctcatgtttggaaagctgaaagggaaggacagctgtgccctcctgggagctcatgtgtccctggcgctgtgctagctttcctttacagctgtttacagacaaggcaggcctgaggcagatggccactgctcttgtgatgtttgctcagaggaatatgaacattttatttttgaaaagggatgatgtggttttttgccaggtgtttataattaatcctttaatattatggttattaacctcttaaacatgaatgaattcttgattgttttaacacagtacctaagactaatgctttctgtggacaccactgagctctgcctcaactccaccctctgcgaccggaggactatgcccctagtaactgctgtcggtgtggacgctgtgctggttctgttttctaaaggagcagaaggacaggtctctgagacaggatcgttgtccctacaggaggaacagtggccttgcttcttagacggtcttcactgtgtgttttaaaacaacaacaacaacaacaacaacataaaactcttttgacctgtaacttaaagatcataaacttcaggcaataatattttctgtgtaagcttttaaaattatttttggggatcatagcttgttttattttgtgctataaaattaacagtattaaatgacttatattcttagaacaagaaaaaaaaaaaaaaaa

SEQ ID NO: 1003 - DNA, 2264 bp, Homo sapiens
ggcacgagggagcgcttgggagttaggttgtttgccggcgtagcggccagcgcctgagcccgccgttgatcttcgctgtggcatggcggacgaggggaagtcgtacagcgaacacgatgatgaacgcgttaatttccctcaaagaaagaagaaaggccggggtcccttccggtggaaatatggtgaaggaaaccgtaggtctggaagaggcggttctggtattcggtcttcccgccttgaggaagatgatggagatgtggcaatgagtgatgcccaggatggtccccgagtacgatacaacccctataccacccgacctaaccgtcggggtgatacttggcatgatcgagatcgcattcatgttactgtgcggagagacagagctcctccagagagaggaggggctggcaccagccaggatgggacctcaaagaactggttcaagattacaattccttatggcagaaagtatgacaaggcatggctcctgagcatgattcagagcaagtgcagtgtgcccttcacccctattgagtttcactatgagaatacacgggcccagttcttcgttgaagacgccagtactgcctctgcattgaaggctgtcaactataagattttggatcgggagaaccgaaggatatctatcatcatcaactcttctgctccaccccacactatactgaatgaactgaagccagaacaagtagaacagctaaagctgatcatgagcaaacgatacgatggctcccaacaagcccttgacctcaaaggcctccgttcagacccagatttggtggcccagaacattgacgttgtcctgaatcgcagaagctgtatggcagctaccctgaggatcattgaagagaacatccctgagctattgtccttgaacttgagcaacaacaggctgtacaggctggatgacatgtctagcattgttcagaaggcacccaacctgaagatcctaaacctttctggaaatgaattgaagtctgagcgggaattggacaagataaaggggctgaagctagaagagctctggctcgatggaaactccctgtgtgacaccttccgagaccagtccacctacatcagcgccattcgcgaacgatttcccaagttactacgcctggatggccatgagctacccccaccaattgcctttgatgttgaagcccccacgacgttaccgccctgcaagggaagctattttggaacagaaaacttgaagagtctggtcttgcacttcctgcaacagtactatgcaatttacgactctggagaccgacaagggctcctggatgcctaccatgatggggcctgctgttccctgagcattcctttcattcctcagaaccctgcccgaagcagcttagccgagtatttcaaggatagcagaaatgtgaagaagcttaaagaccctaccttgcggttccggctgctgaagcacacgcgtctcaacgttgttgccttcctcaatgagttgcccaaaacccagcacgacgtcaattccttcgtggtagacataagcgcccagacaagcacattgctgtgtttttctgtcaatggagtcttcaaggaagtggacggaaagtcccgggattctttgcgagccttcacccggacattcattgctgttcctgctagcaattcagggctatgtattgtaaatgatgagctatttgtgcggaatgccagttctgaagagatccaaagagccttcgctatgcctgcacccacgccttcctccagcccggtgcccaccctctctccagagcagcaggaaatgttgcaagcattctctacccagtctggcatgaacctcgagtggtcccagaagtgccttcaggacaacaactgggactacaccagatctgcccaggccttcactcatctcaaggccaagggcgagatcccagaagtggcattcatgaagtgatcgtagtcatgcctcagaagcagtcccccctgtaaatagtccttggatattaccgtctggttgtcgtctgtcatctcctcctgtctggcccgaggccgccccgtgactgtgaccgagggagggagggctgcctgatccctctcctcgcctgccttctggaagacttcagaagattgagcctcactggtgccaggaagccaaagcttactttgtagaactgacactaaactacccgaaggacttaggtgctttgtgtacttaaccccaggacctccttactttttaatataaagagtgatgttgtaaaaaaaaaaaaaaaaaa

SEQ ID NO: 1004 - protein, 619 aa, Homo sapiens
MADEGKSYSEHDDERVNFPQRKKKGRGPFRWKYGEGNRRSGRGGSGIRSSRLEEDDGDVAMSDAQDGPRVRYNPYTTRPNRRGDTWHDRDRIHVTVRRDRAPPERGGAGTSQDGTSKNWFKITIPYGRKYDKAWLLSMIQSKCSVPFTPIEFHYENTRAQFFVEDASTASALKAVNYKILDRENRRISIIINSSAPPHTILNELKPEQVEQLKLIMSKRYDGSQQALDLKGLRSDPDLVAQNIDVVLNRRSCMAATLRIIEENIPELLSLNLSNNRLYRLDDMSSIVQKAPNLKILNLSGNELKSERELDKIKGLKLEELWLDGNSLCDTFRDQSTYISAIRERFPKLLRLDGHELPPPIAFDVEAPTTLPPCKGSYFGTENLKSLVLHFLQQYYAIYDSGDRQGLLDAYHDGACCSLSIPFIPQNPARSSLAEYFKDSRNVKKLKDPTLRFRLLKHTRLNVVAFLNELPKTQHDVNSFVVDISAQTSTLLCFSVNGVFKEVDGKSRDSLRAFTRTFIAVPASNSGLCIVNDELFVRNASSEEIQRAFAMPAPTPSSSPVPTLSPEQQEMLQAFSTQSGMNLEWSQKCLQDNNWDYTRSAQAFTHLKAKGEIPEVAFMK

SEQ ID NO: 1005 - DNA, 3028 bp, Homo sapiens
ctcgtcgccgccgccattttagctgttggttccggccgcaccgtgtgggctgtagtagcgggaggggtgggggtcctccagagttaagtggctgtcctcgactgtgcccatacagcagccagctttcttccttaataactgcccgttcgaagagtgcgaggatgtccaagcggcaccggttggacctaggggaggattacccctctggcaagaagcgtgcggggaccgatgggaaggatcgagatcgagaccgggatcgtgaagatcggtctaaagatcgagaccgagaacgtgatagaggagatagagagcgagagagggagaaagaaaaggagaaggagttgcgagcttcaacaaatgctatgcttatcagtgctggattaccacccctgaaagcttcccattcagctcactcaacccactcagcacattcaacgcattctacacattctgctcattcaacgcatgccggacatgcaggtcacacgtcacttccacagtgcattaatccgttcaccaacttaccccatactcctcgatactatgatattctaaagaaacgtcttcagctccctgtttgggaatacaaggataggtttacagatattctgggtagacatcagtcctttgtactggttggtgagactgggtctggtaaaacaacacaaattccacaccggtgtgtggagtacatgcgatcattaccaggacccaagagaggagttgcctgtacccaacccaggagagtggctgcaatgagtgtggctcagagagttgctgatgagatggatgtgatgttgggccaggaagttggttactccattcgatttgaagactgcagtagtgcaaaaacattttttatgtatatgactgatgggatgttacttcgtgaagctatgaatgatcccctcctggagcgttatggtgtaataattcttgatgaggctcatgagaggacactggctacagatattctaatgggtgttctgaaggaagttgtaagacagagatcagatttaaaggttatagttatgagcgctactctagatgcaggaaaattccagatttactttgataactgtcctctcctaactattcctgggcgtacacatcctgttgagatcttctatactccagaaccagagagagattatcttgaagcagcaattcgaacagttatccagattcatatgtgtgaagaggaagagggagatcttcttcttttcttaactggtcaagaggaaattgatgaagcctgtaagagaataaagcgtgaagttgatgatttgggccctgaagttggtgacattaaaatcattccattgtattctacacttccacctcagcagcagcaacgcatttttgagcctccacctcccaaaaaacagaatggagcaattggaagaaaggtagttgtgtcaactaacatagcagagacgtctttgacaatagatggtgtggtgtttgtgattgatcctggatttgcgaaacagaaggtctacaatcctcgaatcagagttgagtcccttttggtgacagctattagtaaagcttcagctcagcaaagggctggtcgagctggacgtaccagacctggaaaatgcttcagactttacacagagaaagcttataaaacagaaatgcaggataacacctatcctgagattttgcgttctaatttaggatcagttgtgttacaattgaagaaacttggtattgatgacttggtacattttgattttatggatccaccagctcctgaaactctgatgagagccctggaacttttgaattacctggctgctttaaatgatgatggagatctgactgaattgggatccatgatggcagagtttcctctagatccacagctcgcaaaaatggttattgcaagttgtgactacaactgttctaatgaggtcctatctattactgctatgttgtcagtcccacagtgttttgttcgccccacggaggccaagaaagccgcagatgaggccaagatgagatttgcccacatagatggagatcatctgacactgctgaacgtctaccatgcttttaaacaaaatcatgaatcggttcagtggtgttatgacaacttcattaactacaggtccctgatgtccgcggacaatgtacgccagcagctatctcgaattatggacagatttaatttgcctcgtcgaagtactgactttacaagcagggactattatattaatataagaaaagctttggttactgggtattttatgcaggtggcacatttagaacgaacagggcattacttaactgtgaaagataaccaggtggttcagttgcatccctctactgttcttgaccacaaacctgaatgggtgctttataatgagtttgttctaacaacaaagaattacatccggacatgtacagacatcaagccagaatggttggtgaaaattgcccctcaatattatgacatgagcaatttcccacagtgtgaagcaaagagacagttggaccgcatcattgcccaaacttcaatccaaggaatattcacagtactgaattcagtgcttagaactgaagttattgagaggacagctttaaaagatgaatgaactcaaaagttcgagttgtgctcttcacgttggttcgataatggcctttatttgaaagctttttaatttttctttacagtaaatattccattctgatttcataaattaaacatttatgcctcccttttgtgttgacactgtagctcatactggaaaagtcgatcaatgttttgcagtttattgaaagtagttctatatataacaatgttataagcatttctttagaaatggttgaaaatgcttctaaaatgtgattatcgaccatggtatgcatgatcgttgtaattgttgacattccttttagaagttgtgaaatgttacaacttgtgcttatgtagacacaattttttgtttcagtaccagaggcactgacttcaataaagtttatttatacggaaaaaaaaaaaaaaaaaaaaaaaaaaaaa

SEQ ID NO: 1006 - protein, 813 aa, Homo sapiens
MSKRHRLDLGEDYPSGKKRAGTDGKDRDRDRDREDRSKDRDRERDRGDREREREKEKEKELRASTNAMLISAGLPPLKASHSAHSTHSAHSTHSTHSAHSTHAGHAGHTSLPQCINPFTNLPHTPRYYDILKKRLQLPVWEYKDRFTDILGRHQSFVLVGETGSGKTTQIPHRCVEYMRSLPGPKRGVACTQPRRVAAMSVAQRVADEMDVMLGQEVGYSIRFEDCSSAKTFFMYMTDGMLLREAMNDPLLERYGVIILDEAHERTLATDILMGVLKEVVRQRSDLKVIVMSATLDAGKFQIYFDNCPLLTIPGRTHPVEIFYTPEPERDYLEAAIRTVIQIHMCEEEEGDLLLFLTGQEEIDEACKRIKREVDDLGPEVGDIKIIPLYSTLPPQQQQRIFEPPPPKKQNGAIGRKVVVSTNIAETSLTIDGVVFVIDPGFAKQKVYNPRIRVESLLVTAISKASAQQRAGRAGRTRPGKCFRLYTEKAYKTEMQDNTYPEILRSNLGSVVLQLKKLGIDDLVHFDFMDPPAPETLMRALELLNYLAALNDDGDLTELGSMMAEFPLDPQLAKMVIASCDYNCSNEVLSITAMLSVPQCFVRPTEAKKAADEAKMRFAHIDGDHLTLLNVYHAFKQNHESVQWCYDNFINYRSLMSADNVRQQLSRIMDRFNLPRRSTDFTSRDYYINIRKALVTGYFMQVAHLERTGHYLTVKDNQVVQLHPSTVLDHKPEWVLYNEFVLTTKNYIRTCTDIKPEWLVKIAPQYYDMSNFPQCEAKRQLDRIIAQTSIQGIFTVLNSVLRTEVIERTALKDE

SEQ ID NO: 1007 - DNA, 1607 bp, Homo sapiens
ggcacgaggcggctccctcccggaaagcgagcgtatctcccgagccgttgccactgacagccgcgggcgctcccatctgagtaagagccagcccgtccgcggcctctccagccccgggttcgcgctctcgactctcctgcctgcccagctgcgcggcggagcggagcgaggcgcggcctgcgagtccccggcagcccccgacccctccctcggcgctgcgtgtaggccgcgccctcaggcccagtccgcggtgccccggcgggtgatgccaaatacagccatgaagaaaaaggtgctgctgatggggaagagcgggtcggggaagaccagcatgaggtcgataatcttcgccaattacattgctcgcgacacccggcgcctgggggccaccattgacgtggaacactcccacgtccgattcctagggaacctggtgctgaacctgtgggactgtggcggtcaggacaccttcatggaaaattacttcaccagccagcgagacaatatcttccgtaacgtggaagttttgatttacgtgtttgacgtggagagccgcgaactggaaaaggacatgcattattaccagtcgtgtctggaggccatcctccagaactctcctgacgccaaaatcttctgcctggtgcacaaaatggatctggttcaggaggatcagcgtgacctgatttttaaagagcgagaggaagacctgaggcgtctgtctcgcccgctggagtgtgcttgttttcgaacgtccatctgggatgagacgctctacaaagcctggtccagcatcgtctaccagctgattcccaacgttcagcagctggagatgaacctcaggaattttgcccaaatcattgaggccgatgaagttctgctgttcgaaagagctacattcttggttatttcccactaccagtgcaaagagcagcgcgacgtccaccggtttgagaagatcagcaacatcatcaaacagttcaagctgagctgcagtaaattggccgcttccttccagagcatggaagttaggaattccaacttcgctgctttcatcgacatcttcacctcaaatacgtacgtgatggtggtcatgtcagatccgtcgatcccttctgcggccactctgatcaacattcgcaatgcccggaaacactttgagaagctggagagagtggatggccccaagcacagtctccttatgcgttgaatattgccaaatgctctttctgaaaatgctgaattgccttttttgtttgcatcctttatttttaatattcataatgtcgtgtgcttaaaagtgggctttgaagtgtgtgctgcttactcctttcatctttctccccgcttccccagtctttaaacattggacgctatttactcagctacccagtagagcttgaagctgacctttctgagaagttggtatggtgtaacactaaagtaggtggttcgtgtgtgttctcattacctggttatgatagatatgcacatcaaagcctttaccagtatcttcctgtattccgtatcagattgcaaagacggaatgttactattttatcagcaaggtattaaaatgcatttataaattcaaaaaaaaaaaaaaaaaa

SEQ ID NO: 1008 - protein, 313 aa, Homo sapiens
MPNTAMKKKVLLMGKSGSGKTSMRSIIFANYIARDTRRLGATIDVEHSHVRFLGNLVLNLWDCGGQDTFMENYFTSQRDNIFRNVEVLIYVFDVESRELEKDMHYYQSCLEAILQNSPDAKIFCLVHKMDLVQEDQRDLIFKEREEDLRRLSRPLECACFRTSIWDETLYKAWSSIVYQLIPNVQQLEMNLRNFAQIIEADEVLLFERATFLVISHYQCKEQRDVHRFEKISNIIKQFKLSCSKLAASFQSMEVRNSNFAAFIDIFTSNTYVMVVMSDPSIPSAATLINIRNARKHFEKLERVDGPKHSLLMR

SEQ ID NO: 1009 - DNA, 3780 bp, Homo sapiens
tgtgtctgagcctgtggagcgattaaaccgtgcgcggagctgcttctttggcggcagcggcggcggcggtggccggtgcggacgcgcggagctcgccggagacgccgggtggccggagccgtggagcggcggcggagcgggcgccgcggggggtgtggcgcggagaatgattacggacctgaagccaaagaacaagatgcgctagtggacagattgctgaccaggggcttgagagctgggttctattttccctcctcaaactgactttgcagccacggagaggcaggggaaatggaaggtgatgcagtcgaagccattgtggaggagtccgaaacttttattaaaggaaaggagagaaagacttaccagagacgccgggaagggggccaggaagaagatgcctgccacttaccccagaaccagacggatgggggtgaggtggtccaggatgtcaacagcagtgtacagatggtgatgatggaacagctggaccccacccttcttcagatgaagactgaagtaatggagggcacagtggctccagaagcagaggctgctgtggacgatacccagattataactttacaggttgtaaatatggaggaacagcccataaacataggagaacttcagcttgttcaagtacctgttcctgtgactgtacctgttgctaccacttcagtagaagaacttcagggggcttatgaaaatgaagtgtctaaagagggccttgcggaaagtgaacccatgatatgccacaccctacctttgcctgaagggtttcaggtggttaaagtgggggccaatggagaggtggagacactagaacaaggggaacttccaccccaggaagatcctagttggcaaaaagacccagactatcagccaccagccaaaaaaacaaagaaaaccaaaaagagcaaactgcgttatacagaggagggcaaagatgtagatgtgtctgtctacgattttgaggaagaacagcaggagggtctgctatcagaggttaatgcggagaaagtggttggtaatatgaagcctccaaagccaacaaaaattaaaaagaaaggtgtaaagaagacattccagtgtgagctttgcagttacacgtgtccacggcgttcaaatttggatcgtcacatgaaaagccacactgatgagagaccacacaagtgccatctctgtggcagggcattcagaacagtcaccctcctgaggaatcaccttaacacacacacaggtactcgtcctcacaagtgcccagactgcgacatggcctttgtgaccagtggagaattggttcggcatcgtcgttacaaacacacccacgagaagccattcaagtgttccatgtgcgattacgccagtgtagaagtcagcaaattaaaacgtcacattcgctctcatactggagagcgtccgtttcagtgcagtttgtgcagttatgccagcagggacacatacaagctgaaaaggcacatgagaacccattcaggggaaaagccttatgaatgttatatttgtcatgctcggtttacccaaagtggtaccatgaagatgcacattttacagaagcacacagaaaatgtggccaaatttcactgtccccactgtgacacagtcatagcccgaaaaagtgatttgggtgtccacttgcgaaagcagcattcctatattgagcaaggcaagaaatgccgttactgtgatgctgtgtttcatgagcgctatgccctcatccagcatcagaagtcacacaagaatgagaagcgctttaagtgtgaccagtgtgattacgcttgtagacaggagaggcacatgatcatgcacaagcgcacccacaccggggagaagccttacgcctgcagccactgcgataagaccttccgccagaagcagcttctcgacatgcacttcaagcgctatcacgaccccaacttcgtccctgcggcttttgtctgttctaagtgtgggaaaacatttacacgtcggaataccatggcaagacatgctgataattgtgctggcccagatggcgtagagggggaaaatggaggagaaacgaagaagagtaaacgtggaagaaaaagaaagatgcgctctaagaaagaagattcctctgacagtgaaaatgctgaaccagatctggacgacaatgaggatgaggaggagcctgccgtagaaattgaacctgagccagagcctcagcctgtgaccccagccccaccacccgccaagaagcggagaggacgaccccctggcagaaccaaccagcccaaacagaaccagccaacagctatcattcaggttgaagaccagaatacaggtgcaattgagaacattatagttgaagtaaaaaaagagccagatgctgagcccgcagagggagaggaagaggaggcccagccagctgccacagatgcccccaacggagacctcacgcccgagatgatcctcagcatgatggaccggtgatggcggagccttgtgcgtcgccaggacttctctgggctgtgtttaaacggcccgcatcttaatttttctcccttctttctttttttggctttgggaaaagcatcattttaccaaacataccgagaacgaaaacttcaaggatgatgttagaaaaaaatgtgatttaactagaacttgctgtctgatgttagcaaatcatggaatgttctgagtccctgagggtttactgtgaagtgctgaggacagtgttgacaactaactcgttttcctagatggaaacggagacattgacccctccctccatgtggtaaaccactccagaatggccaccaggcttcccagagttctatggtcttcttcccaagagagtttttaattgtaaatgcatacttgggaaggacttagagttttaaactgttttttgcttttgcttttccctgactccctttgcttggagtcagctgcacaccagtagtatggcatgctacgatcaggttctgtcctgaaagctttgcctctttcttggcaaagtttctggtatggtcaagcttgtaaataactttttttacattttaatcttttccattaattaagaggttgaaaagaagtgcagtgtaagaaaacccagcattttaattacttgcaaattaagttaccacagactctgtagtgtgtaaatgttgacaaggaattggatcacaatcatgtagcagaatggcacccagaccactgcccaccagtgacggacatgcacgtggcagatcatgatttccagcccacggagccagcatttgaaccttgtataattaactttcagttatgatttcccatcgacattttctttgccctgtttgtagctgattgttgtgttttataaatcttctgttaaggcagaagggtgattatgagtggttcacagcagcccttataagctgggccagaaaatttcactaggtcagtaatttaaaccttggatcttcaaaaaataaaataatgtgaagcaaaaccaactaaaaagtgattcttgcacatgaactgtcacatgtttaaaaatgtgttttttagagagcctcagtcttactgatttcaaacacttttttcttctgtgtattgcttttaagagagccatcagttagctatcagactctaggttgatgcattttgtacttagctgtactgtgtgatatttttcattattttaggacgccaacatgagacctgtaataaaatatgtaatggggttgaaagctggggaggaggatctactgctgtacagctaataaatcataacggattaacaagtga

SEQ ID NO: 1010 - protein, 727 aa, Homo sapiens
MEGDAVEAIVEESETFIKGKERKTYQRRREGGQEEDACHLPQNQTDGGEVVQDVNSSVQMVMMEQLDPTLLQMKTEVMEGTVAPEAEAAVDDTQIITLQVVNMEEQPINIGELQLVQVPVPVTVPVATTSVEELQGAYENEVSKEGLAESEPMICHTLPLPEGFQVVKVGANGEVETLEQGELPPQEDPSWQKDPDYQPPAKKTKKTKKSKLRYTEEGKDVDVSVYDFEEEQQEGLLSEVNAEKVVGNMKPPKPTKIKKKGVKKTFQCELCSYTCPRRSNLDRHMKSHTDERPHKCHLCGRAFRTVTLLRNHLNTHTGTRPHKCPDCDMAFVTSGELVRHRRYKHTHEKPFKCSMCDYASVEVSKLKRHIRSHTGERPFQCSLCSYASRDTYKLKRHMRTHSGEKPYECYICHARFTQSGTMKMHILQKHTENVAKFHCPHCDTVIARKSDLGVHLRKQHSYIEQGKKCRYCDAVFHERYALIQHQKSHKNEKRFKCDQCDYACRQERHMIMHKRTHTGEKPYACSHCDKTFRQKQLLDMHFKRYHDPNFVPAAFVCSKCGKTFTRRNTMARHADNCAGPDGVEGENGGETKKSKRGRKRKMRSKKEDSSDSENAEPDLDDNEDEEEPAVEIEPEPEPQPVTPAPPPAKKRRGRPPGRTNQPKQNQPTAIIQVEDQNTGAIENIIVEVKKEPDAEPAEGEEEEAQPAATDAPNGDLTPEMILSMMDR

SEQ ID NO: 1011 - DNA, 3327 bp, Homo sapiens
ccgggcggggggttgcggcgctcaggagaggccccggctccgccccgggcctgcccagggggagagcggagctccgcagccgggtcgggtcggggcccctcccgggaggagcgtggagcgcggcggcggcggcggcagcagaaatgatggaagaattgcatagcctggacccacgacggcaggaattattggaggccaggtttactggagtaggtgttagtaagggaccacttaatagtgagtcttccaaccagagcttgtgcagcgtcggatccttgagtgataaagaagtagagactcccgagaaaaagcagaatgaccagcgaaatcggaaaagaaaagctgaaccatatgaaactagccaagggaaaggcactcctaggggacataaaattagtgattactttgagtttgctgggggaagcgcgccaggaaccagccctggcagaagtgttccaccagttgcacgatcctcaccgcaacattccttatccaatcccttaccgcgacgagtagaacagcccctctatggtttagatggcagtgctgcaaaggaggcaacggaggagcagtctgctctgccaaccctcatgtcagtgatgctagcaaaacctcggcttgacacagagcagctggcgcaaaggggagctggcctctgcttcacttttgtttcagctcagcaaaacagtccctcatctacgggatctggcaacacagagcattcctgcagctcccaaaaacagatctccatccagcacagacggacccagtccgacctcacaatagaaaaaatatctgcactagaaaacagtaagaattctgacttagagaagaaggagggaagaatagatgatttattaagagccaactgtgatttgagacggcagattgatgaacagcaaaagatgctagagaaatacaaggaacgattaaatagatgtgtgacaatgagcaagaaactccttatagaaaagtcaaaacaagagaagatggcgtgtagagataagagcatgcaagaccgcttgagactgggccactttactactgtccgacacggagcctcatttactgaacagtggacagatggttatgcttttcagaatcttatcaagcaacaggaaaggataaattcacagagggaagagatagaaagacaacggaaaatgttagcaaagcggaaacctcctgccatgggtcaggcccctcctgcaaccaatgagcagaaacagcggaaaagcaagaccaatggagctgaaaatgaaacgttaacgttagcagaataccatgaacaagaagaaatcttcaaactcagattaggtcatcttaaaaaggaggaagcagagatccaggcagagctggagagactagaaagggttagaaatctacatatcagggaactaaaaaggatacataatgaagataattcacaatttaaagatcatccaacgctaaatgacagatatttgttgttacatcttttgggtagaggaggtttcagtgaagtttacaaggcatttgatctaacagagcaaagatacgtagctgtgaaaattcaccagttaaataaaaactggagagatgagaaaaaggagaattaccacaagcatgcatgtagggaataccggattcataaagagctggatcatcccagaatagttaagctgtatgattacttttcactggatactgactcgttttgtacagtattagaatactgtgagggaaatgatctggacttctacctgaaacagcacaaattaatgtcggagaaagaggcccggtccattatcatgcagattgtgaatgctttaaagtacttaaatgaaataaaacctcccatcatacactatgacctcaaaccaggtaatattcttttagtaaatggtacagcgtgtggagagataaaaattacagattttggtctttcgaagatcatggatgatgatagctacaattcagtggatggcatggagctaacatcacaaggtgctggtacttattggtatttaccaccagagtgttttgtggttgggaaagaaccaccaaagatctcaaataaagttgatgtgtggtcggtgggtgtgatcttctatcagtgtctttatggaaggaagccttttggccataaccagtctcagcaagacatcctacaagagaatacgattcttaaagctactgaagtgcagttcccgccaaagccagtagtaacacctgaagcaaaggcgtttattcgacgatgcttggcctaccgaaagagggaccgcattgatgtccagcagctggcctgtgatccctacttgttgcctcacatccgaaagtcagtctctacaagtagccctgctggagctgctattgcatcaacctctggggcgtccaataacagttcttctaattgagactgactccaaggccacaaactgttcaacacacacaaagtggacaaatggcgttcagcagcgggtttggaacatagcgaatccgaatggatctgatgaaacctgtaccaggtgcttttattttcttgcttttttcccatccatagagcatgacagcatcgattctcattgaggagaaaccttgggcagctccggccaggccttgtaggaaaaggccccgcccgaggttccagcgtcaacggccactgtgtgtggctgctctgagtgaggaaaaaattaaaaagaaaaactggttccatgtactgtgaacttgaaaacttgcagactcaggggggtccctgatgcagtgcttcagatgaagaatgtggacttgaaaatacagactgggctagtccagtgtctatatttaaacttgttcttttcttttaataaagtttaggtaacatctcctgaaaagcttgtagcacaaaggctcagctggggatggtgtttgacttcggaggaaaaaagttgctattgcccgttaaaggcactagagttagtgttttatccctaaataatttcaatttttaaaaacatgcagcttccctctccccttttttatttttgaaagaatacatttggtcataaagtgaaacccgtattagcaagtacgaggcaatgttcattccaatcagatgcagctttctcctccgtctggtctcctgtttgcaattgcttccctcatctcagtagggaaaaaattgagtgggagtactgagatgtgtgggtttttgccattggacaaagaatgaggttagaagactgcagcttggagtctctctaggttttcaactatttcttcacaatttgaacacttgacggttgtcccttttaatttatttgaagtgctatttttttaaataaaggttcatctgtccatgcaaaaaaa

SEQ ID NO: 1012 - protein, 749 aa, Homo sapiens
MEELHSLDPRRQELLEARFTGVGVSKGPLNSESSNQSLCSVGSLSDKEVETPEKKQNDQRNRKRKAEPYETSQGKGTPRGHKISDYFEFAGGSAPGTSPGRSVPPVARSSPQHSLSNPLPRRVEQPLYGLDGSAAKEATEEQSALPTLMSVMLAKPRLDTEQLAQRGAGLCFTFVSAQQNSPSSTGSGNTEHSCSSQKQISIQHRRTQSDLTIEKISALENSKNSDLEKKEGRIDDLLRANCDLRRQIDEQQKMLEKYKERLNRCVTMSKKLLIEKSKQEKMACRDKSMQDRLRLGHFTTVRHGASFTEQWTDGYAFQNLIKQQERINSQREEIERQRKMLAKRKPPAMGQAPPATNEQKQRKSKTNGAENETLTLAEYHEQEEIFKLRLGHLKKEEAEIQAELERLERVRNLHIRELKRIHNEDNSQFKDHPTLNDRYLLLHLLGRGGFSEVYKAFDLTEQRYVAVKIHQLNKNWRDEKKENYHKHACREYRIHKELDHPRIVKLYDYFSLDTDSFCTVLEYCEGNDLDFYLKQHKLMSEKEARSIIMQIVNALKYLNEIKPPIIHYDLKPGNILLVNGTACGEIKITDFGLSKIMDDDSYNSVDGMELTSQGAGTYWYLPPECFVVGKEPPKISNKVDVWSVGVIFYQCLYGRKPFGHNQSQQDILQENTILKATEVQFPPKPVVTPEAKAFIRRCLAYRKRDRIDVQQLACDPYLLPHIRKSVSTSSPAGAAIASTSGASNNSSSN

SEQ ID NO: 1013 - DNA, 2513 bp, Homo sapiens
cgcgcagcgatggaggcgccggggctcgggcggtggaggcggagccggagcgcggccatggcggggtccctgagtgccagaggtggtggtgttgcttatcttctggaaccccatgcagccagatcccaggcctagcggggctggggcctgctgccgattcctgcccctgcagtcacagtgccctgagggggcaggggacgcggtgatgtacgcctccactgagtgcaaggcggaggtgacgccctcccagcatggcaaccgcaccttcagctacaccctggaggatcataccaagcaggcctttggcatcatgaacgagctgcggctcagccagcagctgtgtgacgtcacactgcaggtcaagtaccaggatgcaccggccgcccagttcatggcccacaaggtggtgctggcctcatccagccctgtcttcaaggccatgttcaccaacgggctgcgggagcagggcatggaggtggtgtccattgagggtatccaccccaaggtcatggagcgcctcattgaattcgcctacacggcctccatctccatgggcgagaagtgtgtcctccacgtcatgaacggtgctgtcatgtaccagatcgacagcgttgtccgtgcctgcagtgacttcctggtgcagcagctggaccccagcaatgccatcggcatcgccaacttcgctgagcagattggctgtgtggagttgcaccagcgtgcccgggagtacatctacatgcattttggggaggtggccaagcaagaggagttcttcaacctgtcccactgccaactggtgaccctcatcagccgggacgacctgaacgtgcgctgcgagtccgaggtcttccacgcctgcatcaactgggtcaagtacgactgcgaacagcgacggttctacgtccaggcgctgctgcgggccgtgcgctgccactcgttgacgccgaacttcctgcagatgcagctgcagaagtgcgagatcctgcagtccgactcccgctgcaaggactacctggtcaagatcttcgaggagctcaccctgcacaagcccacgcaggtgatgccctgccgggcgcccaaggtgggccgcctgatctacaccgcgggcggctacttccgacagtcgctcagctacctggaggcttacaaccccagtgacggcacctggctccggttggcggacctgcaggtgccgcggagcggcctggccggctgcgtggtgggcgggctgttgtacgccgtgggcggcaggaacaactcgcccgacggcaacaccgactccagcgccctggactgttacaaccccatgaccaatcagtggtcgccctgcgcccccatgagcgtgccccgtaaccgcatcggggtgggggtcatcgatggccacatctatgccgtcggcggctcccacggctgcatccaccacaacagtgtggagaggtatgagccagagcgggatgagtggcacttggtggccccaatgctgacacgaaggatcggggtgggcgtggctgtcctcaatcgtctcctttatgccgtggggggctttgacgggacaaaccgccttaattcagctgagtgttactacccagagaggaacgagtggcgaatgatcacagcaatgaacaccatccgaagcggggcaggcgtctgcgtcctgcacaactgtatctatgctgctgggggctatgatggtcaggaccagctgaacagcgtggagcgctacgatgtggaaacagagacgtggactttcgtagcccccatgaagcaccggcgaagtgccctggggatcactgtccaccaggggagaatctacgtccttggaggctatgatggtcacacgttcctggacagtgtggagtgttacgacccagatacagacacctggagcgaggtgacccgaatgacatcgggccggagtggggtgggcgtggctgtcaccatggagccctgccggaagcagattgaccagcagaactgtacctgttgaggcacttttgtttcttgggcaaaaatacagtccaatggggagtatcattgtttttgtacaaaaaccgggactaaaagaaaagacagcactgcaaataacccatcttccgggaagggaggccaggatgcctcagtgttaaaatgacatctcaaaagaagtccaaagcgggaatcatgtgcccctcagcggagccccgggagtgtccaagacagcctggctgggaaagggggtgtggaaagagcaggcttccaggagagaggcccccaaaccctctggccgggtaataggcctgggtcccactcacccatgccggcagctgtcaccatgtgatttattcttggatacctgggagggggccaatgggggcctcagggggaggccccctctggaaatgtggttcccagggatgggcctgtacatagaagccaccggatggcacttccccaccggatggacagttattttgttgataagtaaccctgtaattttccaaggaaaataaagaacagactaactagtgtctttc

SEQ ID NO: 1014 - protein, 624 aa, Homo sapiens
MQPDPRPSGAGACCRFLPLQSQCPEGAGDAVMYASTECKAEVTPSQHGNRTFSYTLEDHTKQAFGIMNELRLSQQLCDVTLQVKYQDAPAAQFMAHKVVLASSSPVFKAMFTNGLREQGMEVVSIEGIHPKVMERLIEFAYTASISMGEKCVLHVMNGAVMYQIDSVVRACSDFLVQQLDPSNAIGIANFAEQIGCVELHQRAREYIYMHFGEVAKQEEFFNLSHCQLVTLISRDDLNVRCESEVFHACINWVKYDCEQRRFYVQALLRAVRCHSLTPNFLQMQLQKCEILQSDSRCKDYLVKIFEELTLHKPTQVMPCRAPKVGRLIYTAGGYFRQSLSYLEAYNPSDGTWLRLADLQVPRSGLAGCVVGGLLYAVGGRNNSPDGNTDSSALDCYNPMTNQWSPCAPMSVPRNRIGVGVIDGHIYAVGGSHGCIHHNSVERYEPERDEWHLVAPMLTRRIGVGVAVLNRLLYAVGGFDGTNRLNSAECYYPERNEWRMITAMNTIRSGAGVCVLHNCIYAAGGYDGQDQLNSVERYDVETETWTFVAPMKHRRSALGITVHQGRIYVLGGYDGHTFLDSVECYDPDTDTWSEVTRMTSGRSGVGVAVTMEPCRKQIDQQNCTC

SEQ ID NO: 1015 - DNA, 4106 bp, Homo sapiens
cccgggtactgccgctactgctgccggcgcgtctgcacctctcggcctgccagtgtacctgccggcgcctcggtcgaccgcccccgccccctctcccgctgcgtccgcactcctgttcctggtcctgacgcccccctcccgcccggaaagctgcccagccaccagcaaccccccagtgccaccatggcaactgcaccatacaactactcttacatctttaaatatattattattggggacatgggagtaggaaaatcttgcttgcttcatcaatttacagaaaaaaaatttatggctgattgtcctcacacaattggtgttgaatttggtacaagaataatcgaagttagtggccaaaaaataaaactgcagatttgggatacggcaggacaggagcgatttagggctgttacacggagctactacagaggagctgcgggagctcttatggtctatgatatcactagaagaagtacatataaccacttaagcagctggttgacagatgcaaggaatctcaccaatccaaatactgtaataattctcataggaaataaagcagatttggaggcacagagagatgttacatatgaagaagccaaacagtttgctgaagaaaatggcttattgttcctcgaagcgagtgcaaaaacgggagagaatgtagaagatgccttccttgaggctgccaagaaaatctatcagaacattcaggatggaagcttggatctgaatgctgctgagtctggtgtacaacacaaaccttcagccccgcagggaggccggctaaccagtgaaccccaaccccagagagaaggctgtggctgctagtgacctctttgctgtggcccctcatttgacctttcacctctgtctgttggaagcagtactttttactgcctcattgtcttctgtacatcttactgggtttaattaaaaaaaaagaaaaaactctgttgtaaaaacagtttaacacaatactaaactgctaaacaactagatgtaatcaggttatcaaaggcaagtagagtaataaatctctcctgcatggtaaatctagacttttttcccccttgtcctcgtgataagtatgtcaccaatatatgatttaaaccgagcactgatgctggacttcatgatttttaccctccctttggcaaggctttgtctcactgtacggtttaatttggtgatatcttaagcctttcttcccatccttaactgttcaagtatgtctgttgtaaccaataagtttattgctgtgaaattacttctgatggtagagaaggggttctataactgcttttgttttgttttggataaatttcctgttgtgtgggtggcatttttcttaacgagatttgcttctgtcttagcctcacacagggaaaatatccatttatcttctctctcgtgcttaattaatagctttatctttttttataccattttatccttttctctttaacagaaagtaaatatgtataaaatttgaaggaatcgaactaacaatacattctgtgtatattattttaatgaagaaaataaattgattactggcattggaacagtataaaataccagtttgtacagtatgacctatatgtgaccatgttactcccttccatttcacacaaagaaatagacacaactgcagttcacaagtagtactggctccaccccttggtgctggcagtgtttggggacattatgctggaaagagctcctagcatcagaggattaacactagcagattctgttccatctttgcactgttgcttacctgctgattttcttaactgttcttgtgcaatcgacaatgtgctaacctgcttttctctttttgtaaacgtttttgcattacaggctgcattcttgccttactgtatagaaaaagaaaaaaggctgggtttactattgcacattttaagcttttatacctttatcttcttggaatggtcagattctgaactggacagtcagaaccacaggtctgctgttaagggattttaaattgtgcatttttaaccctacagtgaaataacttaagatatccctgtgttcacagtgtgaggggctgttttatgtcatgttggcataaattgttttgtaaaagggaaagtgtttctaaaggtgtttcagcgcttgtgctgatacaaagtaagttattactttgcaccaggtggtttggccactgaattaatactgtatagcaagagaaacaatcttatttttttggacaacatgttttattaagttcttcatttctgttgattttttttattgcatttatgattcagtggctgggaattgagaatttatttgaaatagaataggtaacacctcagcgtactatagaaaatgcactcagctcaactgctgtgtttaaaatacacattttaaatccctctttacagacactaacataaaagtacatctttctgggttgtaaacatgtggtagtaccagagtattgtatagtcaatgttaaataaaagccaaaactggaatgtgcagaaagtaggctttggttaatttgtggattcatttttatttttgtctttgtttaactttttaaaaaataagatttctggagtagattggtatattctgttaaagacttacagtgatccattttgcttacactgttgcatcacaagggactcacccagggaccatgacctgctggtgtgtgtgtatatttacaaaaacaaaacaaacaaaccacccattgggatataaggtagcaatcacaaactaaagactgcggcttgttgaggtgcaataccctgactcccaaagttagttacagtgggttttattgtttttgtgactgaaggatttattcagactgctgtactcttcatttgatgtaacaaaatgctattaatctaaatatttgtaaataaagtacctgtatctagattaaattaaaattggttgcattattttctgaactataatagggtttttcttcaggtgaacaatttgacgtgtcatcagtttttattgcagcactgtccatattcattgtataaagagaggtctacgtatgtagcatataaaaccacatcactaagtaatagacccacagctttattcttgtgtttacattacccttgaaatgttttcagtcaacccttttcagtgtaagatcagcacatttggtggctgatgctgttctcctttgactgtaccgggagccagattctatcatatgcatgtgtaatcccctgtaatacactcaggtgctcacaaatagagcagattgtcatattgtaacatgcgtgtgccagacaccgggcagtacactttggaaagaatgtgaaatccttttaatttttaatccatagcttactgcttgtgcagtcacctgcctcttgaggttgctcattgcccttggacctgtgaggaggccttcagattagtaattggtgcttagtactatttatgcttaaatagatcttccagtacaatgttgaagtcttttttatggataataacgtgtttgatggagtaacttattatttttttttggttggtggtttacacgttaatagaggtagtacaatttctttggaaaggtgtcttttgaagccagctgttaagcttcatacattacctcccttctcaaattcggtaagacagtagttttggggaacttttttgcccatgtgtcttttaagtgtgattttaaaaaaatgagtggttcagttcattcccctaaacagaagaaaagaccaaataattaccttccattcctcttcatgtgggaatatagagagggttcatgtggcattttagagaaaagataatttatcctcattcaacacaggcccagaaaattgtgtcccagaaggatgtcagtaattgtgactaggccaggccttttagcattttgctaagacttgaaacaaaaaatgtaaatacaaaagaaatcaagttttgttttgaaagatgccttctagaacttactgtgtattaataaattgtcactttcattgtctttattgtaactccattgatcccgtatcttaacggttcacgtctagccaaataactgttttggaataaaaaccttggtggtgaaaaaaaaaaaaaaaaag

SEQ ID NO: 1016 - protein, 215 aa, Homo sapiens
MATTPYNYSYIFKYIIIGDMGVGKSCLLHQFTEKKFMADCPHTIGVEFGTRIIEVSGQKIKLQIWDTAGQERFRAVTRSYYRGAAGALMVYDITRRSTYNHLSSWLTDARNLTNPNTVIILIGNKADLEAQRDVTYEEAKQFAEENGLLFLEASAKTGENVEDAFLEAAKKIYQNIQDGSLDLNAAESGVQHKPSAPQGGRLTSEPQPQREGCGC

SEQ ID NO: 1017 - DNA, 1280 bp, Homo sapiens
gaaagatggcgtcccgcaaggaaggtaccggctctactgccacctcttccagctccaccgccggcgcagcagggaaaggcaaaggcaaaggcggctcgggagattcagccgtgaagcaagtgcagatagatggccttgtggtattaaagataatcaaacattatcaagaagaaggacaaggaactgaagttgttcaaggagtgcttttgggtctggttgtagaagatcggcttgaaattaccaactgctttcctttccctcagcacacagaggatgatgctgactttgatgaagtccaatatcagatggaaatgatgcggagccttcgccatgtaaacattgatcatcttcacgtgggctggtatcagtccacatactatggctcattcgttacccgggcactcctggactctcagtttagttaccagcatgccattgaagaatctgtcgttctcatttatgatcccataaaaactgcccaaggatctctctcactaaaggcatacagactgactcctaaactgatggaagtttgtaaagaaaaggatttttcccctgaagcattgaaaaaagcaaatatcacctttgagtacatgtttgaagaagtgccgattgtaattaaaaattcacatctgatcaatgtcctaatgtgggaacttgaaaagaagtcagctgttgcagataaacatgaattgctcagccttgccagcagcaatcatttggggaagaatctacagttgctgatggacagagtggatgaaatgagccaagatatagttaaatacaacacatacatgaggaatactagtaaacaacagcagcagaaacatcagtatcagcagcgtcgccagcaggagaatatgcagcgccagagccgaggagaacccccgctccctgaggaggacctgtccaaactcttcaaaccaccacagccgcctgccaggatggactcgctgctcattgcaggccagataaacacttactgccagaacatcaaggagttcactgcccaaaacttaggcaagctcttcatggcccaggctcttcaagaatacaacaactaagaaaaggaagtttccagaaaagaagttaacatgaactcttgaagtcacaccagggcaactcttggaagaaatatatttgcatattgaaaagcacagaggatttctttagtgtcattgccgattttggctataacagtgtctttctagccataataaaataaaaaaaaaaaaaaaaaaaaaaaaaaaaaaaaaaaaaaaaaaaaaaaaaaaaaaaaa

SEQ ID NO: 1018 - protein, 352 aa, Homo sapiens
MASRKEGTGSTATSSSSTAGAAGKGKGKGGSGDSAVKQVQIDGLVVLKIIKHYQEEGQGTEVVQGVLLGLVVEDRLEITNCFPFPQHTEDDADFDEVQYQMEMMRSLRHVNIDHLHVGWYQSTYYGSFVTRALLDSQFSYQHAIEESVVLIYDPIKTAQGSLSLKAYRLTPKLMEVCKEKDFSPEALKKANITFEYMFEEVPIVIKNSHLINVLMWELEKKSAVADKHELLSLASSNHLGKNLQLLMDRVDEMSQDIVKYNTYMRNTSKQQQQKHQYQQRRQQENMQRQSRGEPPLPEEDLSKLFKPPQPPARMDSLLIAGQINTYCQNIKEFTAQNLGKLFMAQALQEYNN

SEQ ID NO: 1019 - DNA, 4180 bp, Homo sapiens
gcggggaagcagcagcggccaggatgaatcccaggtgctctggagctggatggtgaaggtcggcactcttcaccctcccgagccctgcccgtctcggccccatgcccccaccagtcagccccgggccacaggcagtgagcaggcacctgggagccgaggccctgtgaccaggccaaggagacgggcgctccagggtcccagccacctgtcccccccatggagctgaggccctggttgctatgggtggtagcagcaacaggaaccttggtcctgctagcagctgatgctcagggccagaaggtcttcaccaacacgtgggctgtgcgcatccctggaggcccagcggtggccaacagtgtggcacggaagcatgggttcctcaacctgggccagatcttcggggactattaccacttctggcatcgaggagtgacgaagcggtccctgtcgcctcaccgcccgcggcacagccggctgcagagggagcctcaagtacagtggctggaacagcaggtggcaaagcgacggactaaacgggacgtgtaccaggagcccacagaccccaagtttcctcagcagtggtacctgtctggtgtcactcagcgggacctgaatgtgaaggcggcctgggcgcagggctacacagggcacggcattgtggtctccattctggacgatggcatcgagaagaaccacccggacttggcaggcaattatgatcctggggccagttttgatgtcaatgaccaggaccctgacccccagcctcggtacacacagatgaatgacaacaggcacggcacacggtgtgcgggggaagtggctgcggtggccaacaacggtgtctgtggtgtaggtgtggcctacaacgcccgcattggaggggtgcgcatgctggatggcgaggtgacagatgcagtggaggcacgctcgctgggcctgaaccccaaccacatccacatctacagtgccagctggggccccgaggatgacggcaagacagtggatgggccagcccgcctcgccgaggaggccttcttccgtggggttagccagggccgaggggggctgggctccatctttgtctgggcctcggggaacgggggccgggaacatgacagctgcaactgcgacggctacaccaacagtatctacacgctgtccatcagcagcgccacgcagtttggcaacgtgccgtggtacagcgaggcctgctcgtccacactggccacgacctacagcagtggcaaccagaatgagaagcagatcgtgacgactgacttgcggcagaagtgcacggagtctcacacgggcacctcagcctctgcccccttagcagccggcatcattgctctcaccctggaggccaataagaacctcacatggcgggacatgcaacacctggtggtacagacctcgaagccagcccacctcaatgccaacgactgggccaccaatggtgtgggccggaaagtgagccactcatatggctacgggcttttggacgcaggcgccatggtggccctggcccagaattggaccacagtggccccccagcggaagtgcatcatcgacatcctcaccgagcccaaagacatcgggaaacggctcgaggtgcggaagaccgtgaccgcgtgcctgggcgagcccaaccacatcactcggctggagcacgctcaggcgcggctcaccctgtcctataatcgccgtggcgacctggccatccacctggtcagccccatgggcacccgctccaccctgctggcagccaggccacatgactactccgcagatgggtttaatgactgggccttcatgacaactcattcctgggatgaggatccctctggcgagtgggtcctagagattgaaaacaccagcgaagccaacaactatgggacgctgaccaagttcaccctcgtactctatggcaccgcccctgaggggctgcccgtacctccagaaagcagtggctgcaagaccctcacgtccagtcaggcctgtgtggtgtgcgaggaaggcttctccctgcaccagaagagctgtgtccagcactgccctccagggttcgccccccaagtcctcgatacgcactatagcaccgagaatgacgtggagaccatccgggccagcgtctgcgccccctgccacgcctcatgtgccacatgccaggggccggccctgacagactgcctcagctgccccagccacgcctccttggaccctgtggagcagacttgctcccggcaaagccagagcagccgagagtccccgccacagcagcagccacctcggctgcccccggaggtggaggcggggcaacggctgcgggcagggctgctgccctcacacctgcctgaggtggtggccggcctcagctgcgccttcatcgtgctggtcttcgtcactgtcttcctggtcctgcagctgcgctctggctttagttttcggggggtgaaggtgtacaccatggaccgtggcctcatctcctacaaggggctgccccctgaagcctggcaggaggagtgcccgtctgactcagaagaggacgagggccggggcgagaggaccgcctttatcaaagaccagagcgccctctgatgagcccactgcccaccccctcaagccaatcccctccttgggcactttttaattcaccaaagtatttttttatcttgggactgggtttggaccccagctgggaggcaagaggggtggagactgcttcccatcctaccctcgggcccacctggccacctgaggtgggcccaggaccagctggggcgtggggagggccgtaccccaccctcagcaccccttccatgtggagaaaggagtgaaacctttagggcagcttgccccggccccggccccagccagagttcctgcggagtgaagaggggcagcccttgcttgttgggattcctgacccaggccgcagctcttgcccttccctgtccctctaaagcaataatggtcccatccaggcagtcgggggctggcctaggagatatctgagggaggaggccacctctccaagggcttctgcaccctccaccctgtcccccagctctggtgagtcttggcggcagcagccatcataggaagggaccaaggcaaggcaggtgcctccaggtgtgcacgtggcatgtggcctgtggcctgtgtcccatgacccacccctgtgctccgtgcctccaccaccactggccaccaggctggcgcagccaaggccgaagctctggctgaaccctgtgctggtgtcctgaccaccctcccctctcttgcacccgcctctcccgtcagggcccaagtccctgttttctgagcccgggctgcctgggctgttggcactcacagacctggagcccctgggtgggtggtggggaggggcgctggcccagccggcctctctggcctcccacccgatgctgctttcccctgtggggatctcaggggctgtttgaggatatattttcactttgtgattatttcactttagatgctgatgatttgtttttgtatttttaatgggggtagcagctggactacccacgttctcacacccaccgtccgccctgctcctccctggctgccctggccctgaggtgtgggggctgcagcatgttgctgaggagtgaggaatagttgagccccaagtcctgaagaggcgggccagccaggcgggctcaaggaaagggggtcccagtgggaggggcaggctgacatctgtgtttcaagtggggctcgccatgccgggggttcataggtcactggctctccaagtgccagaggtgggcaggtggtggcactgagcccccccaacactgtgccctggtggagaaagcactgacctgtcatgcccccctcaaacctcctcttctgacgtgccttttgcacccctcccattaggacaatcagtcccctcccatctgggagtccccttttcttttctaccctagccattcctggtacccagccatctgcccaggggtgccccctcctctcccatccccctgccctcgtggccagcccggctggttttgtaagatgctgggttggtgcacagtgatttttttcttgtaatttaaacaggcccagcattgctggttctatttaatggacatgagataatgttagaggttttaaagtgattaaacgtgcagactatgcaaaccag

SEQ ID NO: 1020 - protein, 794 aa, Homo sapiens
MELRPWLLWVVAATGTLVLLAADAQGQKVFTNTWAVRIPGGPAVANSVARKHGFLNLGQIFGDYYHFWHRGVTKRSLSPHRPRHSRLQREPQVQWLEQQVAKRRTKRDVYQEPTDPKFPQQWYLSGVTQRDLNVKAAWAQGYTGHGIVVSILDDGIEKNHPDLAGNYDPGASFDVNDQDPDPQPRYTQMNDNRHGTRCAGEVAAVANNGVCGVGVAYNARIGGVRMLDGEVTDAVEARSLGLNPNHIHIYSASWGPEDDGKTVDGPARLAEEAFFRGVSQGRGGLGSIFVWASGNGGREHDSCNCDGYTNSIYTLSISSATQFGNVPWYSEACSSTLATTYSSGNQNEKQIVTTDLRQKCTESHTGTSASAPLAAGIIALTLEANKNLTWRDMQHLVVQTSKPAHLNANDWATNGVGRKVSHSYGYGLLDAGAMVALAQNWTTVAPQRKCIIDILTEPKDIGKRLEVRKTVTACLGEPNHITRLEHAQARLTLSYNRRGDLAIHLVSPMGTRSTLLAARPHDYSADGFNDWAFMTTHSWDEDPSGEWVLEIENTSEANNYGTLTKFTLVLYGTAPEGLPVPPESSGCKTLTSSQACVVCEEGFSLHQKSCVQHCPPGFAPQVLDTHYSTENDVETIRASVCAPCHASCATCQGPALTDCLSCPSHASLDPVEQTCSRQSQSSRESPPQQQPPRLPPEVEAGQRLRAGLLPSHLPEVVAGLSCAFIVLVFVTVFLVLQLRSGFSFRGVKVYTMDRGLISYKGLPPEAWQEECPSDSEEDEGRGERTAFIKDQSAL

SEQ ID NO: 1021 - DNA, 6415 bp, Homo sapiens
caggccttgtcatctctcacctggactgctgtgaccttcattcattcccaggagaagtccagaaatggcttcagacatacctggatctgtgacgttgcccgttgcccccatggcggccaccggacaggtgaggatggcgggggccatgcctgcccgtggaggaaagcggcgttccggaatggacttcgatgatgaagatggtgaaggccccagtaaattttcaagagagaatcatagtgaaatcgaaaggcgcaaacggaacaagatgactcagtacatcacggagctctccgacatggtccccacatgcagcgcactggctcggaagccagacaagctcaccatcctccgcatggccgtctcgcacatgaagtccatgaggggtacagggaacaagtccaccgatggcgcgtacaagccttccttcctcacagagcaggaactgaagcatctcatccttgaagcagctgatggatttctgtttgtggtggctgctgagacagggcgagtgatttatgtgtctgactccgtcacccctgttctgaaccagccccagtcagagtggtttgggagcacactgtatgaacaggtgcatcctgatgacgtggagaagctgagagagcaactgtgcacctcagaaaactcaatgacaggccggatcttggacctgaagactgggacggtcaagaaagaagggcagcagtcatccatgaggatgtgcatgggctcgcggcggtctttcatctgcaggatgaggtgtggaaatgctcctttggaccaccttcctctaaacagaataaccaccatgaggaaaaggttcaggaatggccttggccctgtgaaagaaggagaagcccaatatgctgtggtccactgtacaggatacatcaaggcctggccaccagcaggaatgaccatacctgaagaagacgctgatgtgggacaaggcagtaaatattgcctcgtggcaattgggagactccaggtgaccagctctcctgtatgcatggacatgaatgggatgtcggtgcccacagagttcttatcccggcataactccgatggaatcatcacatttgtggatccaagatgtatcagtgtgattggctaccaaccccaggatcttctgggaaaggacattttggaattctgccaccctgaggatcaaagccatctgcgtgagagcttccagcaggtggttaagctgaaaggccaagtcctgtcggtcatgtatcgatttcgcaccaagaaccgggagtggatgttgatccgcaccagcagcttcacattccagaatccctattctgatgagattgagtacatcatctgcaccaacaccaacgtcaagcaacttcagcaacagcaggcagaattggaagtgcaccagagagatggattgtcatcgtatgacttatcccaggtccccgtccccaacctaccagccggtgttcatgaggccgggaagtccgtggaaaaggcggatgcaatcttctcccaggaaagagatcctcggtttgctgaaatgtttgcaggaattagtgcatcggagaagaagatgatgagctcagcctctgcagcaggaacccagcagatctactcccaaggaagcccatttccctctggacactccgggaaggccttcagctcttcagtggttcatgtgcctggagtgaatgatattcagtcctcttcttccacgggccagaacatgtcccaaatctcccggcagctaaaccagagtcaggtggcatggacagggagtcgtccgccctttccgggacagcaaatcccatctcagtccagcaagactcagtcatctccctttgggattggaacgagccacacctacccggcagacccctcttcctacagccccctctccagcccagctacctcctcgccaagtgggaatgcctactccagtcttgccaacaggactccagggttcgctgaaagtggacaaagtagcgggcagttccaagggcggccctcggaagtctggtcgcagtggcaaagccagcaccatggccagcagagcggtgagcagcactcccaccagcagcccagtcagactgaagtgttccaggacatgctgcccatgccaggagatccaacccaggggactggcaactataacatcgaagactttgccgacctgggcatgtttccaccgttttctgagtagctgcggccagagtgaggctcctgctgtacagtgccacccatactgtgatgtcgatgcccatgtgaatgaggcccaccctcgccctgcttgccctgccgcaggccccccaccagaagccatctcccccgctgtgtgtccccaggcgcatcatcgctccactctcccctgcagccgcggctgctcggccactgaccaggggccctggcagacattaggggatcagttgtatttattgtattttatctgtgtgtgctcaggaggtgagcctagtgggtccttaagtttggttgtgaataatctcttgatagacaatttatacccatgaaagttcagccaatgcccagagtgaccaagcagcaccagcaggcctgcccaggatgctgaaagcagatttcttcttgatttcacttctgatggatgcatggggctctgggggaatgctgggaaaatgggcaagcagagtgcacagcccttgttctgccagctggagccaagaagcacagagacacagaggcacctgcccctcagctccgctggtctgtctgtgcatccactgtgccgtgggacatatgtaatttgtgcagtgtgacatggacttgctgtcctaatggatgtgttgtgccttgtgtctgtcatgtgtggccagcgtgattgtatagaatccagagtatgtagagagccaaaatgtgtggccctgtccccaagctcagcaccaccggccatgaccagaggatgctcggcccagggtctgggagctgggctaacaggctgacacttcggcagggtcaccaggaggcacagctaggggcatgctcacatgggtaggtcagttctttggtccaagcctctggtgcagattcaagctcctcctcttagaggaagcagctccttcctcccacaggagccccaagggagcactcaccctcctcccaattggatctgaatagctgtgttcctgatcccacataagcatgtctcatccttgccccactggtgagaggaggaccttgtgcctgcccagagcctgcaggacagcacgccttgaggtcagaggcctggcccttctttacagatgtagatagcagggtaggacgcccaggccttctcacatgggcaccatgaaacactttcttccaggccacctgagccttcgttcttcagcccgactggaggaacagcagctctgggaggcacagagtgcaggtctcaggggcagaagacatgggttccagttctggttctgccacacacccaccggccttgaatttctctggtggtctcaagacaagaacaagagctgactctagaatcttctgcctggctgacctctgagcccatgatccctggcttgctgtgcttctcttggatttgaggagagtttatgaatccattcccctgttttcagggacctctgccttctcccacaccccttacactagtgaggactccttcggcctcttgtgttttcttccttttgtgaccattacgccccctccctgtttcttatcaccagcccatcagcccactgactcccatatggtagaaaaggtaccgtggctgctgcagggcacatggagggacctaccctctgggaaagcccttgtgtccctcccagagtccttcaggtaggccctcgcagatgctgcttgctcagaaacaacccgtgcatccctgcccatggattctgcaggacctagaagagtggcattggttctaggaacctgagagtggagtgaggccagcatgcaggaaggagtttggagagagtgtttgctgtgatccattgaaagctccacattaaaccccagccctgtctggccagggagatccatgtgctcaatgttgctgggggacctacaaaagtcaaacattgctcagtaaaatgcctttggctggtcgccagctgtgcatgactgcagttcctagactctaacttaaccccaactttgcagtttctagagctttttgtctgtaatggtgattgggtctccactgtagatgcatgcagtgttcactccaacctcagaggctttcttgcttctggggaaatggcaggtggttgaaaccctgcacatcctcccagggccagccccagaatgggcctttctctgcctgccctgcccttggggccacctctgcctccagcaggcttgagcttgccccaggccttgggcataattatttccccccaaaaaaggcacaaaaataggttttggatcaaagaagtgtttctcagtgaaatgaaaacagtctttttatagcctttagcttgtgagtttggaagtttggggggtcttatgtttgttttgcctcttctgtttcttggaggagagttgaggcttttcttaggtgcatacacagacccaggtgaacacgctgactgtgaacctgccctgtatccggagctgtgctgggcactgaggggatgcaacaaaattaggagaggatccttgctcccaacgtctacttctcctacctcaacaggggtccagggtgcagtgaactcagttcttggcccttgggtgaggattcatggatgaatgaaagctagacctgatggggaggcattatgactaaataggcccagcctccttcccttccagctctgtcctaggagcataggcgggaaatctgagtagagtctgactgcagtttttgcttatgatttgtaaaagccgtcatggggtcaataagaaaataggggtgatggagggggagaagcccaggactgggagaatcgcacgtgccccaggggttttcaccaaggattttcaagacaaactggagtaagaattaaagccccagaggatttaattatcctggtttgcaaaagagcctcccatgccagtaccgcccagccttggaggccggaatgctcatggcccctgtggtctgcttgtccttcagcccatgcccagcagatacctctctgactggagacgggctcaaagctggattagaaaggggagaggcacttgtgactttgtttgactctgtgactcacttcctcgctcacaccttgtttgaactactggactttcaactggctttccttaggtcaggcaagcagacagctccccactgaagaggtctgtacagtgacaacccgggccggcagcaaggacacagatgcagccacagtaaggctccatcaggactgggtcagtgatggcaacaggatggccaaggatggctctagaacactctgtccatgcgtcactccccccagttttatttttagctttggcttcagggagtgacagccatcacaaatagccacattctgctctactctccaacataccagattgtacactgttgttatttcatgagacgtgaatgttgcagagagtggggggattctggttgttaaggaacttacactggggagctttactcttccgtgtcaacaatgtgactacatgttctccagattagccacacatgcaaacatcagtgtccttctagctttagccgagaaagaaaccagtcccagggaatgaatggtggtctccccactcccggcagcactttaggcagcccataagctatgcgagaatgtgaacgctcaccttgctccgtcacggttctgacctaccacataaacaggaagaagccagtgaccggaacagctctaggaataacaagtcagaatagaagtgtcctttatattaccagaaaatatgggcttggcctaagtcgctgtctcctaacctgccggggtcattccccaccaaacaccccatactaaggagccatgagccacctggacattcaccttttctttgaccatctggagtctggggcaacttaaggaggcaccacacagtggtgcaggcacatttccaagcgtaggtgtccctggcttttgtggccaaagctagtgttatggtcaacaacaggccagggtctgtggggcactgaccttgaaagtggcaaaatggaggtttcacaggctgtgcgggagcaggacggcttgcttcatctaacaatctcagtttcctttaaaaaaagaaagaaaggaaaagatttcataagcaggtgtcagtggacagtttaagcacttaaccatttctctttcttcttatggatgtgaactgtgctgtggataaatcatttgtatttcttgaatgttctctatgactaacagttattaagtcggttgtgtatatgtgtaactaatgtaactgccttttaaaatttcattacaataaaaatgactttgctctg

SEQ ID NO: 1022 - protein, 706 aa, Homo sapiens
MASDIPGSVTLPVAPMAATGQVRMAGAMPARGGKRRSGMDFDDEDGEGPSKFSRENHSEIERRKRNKMTQYITELSDMVPTCSALARKPDKLTILRMAVSHMKSMRGTGNKSTDGAYKPSFLTEQELKHLILEAADGFLFVVAAETGRVIYVSDSVTPVLNQPQSEWFGSTLYEQVHPDDVEKLREQLCTSENSMTGRILDLKTGTVKKEGQQSSMRMCMGSRRSFICRMRCGNAPLDHLPLNRITTMRKRFRNGLGPVKEGEAQYAVVHCTGYIKAWPPAGMTIPEEDADVGQGSKYCLVAIGRLQVTSSPVCMDMNGMSVPTEFLSRHNSDGIITFVDPRCISVIGYQPQDLLGKDILEFCHPEDQSHLRESFQQVVKLKGQVLSVMYRFRTKNREWMLIRTSSFTFQNPYSDEIEYIICTNTNVKQLQQQQAELEVHQRDGLSSYDLSQVPVPNLPAGVHEAGKSVEKADAIFSQERDPRFAEMFAGISASEKKMMSSASAAGTQQIYSQGSPFPSGHSGKAFSSSVVHVPGVNDIQSSSSTGQNMSQISRQLNQSQVAWTGSRPPFPGQQIPSQSSKTQSSPFGIGTSHTYPADPSSYSPLSSPATSSPSGNAYSSLANRTPGFAESGQSSGQFQGRPSEVWSQWQSQHHGQQSGEQHSHQQPSQTEVFQDMLPMPGDPTQGTGNYNIEDFADLGMFPPFSE

SEQ ID NO: 1023 - DNA, 3880 bp, Homo sapiens
gccgcggctcatgcgcggtgcacagaggcttgtttcacatctgtaacaacaggaggaggcccagcctcgtgatgaggaatagcaaggagagaattcagctccagttcaaaagcctacaaaatctgagactgtcattgcttttataaggattccagctttccctcctggccagaaatgttcagcctggactcattcagaaaagatcgggcccagcacaggcagcgtcagtgcaaacttcccccaccccgccttccacccatgtgtgtcaaccctaccccaggagggaccatctctcgaggctgaacgttaacatttccaacatggcagcttctagggacctattaaaagagttcccacagcccaaaaatcttctcaacagtgtgattggaagagccctcggcatctcacatgcaaaagacaaactagtctacgtgcacacaaatggaccgaagaaaaagaaagtcacactgcacataaaatggcccaagagcgtggaggtagaaggctatggcagcaagaagatcgatgctgagcggcaggctgcagctgcagcctgccagctgttcaagggttggggtctgctaggtccccggaatgagttgtttgacgcagccaaataccgagtgctagctgatcgctttggctcccctgccgacagctggtggcgtccggaacccaccatgccccctacttcctggcggcagctgaatccagagagtattcgaccagggggacctgggggcctatcccgctctttaggccgggaagaagaggaggacgaggaggaagagctagaagaagggaccatagatgttaccgacttcttgtccatgacccagcaggattcccacgctccactcagggactcaagggggagttcctttgagatgacagatgacgacagtgccattagggctctgacccagtttccacttcccaagaaccttctggccaaggtgattcagattgcaacgtcatcctccacagctaagaacctcatgcagttccatactgtgggcaccaagaccaagctgtctacactcaccctgctctggccctgccccatgacctttgttgccaaagggcgccgcaaagcagaggctgagaataaggcggcagccttggcctgcaagaaactgaagagcctgggcctggtggacaggaacaacgaaccgcttacacacgccatgtataacctggcctctttgcgtgagctgggtgagacccagcgccgaccatgcaccatccaggtgcccgagcccatcctccgcaagatagagaccttcctgaaccattaccctgtggagagttcatggatcgccccagaactccggctgcagagtgatgacatcttgcccttgggcaaggactcagggcctctgagtgaccctatcacaggcaagccctatgtgcccctgttggaagcagaggaggtacgtctcagccagagtctgctagaactgtggcggcggcgagggccggtctggcaggaggccccccagctacctgtggacccacatcgggacaccatcctcaacgccattgagcagcacccggtggtggtcatctctggggacacgggctgtgggaagaccacgcgcatcccccagctgttgctggagcgctatgtgaccgagggccgaggtgcccgctgcaatgttatcatcacccaacctcgccgcatctctgctgtgtctgtggcacagcgggtcagccacgaactgggcccctccctgcgccggaatgtgggcttccaggtgcggttggaaagtaagcccccatcccgaggcggggccctgctcttctgcactgtgggtatcctgctgcgtaagctgcagagcaaccccagcctggagggcgtgagccacgtcatcgtggatgaggtgcatgagcgggacgtgaacacagactttctgctgatcctgctcaagggcctgcagcggctcaacccggccctgcggctggtgctcatgagtgccacaggggacaatgagcgcttctcccgatactttggtggctgccccgtcatcaaggtgcctggcttcatgtacccagtcaaggagcactacctagaggacatcctggccaagttgggcaagcaccagtacctgcaccggcaccggcaccatgagtctgaggatgaatgcgcactcgatttggaccttgtgactgatctggttctgcacatcgatgctcgcggggaaccaggtgggatcctgtgcttcctgcctgggtggcaggagatcaaaggagtgcagcagcgcctccaggaggccctgggcatgcacgagagcaagtacctcatcctgccagtgcactccaacatccccatgatggatcagaaggccatattccagcagcctccagttggggtgcgcaagattgtcttggccaccaacattgctgagacttccatcacaatcaatgacatcgtgcatgtggtggacagtgggctgcacaaggaagaacgctatgacctgaagaccaaggtgtcctgcctggagacagtgtgggtatcaagagccaatgtgatccagcgccggggccgggcgggccgctgccagtccggctttgcctaccacttgttccctcgaagccggctggagaaaatggtccctttccaagtgccagagatcctgcgcacacctcttgagaacctggtgctgcaagcgaaaatccacatgcctgagaagacggcggtggagttcctgtccaaggctgtggacagtccaaacatcaaggcagtggacgaggctgtgatcttgctccaggagatcggggtgctggaccagcgggagtacctgactaccctggggcagcgcctggctcacatctccaccgacccccggttggccaaggccattgtgttggctgccatcttccgttgcctgcacccactactggtggtcgtttcctgcctcacccgggaccccttcagcagcagcctacagaaccgggcagaggtggacaaggtgaaagcactgttgagccatgacagcggcagtgaccacctggcctttgtgcgggctgtcgccggctgggaggaggtgctgcgttggcaggaccgcagctcccgggagaattacctggaggaaaacctgctgtacgcacccagcctgcgcttcatccacggactcatcaagcagttctcagagaacatttatgaggccttcctggtggggaagccctcggactgcaccctggcctccgcccagtgcaacgagtacagtgaggaggaggagctggtgaagggcgtgctgatggccggcctctaccccaacctcatccaggtgaggcagggcaaggtcacccggcaggggaagttcaagcccaacagcgtcacatataggaccaaatcaggcaacatcctgctgcacaagtcgaccattaacagggaggccacacggttacggagccgatggctgacgtatttcatggcagtcaagtccaatggcagcgtcttcgtccgggactcctctcaggtgcacccgctagctgtgctgctgctgaccgacggggacgtgcacatccgtgatgacgggcgccgggccaccatctcactgagcgacagtgacctgctgcggctggagggtgactcgcgtaccgtgcggctgctgaaggagctgcggcgggccctgggccgcatggtggagcggagcctgcgcagcgagctggctgcacttccccccagcgtacaggaggagcacgggcagctgcttgcgctactggcagagctgctgcgaggaccctgtggcagctttgatgtgcgcaagacagctgacgactgagccctgcttctgctggggctgtgtacagagtgcaaatgtttatttaaaataaagttctatttatcccttgtgaaaaaaaaaaaaaaaaaaaa

SEQ ID NO: 1024 - protein, 1155 aa, Homo sapiens
MAASRDLLKEFPQPKNLLNSVIGRALGISHAKDKLVYVHTNGPKKKKVTLHIKWPKSVEVEGYGSKKIDAERQAAAAACQLFKGWGLLGPRNELFDAAKYRVLADRFGSPADSWWRPEPTMPPTSWRQLNPESIRPGGPGGLSRSLGREEEEDEEEELEEGTIDVTDFLSMTQQDSHAPLRDSRGSSFEMTDDDSAIRALTQFPLPKNLLAKVIQIATSSSTAKNLMQFHTVGTKTKLSTLTLLWPCPMTFVAKGRRKAEAENKAAALACKKLKSLGLVDRNNEPLTHAMYNLASLRELGETQRRPCTIQVPEPILRKIETFLNHYPVESSWIAPELRLQSDDILPLGKDSGPLSDPITGKPYVPLLEAEEVRLSQSLLELWRRRGPVWQEAPQLPVDPHRDTILNAIEQHPVVVISGDTGCGKTTRIPQLLLERYVTEGRGARCNVIITQPRRISAVSVAQRVSHELGPSLRRNVGFQVRLESKPPSRGGALLFCTVGILLRKLQSNPSLEGVSHVIVDEVHERDVNTDFLLILLKGLQRLNPALRLVLMSATGDNERFSRYFGGCPVIKVPGFMYPVKEHYLEDILAKLGKHQYLHRHRHHESEDECALDLDLVTDLVLHIDARGEPGGILCFLPGWQEIKGVQQRLQEALGMHESKYLILPVHSNIPMMDQKAIFQQPPVGVRKIVLATNIAETSITINDIVHVVDSGLHKEERYDLKTKVSCLETVWVSRANVIQRRGRAGRCQSGFAYHLFPRSRLEKMVPFQVPEILRTPLENLVLQAKIHMPEKTAVEFLSKAVDSPNIKAVDEAVILLQEIGVLDQREYLTTLGQRLAHISTDPRLAKAIVLAAIFRCLHPLLVVVSCLTRDPFSSSLQNRAEVDKVKALLSHDSGSDHLAFVRAVAGWEEVLRWQDRSSRENYLEENLLYAPSLRFIHGLIKQFSENIYEAFLVGKPSDCTLASAQCNEYSEEEELVKGVLMAGLYPNLIQVRQGKVTRQGKFKPNSVTYRTKSGNILLHKSTINREATRLRSRWLTYFMAVKSNGSVFVRDSSQVHPLAVLLLTDGDVHIRDDGRRATISLSDSDLLRLEGDSRTVRLLKELRRALGRMVERSLRSELAALPPSVQEEHGQLLALLAELLRGPCGSFDVRKTADD

SEQ ID NO: 1025 - DNA, 1574 bp, Homo sapiens
gttctcttcgcccggtccctgccgcgcacaggcctcggggtcggcgggagcacgatggcggccgctaggagactcatggcgctggccgccggcatctctccgcgcctgcagccgctgggtccccgcgctgctgggcgacagggtcgctcgcgcggcttctcttcaagctgcgcccaccccgaccacaccaaggaagccgccgaggccgagtcagggatggcccccggcgggcctggggaaggcgacggaagcttggtgaacgcttctagggacctattaaaagagttcccacagcccaaaaatcttctcaacagtgtgattggaagagccctcggcatctcacatgcaaaagacaaactagtctacgtgcacacaaatggaccgaagaaaaagaaagtcacactgcacataaaatggcccaagagcgtggaggtagaaggctatggcagcaagaagatcgatgctgagcggcaggctgcagctgcagcctgccagctgttcaagggttggggtctgctaggtccccggaatgagttgtttgacgcagccaaataccgagtgctagctgatcgctttggctcccctgccgacagctggtggcgtccggaacccaccatgccccctacttcctggcggcagctgaatccagagagtattcgaccagggggacctgggggcctatcccgctctttaggccgggaagaagaggaggacgaggaggaagagctagaagaagggaccatagatgttaccgacttcttgtccatgacccagcaggattcccacgctccactcagggactcaagggggagttcctttgagatgacagatgacgacagtgccattagggctctgacccagtttccacttcccaagaaccttctggccaaggtgattcagattgcaacgtcatcctccacagctaagaacctcatgcagttccatactgtgggcaccaagaccaagctgtctacactcaccctgctctggccctgccccatgacctttgttgccaaagggcgccgcaaagcagaggctgagaataaggcggcagccttggcctgcaagaaactgaagagcctgggcctggtggacaggaacaacgaaccgcttacacacggttacggagccgatggctgacgtatttcatggcagtcaagtccaatggcagcgtcttcgtccgggactcctctcaggtgcacccgctagctgtgctgctgctgaccgacggggacgtgcacatccgtgatgacgggcgccgggccaccatctcactgagcgacagtgacctgctgcggctggagggtgactcgcgtaccgtgcggctgctgaaggagctgcggcgggccctgggccgcatggtggagcggagcctgcgcagcgagctggctgcacttccccccagcgtacaggaggagcacgggcagctgcttgcgctactggcagagctgctgcgaggaccctgtggcagctttgatgtgcgcaagacagctgacgactgagccctgcttctgctggggctgtgtacagagtgcaaatgtttatttaaaataaagttctatttatcccttgtg

SEQ ID NO: 1026 - protein, 361 aa, Homo sapiens
MAAARRLMALAAGISPRLQPLGPRAAGRQGRSRGFSSSCAHPDHTKEAAEAESGMAPGGPGEGDGSLVNASRDLLKEFPQPKNLLNSVIGRALGISHAKDKLVYVHTNGPKKKKVTLHIKWPKSVEVEGYGSKKIDAERQAAAAACQLFKGWGLLGPRNELFDAAKYRVLADRFGSPADSWWRPEPTMPPTSWRQLNPESIRPGGPGGLSRSLGREEEEDEEEELEEGTIDVTDFLSMTQQDSHAPLRDSRGSSFEMTDDDSAIRALTQFPLPKNLLAKVIQIATSSSTAKNLMQFHTVGTKTKLSTLTLLWPCPMTFVAKGRRKAEAENKAAALACKKLKSLGLVDRNNEPLTHGYGADG

SEQ ID NO: 1027 - DNA, 3851 bp, Homo sapiens
gccgcggctcatgcgcggtgcacagaggcttgtttcacatctgtaacaacaggaggaggcccagcctcgtgatgaggaatagcaaggagagaattcagctccagttcaaaagcctacaaaatctgagactgtcattgcttttataaggattccagctttccctcctggccagaaatgttcagcctggactcattcagaaaagatcgggcccagcacaggcagcgtcagtgcaaacttcccccaccccgccttccacccatgtgtgtcaaccctaccccaggagggaccatctctcgagcttctagggacctattaaaagagttcccacagcccaaaaatcttctcaacagtgtgattggaagagccctcggcatctcacatgcaaaagacaaactagtctacgtgcacacaaatggaccgaagaaaaagaaagtcacactgcacataaaatggcccaagagcgtggaggtagaaggctatggcagcaagaagatcgatgctgagcggcaggctgcagctgcagcctgccagctgttcaagggttggggtctgctaggtccccggaatgagttgtttgacgcagccaaataccgagtgctagctgatcgctttggctcccctgccgacagctggtggcgtccggaacccaccatgccccctacttcctggcggcagctgaatccagagagtattcgaccagggggacctgggggcctatcccgctctttaggccgggaagaagaggaggacgaggaggaagagctagaagaagggaccatagatgttaccgacttcttgtccatgacccagcaggattcccacgctccactcagggactcaagggggagttcctttgagatgacagatgacgacagtgccattagggctctgacccagtttccacttcccaagaaccttctggccaaggtgattcagattgcaacgtcatcctccacagctaagaacctcatgcagttccatactgtgggcaccaagaccaagctgtctacactcaccctgctctggccctgccccatgacctttgttgccaaagggcgccgcaaagcagaggctgagaataaggcggcagccttggcctgcaagaaactgaagagcctgggcctggtggacaggaacaacgaaccgcttacacacgccatgtataacctggcctctttgcgtgagctgggtgagacccagcgccgaccatgcaccatccaggtgcccgagcccatcctccgcaagatagagaccttcctgaaccattaccctgtggagagttcatggatcgccccagaactccggctgcagagtgatgacatcttgcccttgggcaaggactcagggcctctgagtgaccctatcacaggcaagccctatgtgcccctgttggaagcagaggaggtacgtctcagccagagtctgctagaactgtggcggcggcgagggccggtctggcaggaggccccccagctacctgtggacccacatcgggacaccatcctcaacgccattgagcagcacccggtggtggtcatctctggggacacgggctgtgggaagaccacgcgcatcccccagctgttgctggagcgctatgtgaccgagggccgaggtgcccgctgcaatgttatcatcacccaacctcgccgcatctctgctgtgtctgtggcacagcgggtcagccacgaactgggcccctccctgcgccggaatgtgggcttccaggtgcggttggaaagtaagcccccatcccgaggcggggccctgctcttctgcactgtgggtatcctgctgcgtaagctgcagagcaaccccagcctggagggcgtgagccacgtcatcgtggatgaggtgcatgagcgggacgtgaacacagactttctgctgatcctgctcaagggcctgcagcggctcaacccggccctgcggctggtgctcatgagtgccacaggggacaatgagcgcttctcccgatactttggtggctgccccgtcatcaaggtgcctggcttcatgtacccagtcaaggagcactacctagaggacatcctggccaagttgggcaagcaccagtacctgcaccggcaccggcaccatgagtctgaggatgaatgcgcactcgatttggaccttgtgactgatctggttctgcacatcgatgctcgcggggaaccaggtgggatcctgtgcttcctgcctgggtggcaggagatcaaaggagtgcagcagcgcctccaggaggccctgggcatgcacgagagcaagtacctcatcctgccagtgcactccaacatccccatgatggatcagaaggccatattccagcagcctccagttggggtgcgcaagattgtcttggccaccaacattgctgagacttccatcacaatcaatgacatcgtgcatgtggtggacagtgggctgcacaaggaagaacgctatgacctgaagaccaaggtgtcctgcctggagacagtgtgggtatcaagagccaatgtgatccagcgccggggccgggcgggccgctgccagtccggctttgcctaccacttgttccctcgaagccggctggagaaaatggtccctttccaagtgccagagatcctgcgcacacctcttgagaacctggtgctgcaagcgaaaatccacatgcctgagaagacggcggtggagttcctgtccaaggctgtggacagtccaaacatcaaggcagtggacgaggctgtgatcttgctccaggagatcggggtgctggaccagcgggagtacctgactaccctggggcagcgcctggctcacatctccaccgacccccggttggccaaggccattgtgttggctgccatcttccgttgcctgcacccactactggtggtcgtttcctgcctcacccgggaccccttcagcagcagcctacagaaccgggcagaggtggacaaggtgaaagcactgttgagccatgacagcggcagtgaccacctggcctttgtgcgggctgtcgccggctgggaggaggtgctgcgttggcaggaccgcagctcccgggagaattacctggaggaaaacctgctgtacgcacccagcctgcgcttcatccacggactcatcaagcagttctcagagaacatttatgaggccttcctggtggggaagccctcggactgcaccctggcctccgcccagtgcaacgagtacagtgaggaggaggagctggtgaagggcgtgctgatggccggcctctaccccaacctcatccaggtgaggcagggcaaggtcacccggcaggggaagttcaagcccaacagcgtcacatataggaccaaatcaggcaacatcctgctgcacaagtcgaccattaacagggaggccacacggttacggagccgatggctgacgtatttcatggcagtcaagtccaatggcagcgtcttcgtccgggactcctctcaggtgcacccgctagctgtgctgctgctgaccgacggggacgtgcacatccgtgatgacgggcgccgggccaccatctcactgagcgacagtgacctgctgcggctggagggtgactcgcgtaccgtgcggctgctgaaggagctgcggcgggccctgggccgcatggtggagcggagcctgcgcagcgagctggctgcacttccccccagcgtacaggaggagcacgggcagctgcttgcgctactggcagagctgctgcgaggaccctgtggcagctttgatgtgcgcaagacagctgacgactgagccctgcttctgctggggctgtgtacagagtgcaaatgtttatttaaaataaagttctatttatcccttgtgaaaaaaaaaaaaaaaaaaaa

SEQ ID NO: 1028 - protein, 1194 aa, Homo sapiens
MFSLDSFRKDRAQHRQRQCKLPPPRLPPMCVNPTPGGTISRASRDLLKEFPQPKNLLNSVIGRALGISHAKDKLVYVHTNGPKKKKVTLHIKWPKSVEVEGYGSKKIDAERQAAAAACQLFKGWGLLGPRNELFDAAKYRVLADRFGSPADSWWRPEPTMPPTSWRQLNPESIRPGGPGGLSRSLGREEEEDEEEELEEGTIDVTDFLSMTQQDSHAPLRDSRGSSFEMTDDDSAIRALTQFPLPKNLLAKVIQIATSSSTAKNLMQFHTVGTKTKLSTLTLLWPCPMTFVAKGRRKAEAENKAAALACKKLKSLGLVDRNNEPLTHAMYNLASLRELGETQRRPCTIQVPEPILRKIETFLNHYPVESSWIAPELRLQSDDILPLGKDSGPLSDPITGKPYVPLLEAEEVRLSQSLLELWRRRGPVWQEAPQLPVDPHRDTILNAIEQHPVVVISGDTGCGKTTRIPQLLLERYVTEGRGARCNVIITQPRRISAVSVAQRVSHELGPSLRRNVGFQVRLESKPPSRGGALLFCTVGILLRKLQSNPSLEGVSHVIVDEVHERDVNTDFLLILLKGLQRLNPALRLVLMSATGDNERFSRYFGGCPVIKVPGFMYPVKEHYLEDILAKLGKHQYLHRHRHHESEDECALDLDLVTDLVLHIDARGEPGGILCFLPGWQEIKGVQQRLQEALGMHESKYLILPVHSNIPMMDQKAIFQQPPVGVRKIVLATNIAETSITINDIVHVVDSGLHKEERYDLKTKVSCLETVWVSRANVIQRRGRAGRCQSGFAYHLFPRSRLEKMVPFQVPEILRTPLENLVLQAKIHMPEKTAVEFLSKAVDSPNIKAVDEAVILLQEIGVLDQREYLTTLGQRLAHISTDPRLAKAIVLAAIFRCLHPLLVVVSCLTRDPFSSSLQNRAEVDKVKALLSHDSGSDHLAFVRAVAGWEEVLRWQDRSSRENYLEENLLYAPSLRFIHGLIKQFSENIYEAFLVGKPSDCTLASAQCNEYSEEEELVKGVLMAGLYPNLIQVRQGKVTRQGKFKPNSVTYRTKSGNILLHKSTINREATRLRSRWLTYFMAVKSNGSVFVRDSSQVHPLAVLLLTDGDVHIRDDGRRATISLSDSDLLRLEGDSRTVRLLKELRRALGRMVERSLRSELAALPPSVQEEHGQLLALLAELLRGPCGSFDVRKTADD

SEQ ID NO: 1029 - DNA, 2145 bp, Homo sapiens
ggcgattcttcccgcagagttgtgaagcgaaaggcttacaattaaaaggaagaaaaaaaaataaagataattcgggagtacaattgacaaagcgtgtgggtcgctcagcctccagcagtaactgctgatctccagttcttggagggttccggtgagaagaacgcccctactgcggtactgaggaagcggcaggaggagatgcggcccctggacatagacgaggtggaagcgcctgaggaagtggaggtgctggagcccgaggaggatttcgagcagttcctgctcccggtcatcaacgagatgcgcgaggacatcgcgtctcttatacgcgagcacgggcgggcgtacctgcggaccaggagcaagctgtgggagatggacaatatgcttatccagatcaaaacgcaggtggaggcctcggaggagagcgccctcaatcacgtgcagcacccgagtggcgaagccgacgagagagtgtcggagttgtgcgagaaggctgaggagaaagccaaggagattgcgaagatggcagagatgctggtcgagctcgtctggcgaatagagagaagcgagtcttcttgaaggaggagatcggtggtaaggtcggaaactagctggagcttggatgaaactcagtagtcgccctaagcatggttaaaccgcgccctgtaaaaagttatgttctaggcctgcatcccccattttattgcatcaaaaattgagcattgggaacaaagttggggtcaagaggaaagaatgcgtgctggttttgttaggcgttagtataccgttttttttgtggcctctccctcccacactggtaattagagaaagataacagtaacttcggtttagtttttgtgaaacataaaagtcaattctaatagggcagtcgccagaagtagacctgtctaggcactaagggagtttggggaaagccaaagaagacctaggccatagagcacagtggaacgcaggtgagaacgcagggaaagagaagtaaagagtaaagccagaggccattacctgaaatttccagattgttctatgagacaggtatgtcagaggaccgtgtctcaaagaagtggcattcttctgggtggttcacatttatttttaacatcaggatatggaactttgagagtcaatgtcttcatggtaaatttctcccaattgtgctttaggttcacagctgaggactgtagtcaactggtaaggatgaactgacaccttgaggaaactgaaacagcttgtcattttctctgttttgtttttgtatgttttttacccccatgtaacagtctcccttatggtcagtgattgatgacctcgatatggatttagattatcaaatgtgtttggttttggaaatataacttttgtcaaagaaatactctcagaagagaaatggggcttaattaagttgtttttgtggtcacgtttattcttgttacttcgctgtgtttttgaaatgttgggcatggcctcgtattttgctgttacctttgtgacctgattgttttttggaacacgtcaagacgtgggatcagaatcttccaactttagaggtgcaatggaagacactacgctacttggttgagcctggtgaagaatgtattaatgagactgctttgcataaaactgggaagaaagagaagacagttggagatggaagatggttttgtatatattttggaactttagttcctctgtgagacgaaagaggagagctatgttttgtgtcacattgtctgatatatattgtgtaacctgtcaggtgagttgatttagacaacatagctgaccttttatgacaaggcagtttgaatagggactattgtaataccctcacacattataggggcatcagagaatggcatggaagagacagtctacagagagctttaagaggccggagaaaggaaaagacattatcagggcctggaaagtctcttccagttcatcagggtagtagacctgtcagattggaggtcaaagtcaaaagtataataagtgttaatttgccttgaaaaacaaagacctaaaaagccttttttaagaaataaattttttgttcacatgaccaaagcccctcctgtgtgtgttaataaaagaatcataaacaaaaaaaaaaaaaaaaaaaaa

SEQ ID NO: 1030 - protein, 127 aa, Homo sapiens
MRPLDIDEVEAPEEVEVLEPEEDFEQFLLPVINEMREDIASLIREHGRAYLRTRSKLWEMDNMLIQIKTQVEASEESALNHVQHPSGEADERVSELCEKAEEKAKEIAKMAEMLVELVWRIERSESS

SEQ ID NO: 1031 - DNA, 6111 bp, Homo sapiens
aacaggtttgatctgtggatgaaatgaatcatgattttcaagctcttgcattagaatctcggggaatgggagagcttttgcctaccaaaaagttttgggaacctgatgattcaacaaaagatggacaaaaaggcatatttcttggggatgatgaatggagagagactgcatggggagcttctcaccattcaatgtcccagcctattatggtacagagaagatctggacagggttttcatggaaacagtgaagtaaatgcaatactgtctccgcgatcagaaagtggaggccttggtgtgagcatggtagaatatgtattaagttcttctcctgctgataaattggattctcgatttaggaagggaaattttggcactagagatgctgaaacagatggacctgagaaaggagatcaaaaaggcaaggcttctccatttgaggaggaccaaaacagagatcttaaacaaggagatgatgatgattctaaaataaatggcagaggtttgccaaatggaatggatgccgattgcaaagattttaatcgtactcctggaagtcgtcaagcctctccaactgaagtagttgagcgcttgggccccaatactaatccctcagaaggactggggcctcttcctaatcctacagctaataaaccacttgttgaagaattttcaaatcctgaaactcagaatctggatgccatggaacaagttggtctggaatccttacagtttgactatcctggtaatcaggtaccaatggactcttcaggagctactgtaggcctttttgactacaattcccagcagcagctctttcagaggactaatgcactaacagttcaacagttaactgcagctcaacagcagcaatatgcattagcagcagctcagcagccacatatagctggtgtattctcagcaggccttgctccagctgcatttgtgccaaatccatacattattagtgctgctcctccagggaccgatccgtatactgcagcaggattggctgcagcagctacattagcaggtccagcagtggttccacctcagtattacggcgttccatggggggtgtatccagccaacttatttcagcagcaagctgcagctgcggcaaataacacagccagtcagcaagcagcatcacaagctcagcctggacagcaacaggttctccgtgctggagcaggtcagcgtcctcttactcccaatcagggtcagcaagggcagcaagcagaatcacttgcggcagctgcagcagcaaatccaacattggcttttggtcagggtcttgctactggcatgccaggctatcaagtactagctccaactgcctattatgatcagactggtgccttagtggttggccctggagcaaggactggccttggagctccagttcggttaatggctccaacacctgttttaattagttcagcagcagcacaagctgcagcagcagcagcagctggaggaactgcaagtagccttacaggcagcacaaatggtctgtttcggccaattggcactcagccaccacagcagcagcaacagcagccaagcactaatctgcaatctaattcattttatggaagcagttctttgactaatagctcccagagtagttctttattttctcatggacctggtcaacctggaagtacatctcttggctttggaagtggtaactctttgggtgctgctataggctcagccctcagtggatttggttcatcagttggcagttctgcaagtagtagtgccacaaggagagagtctctatctactagctctgacttgtacaaaagatctagtagcagcctagcacccatagggcaaccattttacaatagtctgggattttcctcctctccaagtccaataggcatgcctctgccaagccaaactccaggacattcacttacgccaccgccatcactttcatcacatggatcctcatccagtttgcatttaggaggactgacaaatggtagtggtcgatatatctctgcagcacctggagcagaagcaaaatatcgaagtgcttcaagcacttccagtctatttagctccagcagccagctctttcctccttcccggcttcggtataataggtctgatattatgccttctggccgcagtagattattggaagatttcagaaacaaccgcttcccaaaccttcagcttagagacttgattggacatatagttgagttttctcaagaccagcatggttctagattcatacagcaaaaactagagagagctactccagctgagcgacagatggtatttaatgaaattctgcaagcagcctatcaattaatgactgatgtttttggcaactatgttatacagaagttttttgagtttgggagtctggatcaaaaattagccctggctactcgtattcgtggtcatgttctacccttagccttgcagatgtatggctgccgcgttattcagaaagcattagaatctatttcttctgaccagcagagtgaaatggtaaaggagctggatggtcatgtgctcaaatgtgtgaaagatcagaatggaaaccatgttgtacaaaaatgtatcgaatgtgttcagccacagtcactacagttcatcattgatgctttcaagggacaagtatttgtgctttcaactcatccttatggctgcagagtaattcagcgcatcctagagcattgcactgcagaacagaccttacctatcttagaagaactccaccaacatacagagcagttggtacaggatcagtatggcaattatgttattcagcatgtactggaacacggtcgacctgaagacaagagcaaaattgtttccgaaatcaggggaaaggttttagccctgagtcaacacaaatttgccagcaatgtagtagaaaagtgtgttactcatgcctcccgtgctgagagagctttactgattgacgaggtttgctgccagaatgatggtcctcacagtgccttatacaccatgatgaaggaccagtatgccaattacgtggttcaaaagatgattgatatggctgaacctgctcagagaaagataatcatgcacaagattcgacctcacattactactttgcgcaaatacacatacgggaagcatatactggccaagttggaaaagtattatttgaagaatagcccggacctaggacctattggaggaccaccaaatggaatgctgtaaattacaggagcaagagaaagaagataatttaaccatgtgaaaagaatttttttgtgtgtgaattatcaaaacacaactcaactatgaatcttcaatttttttttaaagcaaaactatttattgactttattcatccatttgtaaattttttaaggttcttgtgtatatttggggggtgggggatgaattataaattatattcagccctgagtggagacctatcagattggattgctggcaaagcacagaatgcctgtatatgatgtaactgtatcaaaaataaaaagctgtcacatattttgtaaatttttaccttgtaaagtcacaaaaatagtttttaaaggaaaaagtacagtattcttttaataaactggctcacagtctggtaggtctacaaccccatagcacaacaggtttatagagatgtatatagaattatagtccttatttttttcctttgcgtgaaaccttttataacagattaacaatcaactgcataaatattattaatattttaaaaagagttaagttgtattttgataattcacaaactatcatgcaaataacgagtaagtagacaagaataaagtggtttgagatgaaaagaacctaacattatttacagtagatgtggttttaatacaattactgccctaaaatgtctctggcaatgtacagaaatattgtatatacttacatatgtaattgttgtaagagttaaatacaaaatcatggtgacacttccaattaagtgcactaaatgaaaagttaagtcacttattaacttttcagtttggtttgcaatgagaaagagtggaaatttgtattttgttttgcttatagaattacagacatgttgaggaagtgttgagctttattttgctttttcatagaggcagaaagtaggaaccagatagagatgaaaaggggccactgaaaagtgaatttgatagctcagcatttaagcatgattacatattcagatagctctttttgctttctataaatatatgcattgtgtgtgtagtaatagatgtaagtttacactttgaaaggaaatcttgtttcaatgtttattataaaagccttgctaatttagtagtgatgctttccttggttgtacaggtgtacatttgtaaaccttcatgctgtaaatggaatttgttttatctctttgggatacatttgcattttagtgtacatttacgtccctgccctctttgacctggcaatatagtgttgtataatgtaaatttatttctccaaatcgagagtgattttttaaaaattttttatctttatatggtttcagaagtatgaaccagctttctttttattattgtgagatcattttgttttataacatagttgttgactgttaatatggacctgctagaatttggatcactttcaattgaagtcagggtattgtgcataatagaaagtattggactgagatatttggttaccatggaggccaatgcttttttcatcttattaaatgtgatgtgacttttttctttgtacagaagagtactgtatttttgaatagcctactcccaagtaagagcaaatctgtatgataacattttttcctctggacataagacataacagtaacacgatgtacatttacaagcggccttatgtacatttcccaacaatctttttaaggcaaaattgtgaccatatgtgtataattaaaatcgtttttaatcctttgcctatgaaaatattttggaaaaaaacttgctgtgtatattcagtttctgaaagataaagaaagtgctttgtattttgttgaagtcagtattttgtataaacatttatgttgacccacttatgttcagtgctgaaaactaaaatgaacatgctattctgtcagctgaatatggaagagatctttttttactagagatctgcagaagaaacgcaatcttctgagcacaatatggaatctaaaggttttatcacttagttgttcatattatgaacctaaaaataatggcataaagtttggggatgccaggcatactttttcatgtttggtgttgagttattttacttttctaacccaacattccttggtgagaccattaaatccaaacacttgtcaccgttccttctcatagtcactctgggtcatcagcatgtcccagtcactgcagcaacgccttgtgtttgtttcatttttttaaaacccacacaaagccgctgtctcactttttcctactttaccaacctcagagtatttcggcccgtatcgaacttttgttctcagtatcagcccatggtttcaggatcaaagctgtcatgttggagattggtaatggctttcctgtctttgtacagttgaattcctagtcttccttcatccttgccctctgttggcacaggcattatctctgcaattttagaaaatgacaagtagagaatactacattgagaaactaaaccctcttcttggggtcctgatactcattcccatttgtcccagtgctgacaacccaatcttcccaatactttcaggcctgctctacaaaagtacctgttcttgtagaaattttacagtctgccattttgggtgcccaccccaatttttaccttttagtaagttggcatgaaattttggtaaaatctgaaaatcacatttcagaataaaacaattgggcaaaactacctaggctttactcttgagtgtctccttttgatagggattgtttctggaccagtttgtctaagtcctggctcttattggttcatatgaaataatgttaacttcacttctttgtatattatgtataaattagaaaatgaaaaatgtgtgaataacattgtatgaaataaacctggtcttgtgtttttctctagataaaataaaaatctgtacctc

SEQ ID NO: 1032 - protein, 1064 aa, Homo sapiens
MNHDFQALALESRGMGELLPTKKFWEPDDSTKDGQKGIFLGDDEWRETAWGASHHSMSQPIMVQRRSGQGFHGNSEVNAILSPRSESGGLGVSMVEYVLSSSPADKLDSRFRKGNFGTRDAETDGPEKGDQKGKASPFEEDQNRDLKQGDDDDSKINGRGLPNGMDADCKDFNRTPGSRQASPTEVVERLGPNTNPSEGLGPLPNPTANKPLVEEFSNPETQNLDAMEQVGLESLQFDYPGNQVPMDSSGATVGLFDYNSQQQLFQRTNALTVQQLTAAQQQQYALAAAQQPHIAGVFSAGLAPAAFVPNPYIISAAPPGTDPYTAAGLAAAATLAGPAVVPPQYYGVPWGVYPANLFQQQAAAAANNTASQQAASQAQPGQQQVLRAGAGQRPLTPNQGQQGQQAESLAAAAAANPTLAFGQGLATGMPGYQVLAPTAYYDQTGALVVGPGARTGLGAPVRLMAPTPVLISSAAAQAAAAAAAGGTASSLTGSTNGLFRPIGTQPPQQQQQQPSTNLQSNSFYGSSSLTNSSQSSSLFSHGPGQPGSTSLGFGSGNSLGAAIGSALSGFGSSVGSSASSSATRRESLSTSSDLYKRSSSSLAPIGQPFYNSLGFSSSPSPIGMPLPSQTPGHSLTPPPSLSSHGSSSSLHLGGLTNGSGRYISAAPGAEAKYRSASSTSSLFSSSSQLFPPSRLRYNRSDIMPSGRSRLLEDFRNNRFPNLQLRDLIGHIVEFSQDQHGSRFIQQKLERATPAERQMVFNEILQAAYQLMTDVFGNYVIQKFFEFGSLDQKLALATRIRGHVLPLALQMYGCRVIQKALESISSDQQSEMVKELDGHVLKCVKDQNGNHVVQKCIECVQPQSLQFIIDAFKGQVFVLSTHPYGCRVIQRILEHCTAEQTLPILEELHQHTEQLVQDQYGNYVIQHVLEHGRPEDKSKIVSEIRGKVLALSQHKFASNVVEKCVTHASRAERALLIDEVCCQNDGPHSALYTMMKDQYANYVVQKMIDMAEPAQRKIIMHKIRPHITTLRKYTYGKHILAKLEKYYLKNSPDLGPIGGPPNGML

SEQ ID NO: 1033 - DNA, 2347 bp, Homo sapiens
agagagagagagagagagagagagagagagagagagagagagagagagagagagagagagagaggaacgaggccgtcgcatctttgtgtctgcttcctgtgggacgtggtggtagccgttgggttgggaaagtgagggatttttggcctcgtttctcctgcttcttttctcctcccttttactttgccggtagaacacagttatgggtcgcaagaagaagaagcagctgaagccgtggtgctggtattgtaatagagattttgatgatgagaagatccttattcagcaccaaaaagcaaagcattttaaatgccatatatgtcacaagaaattgtatacaggacctggcttagctattcattgcatgcaggtacataaagaaacaatagatgccgtaccaaatgcaatacctggaagaacagacatagagttggaaatatatggtatggaaggtattccagaaaaagacatggatgaaagacgacgacttcttgaacagaaaacacaagaaagtcaaaaaaagaagcaacaagatgattctgatgaatatgatgatgacgactctgcagcctcaacttcatttcagccacagcctgttcaacctcagcaaggttatattcctccaatggcacagccaggactgccaccagtaccaggagcaccaggaatgcctccaggcatacctccattaatgccaggtgttcctcctctgatgccaggaatgccaccagttatgccaggcatgccacctggaatgatgccaatgggtggaatgatgccacctggaccaggaataccacctctgatgcctggaatgccaccaggtatgcccccacctgttccacgtcctggaattcctccaatgactcaagcacaggctgtttcagcgccaggtattcttaatagaccacctgcaccaacagcaactgtacctgccccacagcctccagttactaagcctcttttccccagtgctggacagatggggacacctgtcacaagctcaagtacagcttcatccaattcagaaagtctgtctgcatcttctaaagctctgtttcctagcacagcacaagctcaggcagctgtccaaggacctgttggtacagatttcaaacccttaaatagtacccctgcaacaactacagaacccccaaagcctacattccctgcttatacacagtctacagcttcaacaactagtacaacaaatagtactgcagctaaaccagcggcttcaataacaagtaagcctgctacacttacaacaactagtgcaaccagtaagttgatccatccagatgaggatatatccctggaagagagaagggcacagttacctaagtatcaacgtaatcttcctcggccaggacaggcccccatcggtaatccaccagttggaccaattggaggtatgatgccaccacagccaggcatcccacagcaacaaggaatgagacccccaatgccacctcatggtcagtatggtggtcatcatcaaggcatgccaggataccttcctggtgctatgcccccgtatgggcagggaccgccaatggtgcccccttaccagggtgggcctcctcgacctccgatgggaatgagacctcctgtaatgtcgcaaggtggccgttactgatcttacttcatccagtctaataggtttggagattaaaccttttctcaacttgtgctgtttatatagccaagcttccgtcaataaggcttcattgtgactttaacaaacattatcttcccacataccaggaactattggacatttattttacatgggaaaaattatttggaataataaagcaggaacttttcctgaagttgcaatttatactgtatggcttctttttcatgtttcatctaggtttttagaagtgaagtatagtaaatttggttcgttaaattgtgaaggcgctggaattacatgaacataccaccctagtaaaggcaagttctgtaagcttacattgctatttgtaaagtttgccttcacagcatttcagatgctgttggacttcatgtccccaacctagcttggtgagggctgtaactgtttccaagtacttgtacattggaagtctgaatgtgtaacaatatttaatgtatttagagttcctcatgttgcagggtttaagaaatctgacccaccaaggtcatgtgacttttctgtactgttaaacttcattgtaataaaatgagagaaaaatttatgcctttttattcataacccagctgtggaccactgcctgaaaggtttgtacagatgcatgccacagtagatgtccacataataaaattcatagttaccaatgcaataaaaaaaaaaaaaaaa

SEQ ID NO: 1034 - protein, 478 aa, Homo sapiens
MGRKKKKQLKPWCWYCNRDFDDEKILIQHQKAKHFKCHICHKKLYTGPGLAIHCMQVHKETIDAVPNAIPGRTDIELEIYGMEGIPEKDMDERRRLLEQKTQESQKKKQQDDSDEYDDDDSAASTSFQPQPVQPQQGYIPPMAQPGLPPVPGAPGMPPGIPPLMPGVPPLMPGMPPVMPGMPPGMMPMGGMMPPGPGIPPLMPGMPPGMPPPVPRPGIPPMTQAQAVSAPGILNRPPAPTATVPAPQPPVTKPLFPSAGQMGTPVTSSSTASSNSESLSASSKALFPSTAQAQAAVQGPVGTDFKPLNSTPATTTEPPKPTFPAYTQSTASTTSTTNSTAAKPAASITSKPATLTTTSATSKLIHPDEDISLEERRAQLPKYQRNLPRPGQAPIGNPPVGPIGGMMPPQPGIPQQQGMRPPMPPHGQYGGHHQGMPGYLPGAMPPYGQGPPMVPPYQGGPPRPPMGMRPPVMSQGGRY

SEQ ID NO: 1035 - DNA, 3372 bp, Homo sapiens
tacaaccaggctcaactgttgcatggtagcagatttgcaaacatgagtgctgaggggtaccagtacagagcgctgtatgattataaaaaggaaagagaagaagatattgacttgcacttgggtgacatattgactgtgaataaagggtccttagtagctcttggattcagtgatggacaggaagccaggcctgaagaaattggctggttaaatggctataatgaaaccacaggggaaaggggggactttccgggaacttacgtagaatatattggaaggaaaaaaatctcgcctcccacaccaaagccccggccacctcggcctcttcctgttgcaccaggttcttcgaaaactgaagcagatgttgaacaacaagctttgactctcccggatcttgcagagcagtttgcccctcctgacattgccccgcctcttcttatcaagctcgtggaagccattgaaaagaaaggtctggaatgttcaactctatacagaacacagagctccagcaacctggcagaattacgacagcttcttgattgtgatacaccctccgtggacttggaaatgatcgatgtgcacgttttggctgacgctttcaaacgctatctcctggacttaccaaatcctgtcattccagcagccgtttacagtgaaatgatttctttagctccagaagtacaaagctccgaagaatatattcagctattgaagaagcttattaggtcgcctagcatacctcatcagtattggcttacgcttcagtatttgttaaaacatttcttcaagctctctcaaacctccagcaaaaatctgttgaatgcaagagtactctctgaaattttcagccctatgcttttcagattctcagcagccagctctgataatactgaaaacctcataaaagttatagaaattttaatctcaactgaatggaatgaacgacagcctgcaccagcactgcctcctaaaccaccaaaacctactactgtagccaacaacggtatgaataacaatatgtccttacaaaatgctgaatggtactggggagatatctcgagggaagaagtgaatgaaaaacttcgagatacagcagacgggacctttttggtacgagatgcgtctactaaaatgcatggtgattatactcttacactaaggaaagggggaaataacaaattaatcaaaatatttcatcgagatgggaaatatggcttctctgacccattaaccttcagttctgtggttgaattaataaaccactaccggaatgaatctctagctcagtataatcccaaattggatgtgaaattactttatccagtatccaaataccaacaggatcaagttgtcaaagaagataatattgaagctgtagggaaaaaattacatgaatataacactcagtttcaagaaaaaagtcgagaatatgatagattatatgaagaatatacccgcacatcccaggaaatccaaatgaaaaggacagctattgaagcatttaatgaaaccataaaaatatttgaagaacagtgccagacccaagagcggtacagcaaagaatacatagaaaagtttaaacgtgaaggcaatgagaaagaaatacaaaggattatgcataattatgataagttgaagtctcgaatcagtgaaattattgacagtagaagaagattggaagaagacttgaagaagcaggcagctgagtatcgagaaattgacaaacgtatgaacagcattaaaccagaccttatccagctgagaaagacgagagaccaatacttgatgtggttgactcaaaaaggtgttcggcaaaagaagttgaacgagtggttgggcaatgaaaacactgaagaccaatattcactggtggaagatgatgaagatttgccccatcatgatgagaagacatggaatgttggaagcagcaaccgaaacaaagctgaaaacctgttgcgagggaagcgagatggcacttttcttgtccgggagagcagtaaacagggctgctatgcctgctctgtagtggtggacggcgaagtaaagcattgtgtcataaacaaaacagcaactggctatggctttgccgagccctataacttgtacagctctctgaaagaactggtgctacattaccaacacacctcccttgtgcagcacaacgactccctcaatgtcacactagcctacccagtatatgcacagcagaggcgatgaagcgcttactctttgatccttctcctgaagttcagccaccctgaggcctctggaaagcaaagggctcctctccagtctgatctgtgaattgagctgcagaaacgaagccatctttctttggatgggactagagctttctttcacaaaaaagaagtaggggaagacatgcagcctaaggctgtatgatgaccacacgttcctaagctggagtgcttatcccttctttttctttttttctttggtttaatttaaagccacaaccacatacaacacaaagagaaaaagaaatgcaaaaatctctgcgtgcagggacaaagaggcctttaaccatggtgcttgttaatgctttctgaagctttaccagctgaaagttgggactctggagagcggaggagagagaggcagaagaaccctggcctgagaaggtttggtccagcctggtttagcctggatgttgctgtgcacggtggacccagacacatcgcactgtggattatttcattttgtaacaaatgaacgatatgtagcagaaaggcacgtccactcacaagggacgctttgggagaatgtcagttcatgtatgttcagaagaaattctgtcatagaaagtgccagaaagtgtttaacttgtcaaaaaacaaaaacccagcaacagaaaaatggagtttggaaaacaggacttaaaatgacattcagtatataaaatatgtacataatattggatgactaactatcaaatagatggatttgtatcaataccaaatagcttctgttttgttttgctgaaggctaaattcacagcgctatgcaattcttaattttcattaagttgttatttcagttttaaatgtaccttcagaataagcttccccaccccagtttttgttgcttgaaaatattgttgtcccggatttttgttaatattcatttttgttatccttttttaaaaataaatgtacaggatgccagtaaaaaaaaaaatggcttcagaattaaaactatgaaatattttacagtttttcttgtacagagtacttgctgttagcccaaggttaaaaagttcataacagattttttttggactgttttgttgggcagtgcctgataagcttcaaagctgctttattcaataaaaaaaaaacccgaattcactgg

SEQ ID NO: 1036 - DNA, 2630 bp, Homo sapiens
cggcggccgttgcagcggcggcggcgagagcggcgggagcccgaggcggcggcgctcgcggcccatcgtggggcccgagctgtgcgcctcggctcggagcccggaccgggcgggggcgccgacgtgcctcagcctgccttcgcgagggaggcgggagtgagcagaaaggcttagggcccagggggcggggaaggggggccgggcctggatccggcggggaggccgagccggaggccggaccgtggctcgcgctgtccccgggacgcggatcgaacgttggcggcgcggatcgcacgtcggcggccggtggaacgcgggagctgggcggcgcgcggactggggccatggcgtctgtgcaggcgtcccgccgccagtggtgctacctgtgcgacctgcccaagatgccgtgggccatggtgtgggacttcagcgaggccgtgtgtcgcggctgcgtgaacttcgagggcgcggaccgcatcgaactgctcatcgatgccgcccgccagctcaagcgcagccacgtgctccccgagggccgctcgcccgggcccccggcccttaagcacccggccaccaaggacctggcggcggcagccgcacaggggccccagctgccgcccccgcaggcccagccccagccgtcagggaccggcggcggcgtgtcgggccaggaccgctatgacagggccacatcatcaggccgcctccccctgccctcgcccgccctggagtacactctggggtcccgcctggccaatgggctgggccgtgaggaggccgtggctgagggggcgcgaagggccttgcttggctccatgcctggcttgatgccccctgggctgctggcagctgcagtgtctggcctgggaagccgaggcctgacgctggcacccggcttgagtcctgcccgtcccctcttcggctccgatttcgagaaagagaagcagcagaggaatgcggactgtctggcagaactgaacgaggccatgcgaggccgcgcagaggaatggcacgggcgccccaaagcagtgcgggaacagctactggcgctgtccgcctgcgccccgttcaatgtgcgcttcaagaaggatcacgggctggtggggcgagtgttcgccttcgatgctactgcccgtcctccaggatacgagttcgagctgaagctcttcaccgaatacccctgtggttccggcaatgtgtacgccggcgtcctggcagtggctcgccagatgttccacgatgctctgcgggagccgggcaaggcactggcttcttcgggcttcaagtacctcgaatatgaacgccggcatggatcaggagaatggcggcagctgggcgagctgcttaccgacggcgtccgcagcttccgcgagccagctcccgcggaggccctgccccagcagtacccagagccggcccctgcggctctctgtggcccacccccgcgagccccatcccggaacctggcgcccacgccgcgccgtcgcaaggcatcccccgagccggagggcgaggcggctgggaagatgaccaccgaggagcagcagcaacggcactgggtggcacccggcggcccgtactccgctgagacccctggtgtgccctcgcccattgccgccctgaagaatgtggccgaagccctgggccactcacccaaggaccctggcggaggcggggggcctgtgcgtgcagggggcgccagccctgcagcctcctccacggcccagccgccaacccagcatcgccttgtggcccgcaacggcgaagcagaagtcagtcccacagcgggggccgaagctgtcagcgggggtggcagcggcactggggcgacccctggggcccccctgtgctgtaccctgtgcagggagcggctggaagacacccacttcgtccagtgcccctcggtgcccggacacaagttctgctttccctgctcccgggagttcatcaaggcgcagggcccggccggggaggtgtactgcccgagcggagacaagtgcccgctggtcggctcctccgtgccctgggccttcatgcagggcgagatcgccaccatccttgctggagacatcaaagttaagaaagaacgggacccctaggctaccactgcctccaggctactgccctctgcccctttgccacccaccgctgccgcggataaattattccctccccgacccagcccagtgccacctctatctgtgtacatactcccttcttccacccagatgggtcccctggggtagatgcattgtgggtggggggagaaagcttgtggctcctgtccgagggggtgtttggggtcccttggcccctccagtttccctctgtcctccttggcttggctttgctgctgcttgtagttgggggagaggtgcccccctcctccttgagaagggacctcctgaaaactcgctctttataaacgaggcaaaagcatttaattcccacccccccaccccccgctcccttctgctccttcaataaaccgaaagatgggttttttttttcaaaaaaaaaaaaaaaaaaaaaaaaaaaaaaaaaaaaaaaaaaaaaaaaaaaaaaaaaaaaaaaaaaaaaaaaaaaaaaaaaaaaaaaaaaaaaaaaaaaaaaaaaaaaaaaaaaaaaaa

SEQ ID NO: 1037 - protein, 584 aa, Homo sapiens
MASVQASRRQWCYLCDLPKMPWAMVWDFSEAVCRGCVNFEGADRIELLIDAARQLKRSHVLPEGRSPGPPALKHPATKDLAAAAAQGPQLPPPQAQPQPSGTGGGVSGQDRYDRATSSGRLPLPSPALEYTLGSRLANGLGREEAVAEGARRALLGSMPGLMPPGLLAAAVSGLGSRGLTLAPGLSPARPLFGSDFEKEKQQRNADCLAELNEAMRGRAEEWHGRPKAVREQLLALSACAPFNVRFKKDHGLVGRVFAFDATARPPGYEFELKLFTEYPCGSGNVYAGVLAVARQMFHDALREPGKALASSGFKYLEYERRHGSGEWRQLGELLTDGVRSFREPAPAEALPQQYPEPAPAALCGPPPRAPSRNLAPTPRRRKASPEPEGEAAGKMTTEEQQQRHWVAPGGPYSAETPGVPSPIAALKNVAEALGHSPKDPGGGGGPVRAGGASPAASSTAQPPTQHRLVARNGEAEVSPTAGAEAVSGGGSGTGATPGAPLCCTLCRERLEDTHFVQCPSVPGHKFCFPCSREFIKAQGPAGEVYCPSGDKCPLVGSSVPWAFMQGEIATILAGDIKVKKERDP

SEQ ID NO: 1038 - DNA, 2744 bp, Homo sapiens
gcggagcgagggaaacggactcggcggcgccggcatgaggagctgagcgtctcgggcgaggcgggctgacggcagcaccatgcaggcggcagtggctgtgtccgtgcccttcttgctgctctgtgtcctggggacctgccctccggcgcgctgcggccaggcaggagacgcctcattgatggagctagagaagaggaaggaaaaccgcttcgtggagcgccagagcatcgtgccactgcgcctcatctaccgctcgggcggcgaagacgaaagtcggcacgacgcgctcgacacgcgggtgcggggcgacctcggtggcccgcagttgactcatgttgaccaagcaagcttccaggttgatgcctttggaacgtcattcattctcgatgtcgtgctaaatcatgatttgctgtcctctgaatacatagagagacacattgaacatggaggcaagactgtggaagttaaaggaggagagcactgttactaccagggccatatccgaggaaaccctgactcatttgttgcattgtcaacatgccacggacttcatgggatgttctatgacgggaaccacacatatctcattgagccagaagaaaatgacactactcaagaggatttccattttcattcagtttacaaatccagactgtttgaattttccttggatgatcttccatctgaatttcagcaagtaaacattactccatcaaaatttattttgaagccaagaccaaaaaggagtaaacggcagcttcgtcgatatcctcgtaatgtagaagaagaaaccaaatacattgaactgatgattgtgaatgatcaccttatgtttaaaaaacatcggctttccgttgtacataccaatacctatgcgaaatctgtggtgaacatggcagatttaatatataaagaccaacttaagaccaggatagtattggttgctatggaaacctgggcgactgacaacaagtttgccatatctgaaaatccattgatcaccctacgtgagtttatgaaatacaggagggattttatcaaagagaaaagtgatgcagttcaccttttttcgggaagtcaatttgagagtagccggagcggggcagcttatattggtgggatttgctcgttgctgaaaggaggaggcgtgaatgaatttgggaaaactgatttaatggctgttacacttgcccagtcattagcccataatattggtattatctcagacaaaagaaagttagcaagtggtgaatgtaaatgcgaggacacgtggtccgggtgcataatgggagacactggctattatcttcctaaaaagttcacccagtgtaatattgaagagtatcatgacttcctgaatagtggaggtggtgcctgccttttcaacaaaccttctaagcttcttgatcctcctgagtgtggcaatggcttcattgaaactggagaggagtgtgattgtggaaccccggccgaatgtgtccttgaaggagcagagtgttgtaagaaatgcaccttgactcaagactctcaatgcagtgacggtctttgctgtaaaaagtgcaagtttcagcctatgggcactgtgtgccgagaagcagtaaatgattgtgatattcgtgaaacgtgctcaggaaattcaagccagtgtgcccctaatattcataaaatggatggatattcatgtgatggtgttcagggaatttgctttggaggaagatgcaaaaccagagatagacaatgcaaatacatttgggggcaaaaggtgacagcatcagacaaatattgctatgagaaactgaatattgaagggacggagaagggtaactgtgggaaagacaaagacacatggatacagtgcaacaaacgggatgtgctttgtggttaccttttgtgtaccaatattggcaatatcccaaggcttggagaactcgatggtgaaatcacatctactttagttgtgcagcaaggaagaacattaaactgcagtggtgggcatgttaagcttgaagaagatgtagatcttggctatgtggaagatgggacaccttgtggtccccaaatgatgtgcttagaacacaggtgtcttcctgtggcttctttcaactttagtacttgcttgagcagtaaagaaggcactatttgctcaggaaatggagtttgcagtaatgagctgaagtgtgtgtgtaacagacactggataggttctgattgcaacacttacttccctcacaatgatgatgcaaagactggtatcactctgtctggcaatggtgttgctggcaccaatatcataataggcataattgctggcaccattttagtgctggccctcatattaggaataactgcgtggggttataaaaactatcgagaacagagacagttaccccagggagattatgtaaaaaagcctggagatggtgactctttttatagcgacattcctcccggagtcagcacaaactcagcatctagttctaagaagaggtcaaatgggctctctcattcttggagtgaaaggattccagacacaaaacatatttcagacatctgtgaaaatgggcgacctcgaagtaactcttggcaaggtaacctgggaggcaacaaaaagaaaatcagaggcaaaagatttagacctcggtctaattcaactgagtaagtctgaacctctaatggaaaaaggcactccaaggtcctgtgcaaatagtgtcaaaagtaaattaagcagatagtcaaagaactgt

SEQ ID NO: 1039 - protein, 859 aa, Homo sapiens
MQAAVAVSVPFLLLCVLGTCPPARCGQAGDASLMELEKRKENRFVERQSIVPLRLIYRSGGEDESRHDALDTRVRGDLGGPQLTHVDQASFQVDAFGTSFILDVVLNHDLLSSEYIERHIEHGGKTVEVKGGEHCYYQGHIRGNPDSFVALSTCHGLHGMFYDGNHTYLIEPEENDTTQEDFHFHSVYKSRLFEFSLDDLPSEFQQVNITPSKFILKPRPKRSKRQLRRYPRNVEEETKYIELMIVNDHLMFKKHRLSVVHTNTYAKSVVNMADLIYKDQLKTRIVLVAMETWATDNKFAISENPLITLREFMKYRRDFIKEKSDAVHLFSGSQFESSRSGAAYIGGICSLLKGGGVNEFGKTDLMAVTLAQSLAHNIGIISDKRKLASGECKCEDTWSGCIMGDTGYYLPKKFTQCNIEEYHDFLNSGGGACLFNKPSKLLDPPECGNGFIETGEECDCGTPAECVLEGAECCKKCTLTQDSQCSDGLCCKKCKFQPMGTVCREAVNDCDIRETCSGNSSQCAPNIHKMDGYSCDGVQGICFGGRCKTRDRQCKYIWGQKVTASDKYCYEKLNIEGTEKGNCGKDKDTWIQCNKRDVLCGYLLCTNIGNIPRLGELDGEITSTLVVQQGRTLNCSGGHVKLEEDVDLGYVEDGTPCGPQMMCLEHRCLPVASFNFSTCLSSKEGTICSGNGVCSNELKCVCNRHWIGSDCNTYFPHNDDAKTGITLSGNGVAGTNIIIGIIAGTILVLALILGITAWGYKNYREQRQLPQGDYVKKPGDGDSFYSDIPPGVSTNSASSSKKRSNGLSHSWSERIPDTKHISDICENGRPRSNSWQGNLGGNKKKIRGKRFRPRSNSTE

SEQ ID NO: 1040 - DNA, 3347 bp, Homo sapiens
gcggagcgagggaaacggactcggcggcgccggcatgaggagctgagcgtctcgggcgaggcgggctgacggcagcaccatgcaggcggcagtggctgtgtccgtgcccttcttgctgctctgtgtcctggggacctgccctccggcgcgctgcggccaggcaggagacgcctcattgatggagctagagaagaggaaggaaaaccgcttcgtggagcgccagagcatcgtgccactgcgcctcatctaccgctcgggcggcgaagacgaaagtcggcacgacgcgctcgacacgcgggtgcggggcgacctcggtggcccgcagttgactcatgttgaccaagcaagcttccaggttgatgcctttggaacgtcattcattctcgatgtcgtgctaaatcatgatttgctgtcctctgaatacatagagagacacattgaacatggaggcaagactgtggaagttaaaggaggagagcactgttactaccagggccatatccgaggaaaccctgactcatttgttgcattgtcaacatgccacggacttcatgggatgttctatgacgggaaccacacatatctcattgagccagaagaaaatgacactactcaagaggatttccattttcattcagtttacaaatccagactgtttgaattttccttggatgatcttccatctgaatttcagcaagtaaacattactccatcaaaatttattttgaagccaagaccaaaaaggagtaaacggcagcttcgtcgatatcctcgtaatgtagaagaagaaaccaaatacattgaactgatgattgtgaatgatcaccttatgtttaaaaaacatcggctttccgttgtacataccaatacctatgcgaaatctgtggtgaacatggcagatttaatatataaagaccaacttaagaccaggatagtattggttgctatggaaacctgggcgactgacaacaagtttgccatatctgaaaatccattgatcaccctacgtgagtttatgaaatacaggagggattttatcaaagagaaaagtgatgcagttcaccttttttcgggaagtcaatttgagagtagccggagcggggcagcttatattggtgggatttgctcgttgctgaaaggaggaggcgtgaatgaatttgggaaaactgatttaatggctgttacacttgcccagtcattagcccataatattggtattatctcagacaaaagaaagttagcaagtggtgaatgtaaatgcgaggacacgtggtccgggtgcataatgggagacactggctattatcttcctaaaaagttcacccagtgtaatattgaagagtatcatgacttcctgaatagtggaggtggtgcctgccttttcaacaaaccttctaagcttcttgatcctcctgagtgtggcaatggcttcattgaaactggagaggagtgtgattgtggaaccccggccgaatgtgtccttgaaggagcagagtgttgtaagaaatgcaccttgactcaagactctcaatgcagtgacggtctttgctgtaaaaagtgcaagtttcagcctatgggcactgtgtgccgagaagcagtaaatgattgtgatattcgtgaaacgtgctcaggaaattcaagccagtgtgcccctaatattcataaaatggatggatattcatgtgatggtgttcagggaatttgctttggaggaagatgcaaaaccagagatagacaatgcaaatacatttgggggcaaaaggtgacagcatcagacaaatattgctatgagaaactgaatattgaagggacggagaagggtaactgtgggaaagacaaagacacatggatacagtgcaacaaacgggatgtgctttgtggttaccttttgtgtaccaatattggcaatatcccaaggcttggagaactcgatggtgaaatcacatctactttagttgtgcagcaaggaagaacattaaactgcagtggtgggcatgttaagcttgaagaagatgtagatcttggctatgtggaagatgggacaccttgtggtccccaaatgatgtgcttagaacacaggtgtcttcctgtggcttctttcaactttagtacttgcttgagcagtaaagaaggcactatttgctcaggaaatggagtttgcagtaatgagctgaagtgtgtgtgtaacagacactggataggttctgattgcaacacttacttccctcacaatgatgatgcaaagactggtatcactctgtctggcaatggtgttgctggcaccaatatcataataggcataattgctggcaccattttagtgctggccctcatattaggaataactgcgtggggttataaaaactatcgagaacagaggtcaaatgggctctctcattcttggagtgaaaggattccagacacaaaacatatttcagacatctgtgaaaatgggcgacctcgaagtaactcttggcaaggtaacctgggaggcaacaaaaagaaaatcagaggcaaaagatttagacctcggtctaattcaactgagactttatctcctgccaagtctccttcttcatcaactgggtctattgcctccagcagaaaatacccttacccaatgcctccacttcctgatgaggacaagaaagtgaaccgacaaagtgccaggctatgggagacatccatttaagatcaactgtttacatgtgatacatcgaaaactgtttacttcaacttttatagaaacccaggctcatggaatcactgcaaatctatctgctcttcagacaatacgaagaccctctgagatgctacagaggagaggaagcggagtttcacatctggttaccattttctttttgtcattggcttaggatttaactaaccatgaaaagaactactgaaatattacactataacatggaacaataaaggtactggtatgttaatggataatccgcatgacagataatatgtagaaatattcataaagttaactcacatgacccaaatgtagcaagtttcctaaggtacaatagtggattcagaacttgacgttctgaggcacatcctcactgtaaacagtaatgctatatgcatgaagcttctgtttattgttttccatatttaaggaaacaacatcccataatagaaatgagcatgcagggctaaggcatataggatttttctgcaggactttaaagctttgaaaggccaatatcccataggctaactttaaacatgtatttttatttttgttttgttttttacttttcatatttatattagcatacaaggacaattgtatatatgtaacatttttaaaattttaaaaaaaaaaaaaa

SEQ ID NO: 1041 - protein, 870 aa, Homo sapiens
MQAAVAVSVPFLLLCVLGTCPPARCGQAGDASLMELEKRKENRFVERQSIVPLRLIYRSGGEDESRHDALDTRVRGDLGGPQLTHVDQASFQVDAFGTSFILDVVLNHDLLSSEYIERHIEHGGKTVEVKGGEHCYYQGHIRGNPDSFVALSTCHGLHGMFYDGNHTYLIEPEENDTTQEDFHFHSVYKSRLFEFSLDDLPSEFQQVNITPSKFILKPRPKRSKRQLRRYPRNVEEETKYIELMIVNDHLMFKKHRLSVVHTNTYAKSVVNMADLIYKDQLKTRIVLVAMETWATDNKFAISENPLITLREFMKYRRDFIKEKSDAVHLFSGSQFESSRSGAAYIGGICSLLKGGGVNEFGKTDLMAVTLAQSLAHNIGIISDKRKLASGECKCEDTWSGCIMGDTGYYLPKKFTQCNIEEYHDFLNSGGGACLFNKPSKLLDPPECGNGFIETGEECDCGTPAECVLEGAECCKKCTLTQDSQCSDGLCCKKCKFQPMGTVCREAVNDCDIRETCSGNSSQCAPNIHKMDGYSCDGVQGICFGGRCKTRDRQCKYIWGQKVTASDKYCYEKLNIEGTEKGNCGKDKDTWIQCNKRDVLCGYLLCTNIGNIPRLGELDGEITSTLVVQQGRTLNCSGGHVKLEEDVDLGYVEDGTPCGPQMMCLEHRCLPVASFNFSTCLSSKEGTICSGNGVCSNELKCVCNRHWIGSDCNTYFPHNDDAKTGITLSGNGVAGTNIIIGIIAGTILVLALILGITAWGYKNYREQRSNGLSHSWSERIPDTKHISDICENGRPRSNSWQGNLGGNKKKIRGKRFRPRSNSTETLSPAKSPSSSTGSIASSRKYPYPMPPLPDEDKKVNRQSARLWETSI

SEQ ID NO: 1042 - DNA, 2636 bp, Homo sapiens
gcggagcgagggaaacggactcggcggcgccggcatgaggagctgagcgtctcgggcgaggcgggctgacggcagcaccatgcaggcggcagtggctgtgtccgtgcccttcttgctgctctgtgtcctggggacctgccctccggcgcgctgcggccaggcaggagacgcctcattgatggagctagagaagaggaaggaaaaccgcttcgtggagcgccagagcatcgtgccactgcgcctcatctaccgctcgggcggcgaagacgaaagtcggcacgacgcgctcgacacgcgggtgcggggcgacctcggtggcccgcagttgactcatgttgaccaagcaagcttccaggttgatgcctttggaacgtcattcattctcgatgtcgtgctaaatcatgatttgctgtcctctgaatacatagagagacacattgaacatggaggcaagactgtggaagttaaaggaggagagcactgttactaccagggccatatccgaggaaaccctgactcatttgttgcattgtcaacatgccacggacttcatgggatgttctatgacgggaaccacacatatctcattgagccagaagaaaatgacactactcaagaggatttccattttcattcagtttacaaatccagactgtttgaattttccttggatgatcttccatctgaatttcagcaagtaaacattactccatcaaaatttattttgaagccaagaccaaaaaggagtaaacggcagcttcgtcgatatcctcgtaatgtagaagaagaaaccaaatacattgaactgatgattgtgaatgatcaccttatgtttaaaaaacatcggctttccgttgtacataccaatacctatgcgaaatctgtggtgaacatggcagatttaatatataaagaccaacttaagaccaggatagtattggttgctatggaaacctgggcgactgacaacaagtttgccatatctgaaaatccattgatcaccctacgtgagtttatgaaatacaggagggattttatcaaagagaaaagtgatgcagttcaccttttttcgggaagtcaatttgagagtagccggagcggggcagcttatattggtgggatttgctcgttgctgaaaggaggaggcgtgaatgaatttgggaaaactgatttaatggctgttacacttgcccagtcattagcccataatattggtattatctcagacaaaagaaagttagcaagtggtgaatgtaaatgcgaggacacgtggtccgggtgcataatgggagacactggctattatcttcctaaaaagttcacccagtgtaatattgaagagtatcatgacttcctgaatagtggaggtggtgcctgccttttcaacaaaccttctaagcttcttgatcctcctgagtgtggcaatggcttcattgaaactggagaggagtgtgattgtggaaccccggccgaatgtgtccttgaaggagcagagtgttgtaagaaatgcaccttgactcaagactctcaatgcagtgacggtctttgctgtaaaaagtgcaagtttcagcctatgggcactgtgtgccgagaagcagtaaatgattgtgatattcgtgaaacgtgctcaggaaattcaagccagtgtgcccctaatattcataaaatggatggatattcatgtgatggtgttcagggaatttgctttggaggaagatgcaaaaccagagatagacaatgcaaatacatttgggggcaaaaggtgacagcatcagacaaatattgctatgagaaactgaatattgaagggacggagaagggtaactgtgggaaagacaaagacacatggatacagtgcaacaaacgggatgtgctttgtggttaccttttgtgtaccaatattggcaatatcccaaggcttggagaactcgatggtgaaatcacatctactttagttgtgcagcaaggaagaacattaaactgcagtggtgggcatgttaagcttgaagaagatgtagatcttggctatgtggaagatgggacaccttgtggtccccaaatgatgtgcttagaacacaggtgtcttcctgtggcttctttcaactttagtacttgcttgagcagtaaagaaggcactatttgctcaggaaatggagtttgcagtaatgagctgaagtgtgtgtgtaacagacactggataggttctgattgcaacacttacttccctcacaatgatgatgcaaagactggtatcactctgtctggcaatggtgttgctggcaccaatatcataataggcataattgctggcaccattttagtgctggccctcatattaggaataactgcgtggggttataaaaactatcgagaacagaggtcaaatgggctctctcattcttggagtgaaaggattccagacacaaaacatatttcagacatctgtgaaaatgggcgacctcgaagtaactcttggcaaggtaacctgggaggcaacaaaaagaaaatcagaggcaaaagatttagacctcggtctaattcaactgagtaagtctgaacctctaatggaaaaaggcactccaaggtcctgtgcaaatagtgtcaaaagtaaattaagcagatagtcaaagaactgt

SEQ ID NO: 1043 - protein, 823 aa, Homo sapiens
MQAAVAVSVPFLLLCVLGTCPPARCGQAGDASLMELEKRKENRFVERQSIVPLRLIYRSGGEDESRHDALDTRVRGDLGGPQLTHVDQASFQVDAFGTSFILDVVLNHDLLSSEYIERHIEHGGKTVEVKGGEHCYYQGHIRGNPDSFVALSTCHGLHGMFYDGNHTYLIEPEENDTTQEDFHFHSVYKSRLFEFSLDDLPSEFQQVNITPSKFILKPRPKRSKRQLRRYPRNVEEETKYIELMIVNDHLMFKKHRLSVVHTNTYAKSVVNMADLIYKDQLKTRIVLVAMETWATDNKFAISENPLITLREFMKYRRDFIKEKSDAVHLFSGSQFESSRSGAAYIGGICSLLKGGGVNEFGKTDLMAVTLAQSLAHNIGIISDKRKLASGECKCEDTWSGCIMGDTGYYLPKKFTQCNIEEYHDFLNSGGGACLFNKPSKLLDPPECGNGFIETGEECDCGTPAECVLEGAECCKKCTLTQDSQCSDGLCCKKCKFQPMGTVCREAVNDCDIRETCSGNSSQCAPNIHKMDGYSCDGVQGICFGGRCKTRDRQCKYIWGQKVTASDKYCYEKLNIEGTEKGNCGKDKDTWIQCNKRDVLCGYLLCTNIGNIPRLGELDGEITSTLVVQQGRTLNCSGGHVKLEEDVDLGYVEDGTPCGPQMMCLEHRCLPVASFNFSTCLSSKEGTICSGNGVCSNELKCVCNRHWIGSDCNTYFPHNDDAKTGITLSGNGVAGTNIIIGIIAGTILVLALILGITAWGYKNYREQRSNGLSHSWSERIPDTKHISDICENGRPRSNSWQGNLGGNKKKIRGKRFRPRSNSTE

SEQ ID NO: 1044 - DNA, 885 bp, Homo sapiens
ctcgaggccaagaattcggcacgagggaacctgtaaacgctctcggaattatggcggcggtggatatccgagacaatctgctgggaatttcttgggttgacagctcttggatccctattttgaacagtggtagtgtcctggattacttttcagaaagaagtaatcctttttatgacagaacatgtaataatgaagtggtcaaaatgcagaggctaacattagaacacttgaatcagatggttggaatcgagtacatccttttgcatgctcaagagcccattcttttcatcattcggaagcaacagcggcagtcccctgcccaagttatcccactagctgattactatatcattgctggagtgatctatcaggcaccagacttgggatcagttataaactctagagtgcttactgcagtgcatggtattcagtcagcttttgatgaagctatgtcatactgtcgatatcatccttccaaagggtattggtggcacttcaaagatcatgaagagcaaggtaagtagaacatccataccctcctaaaacactttttgatcctctgagaatgaagctgttttctttaggaaaatggctgttgatcttttctaagtgtgtttcactttttcatgggatgatggctttgttgcagctgagattcatgtaactagagtggtaataatagtttcacataggaacagatgcaagttcactctgttagttaactggtagtctttgttaaggtgattcaaggttttaaaatatttggggccaggtgtggtggctcactcctgtaatcccggcactttggaatgccaaggcaggtggatcacctgagcctaggagttcaagatcagcctgggcaacatagtgaaacctggtctctgc

SEQ ID NO: 1045 - protein, 157 aa, Homo sapiens
MAAVDIRDNLLGISWVDSSWIPILNSGSVLDYFSERSNPFYDRTCNNEVVKMQRLTLEHLNQMVGIEYILLHAQEPILFIIRKQQRQSPAQVIPLADYYIIAGVIYQAPDLGSVINSRVLTAVHGIQSAFDEAMSYCRYHPSKGYWWHFKDHEEQGK

SEQ ID NO: 1046 - DNA, 3576 bp, Homo sapiens
ggatcgcgctgatgtggccccaaccccgcctccctccccgccccgcgatgtcggaagaaacccgacagagcaaattggccgcagcgaagaaaaagttgagagaatatcagcagaggaatagccctggtgttcctacaggagcgaaaaagaagaagaaaataaaaaatggcagtaaccctgagacaaccacttctggtggttgccactcacctgaggatacacccaaggacaatgctgctactctacaaccatctgatgacaccgtgttacctggcggtgtcccttcccctggtgccagtctcactagcatggcggcatctcagaatcatgatgctgacaatgtccctaatctcatggatgaaaccaagactttctcatcaaccgagagcctgcgacaactctcccaacagctcaatggtcttgtttgtgagtctgcgacatgtgtcaatggggagggccctgcatcgtctgctaacctgaaggatctggagagccggtaccaacagctagcggtagccctggactccagctatgtaacaaacaaacaactcaatatcacgatagagaaattgaaacaacagaaccaagaaattacggatcagttggaagaagaaaagaaagaatgccaccaaaagcagggagccctaagggagcagttacaggttcacattcagaccatagggatcctcgtatcagagaaagctgagttacagacagccctggctcacactcagcatgctgccaggcagaaagaaggagagtctgaagatctggccagccgcctgcagtattcccggcggcgtgtgggagagttggagcgggctctctctgctgtctccacgcagcagaagaaggcagacaggtacaacaaggagttaaccaaagagagagacgccctcaggctggagttatacaagaacacccaaagcaatgaggacctgaagcaagagaaatcagaattggaagagaagcttcgggtcctagtgactgagaaggctggcatgcagcttaacttggaagaattgcaaaagaagttagagatgacggaactcctgcttcaacagttttcaagccggtgtgaagcccctgatgctaaccagcagttacagcaggccatggaggagcgggcacagctggaagcacacctggggcaggtaatggagtcggttagacaactacaaatggagagagataaatatgcggagaatctcaaaggagagagcgccatgtggcggcagaggatgcagcagatgtcagagcaggtgcacacattgagagaggagaaggaatgtagcatgagtcgggtacaggagctggagacgagcttggctgaactgaggaaccagatggctgaacccccgcccccagagcccccagcagggccctccgaggtggagcagcagctacaagcggaggctgagcacctgcggaaggagctggagggtctggcaggacagcttcaagcccaggtgcaagacaatgagggcttgagtcgcctgaaccgggagcaggaggagaggctgctggagctggagcgggcggccgagctctggggggagcaggcggaggcgcgcaggcaaatcctggagaccatgcagaacgaccgcactaccatcagccgcgcactctcccagaaccgggagctcaaggagcagctggctgagctgcagagcggatttgtaaagctgactaatgagaacatggagatcaccagcgcactgcagtcggagcagcacgtcaagagggagctgggaaagaagctgggcgagctgcaggagaagctgagcgagctgaaggaaacggtggagctgaagagccaagaggctcaaagtctgcagcagcagcgagaccagtacctgggacacctgcagcagtatgtggccgcctatcagcagctgacctctgagaaggaggtgctgcataatcagctactgctgcagacccagctcgtggaccagctgcagcagcaggaagctcagggcaaagcggtggccgagatggcccgccaagagttgcaggaaacccaggagcgcctggaagctgccacccagcagaatcagcagctacgggcccagttgagcctcatggctcaccctggggaaggagatggactggaccgggaggaggaggaggatgaggaggaggaggaggaggaggcggtggcagtacctcagcccatgccaagcatcccggaggacctggagagccgggaagccatggtggcatttttcaactcagctgtagccagtgccgaggaggagcaggcaaggctacgtgggcagctgaaggagcaaagggtgcgctgccggcgcctggctcacctgctggcctcggcccagaaggagcctgaggcagcagccccagccccagggaccgggggtgattctgtgtgtggggagacccaccgggccctgcagggggccatggagaagctgcagagccgctttatggagctcatgcaggagaaggcagacctgaaggagagggtagaggaactggaacatcgctgcatccagctttctggagagacagacaccattggagagtacattgcactgtaccagagccagagggcagtgctgaaggagcggcaccgggagaaggaggagtacatcagcaggctggcccaagacaaggaggagatgaaggtgaagctgctggagctgcaggagctggtcttacggcttgtgggcgaccgcaacgagtggcatggcagattcctggcagctgcccagaaccctgctgatgagcccacttcaggggccccagccccccaggaacttggggctgccaaccagcagggtgatctttgcgaggtgagcctcgccggcagtgtggagcctgcccaaggagaggccagggagggttctccccgtgacaaccccactgcacagcagatcatgcagctgcttcgtgagatgcagaacccccgggagcgcccaggcttgggcagcaacccctgcattccttttttttaccgggctgacgagaatgatgaggtgaagatcactgtcatctaaaagccggctactgtcagcaaagcctgaagaagtggggctggataccctgcccccaccatatccctaccatcccttctcagtcaaccctttacccttacagtagcaagcatagacccctgtctaacgggggtagacaggtgcagatgaggtgaagatcactgtcatctaaaagctggccactaaattaaaaaaaaattaaaagttatgggattaaaaaaagttatgggataaaaaaggttatgggtaacttatggtataaaagttatgaaaaaaggccaggtgcagtggctcacgcctgtaatcccagcacttttgggaggctgaggttgggagttcaagaccagcctggtcaacatggtgaaactgtgtctctactaaaaatacaaaaattagccaggcatggtggcacgtgcctgtaatcccagctactcgggaggctgaggcaggagaatcgcttgaacctgggaggtggaggttgcagtgggctgagatcacgccattgcactccagcctgggcgacagagtgagactctgtctcaaaaaaaaaaaaaaaaaa

SEQ ID NO: 1047 - protein, 620 aa, Homo sapiens
MESVRQLQMERDKYAENLKGESAMWRQRMQQMSEQVHTLREEKECSMSRVQELETSLAELRNQMAEPPPPEPPAGPSEVEQQLQAEAEHLRKELEGLAGQLQAQVQDNEGLSRLNREQEERLLELERAAELWGEQAEARRQILETMQNDRTTISRALSQNRELKEQLAELQSGFVKLTNENMEITSALQSEQHVKRELGKKLGELQEKLSELKETVELKSQEAQSLQQQRDQYLGHLQQYVAAYQQLTSEKEVLHNQLLLQTQLVDQLQQQEAQGKAVAEMARQELQETQERLEAATQQNQQLRAQLSLMAHPGEGDGLDREEEEDEEEEEEEAVAVPQPMPSIPEDLESREAMVAFFNSAVASAEEEQARLRGQLKEQRVRCRRLAHLLASAQKEPEAAAPAPGTGGDSVCGETHRALQGAMEKLQSRFMELMQEKADLKERVEELEHRCIQLSGETDTIGEYIALYQSQRAVLKERHREKEEYISRLAQDKEEMKVKLLELQELVLRLVGDRNEWHGRFLAAAQNPADEPTSGAPAPQELGAANQQGDLCEVSLAGSVEPAQGEAREGSPRDNPTAQQIMQLLREMQNPRERPGLGSNPCIPFFYRADENDEVKITVI

SEQ ID NO: 1048 - DNA, 1212 bp, Homo sapiens
atgggaccattgcagtttagagatgtggccatagaattctctctggaggagtggcattgcctggacactgcacagcggaatttatatagggatgtgatgttagagaactacagaaacttggtcttccttggtattgttgtctctaagccagacctggttacctgtctggagcaaggaaaaaaacctttaactatggaaagacatgagatgattgccaaacccccagttatgagttctcattttgcccaagacctttggccagagaacatacaaaattctttccaaatagggatgctgagaagatatgaagaatgcagacatgacaatttacagttaaaaaaaggctgtaaaagcgtgggtgagcataaggtgcacaaaggaggttataatggacttaaccaatgtttgacaactacccagaaagaaatatttcaatgtgataaatatggaaaagtctttcataagttttcaaattcaaacacatataagacaagacatactggaataaatcttttcaaatgtataatatgtggcaaagcttttaaacggtcctcaacccttactacacataagaaaattcatactggagagaaaccttacagatgtgaagaatgtggcaaagcttttaaccaatctgcaaaccttactacacataagagaattcataccggagagaaaccttacaaatgtgaagaatgtggcaaagcttttaactggtcctcagaccttaataaacataagaaaattcatattgaacgaaaaccctacatagtgaagaatgtgacagatcttttaaatgttcctccacttttaattagcataagataattcatactggagagaaaccctatgaatgtgatgaatgtgggaaagcctttaaccagccctcgactcttagtaaatttgagagtttatatggaacacaaaccctacaaatataaagaaatgtgacaaagctttttaaggaagttctcaacccttattacacataattcataccaaacagaagccctacaagtgtgaagaatgtggcaaaacctataaacctataacaagttctcaattcctttttttttgagatggagtttcactcttgtcaccgaggctggagtgcaatgacatgatctccgttcactgcaatctctgcctcctgggtttaagccattcttctgcctcagcctcccaagtagctgggattacaggtgcccaaca

SEQ ID NO: 1049 - protein, 275 aa, Homo sapiens
MGPLQFRDVAIEFSLEEWHCLDTAQRNLYRDVMLENYRNLVFLGIVVSKPDLVTCLEQGKKPLTMERHEMIAKPPVMSSHFAQDLWPENIQNSFQIGMLRRYEECRHDNLQLKKGCKSVGEHKVHKGGYNGLNQCLTTTQKEIFQCDKYGKVFHKFSNSNTYKTRHTGINLFKCIICGKAFKRSSTLTTHKKIHTGEKPYRCEECGKAFNQSANLTTHKRIHTGEKPYKCEECGKAFNWSSDLNKHKKIHIERKPYIVKNVTDLLNVPPLLISIR

SEQ ID NO: 1050 - DNA, 1326 bp, Homo sapiens
atggaaggagacttctcggtgtgcaggaactgtaaaagacatgtagtctctgccaacttcaccctccatgaggcttactgcctgcggttcctggtcctgtgtccggagtgtgaggagcctgtccccaaggaaaccatggaggagcactgcaagcttgagcaccagcaggttgggtgtacgatgtgtcagcagagcatgcagaagtcctcgctggagtttcataaggccaatgagtgccaggagcgccctgttgagtgtaagttctgcaaactggacatgcagctcagcaagctggagctccacgagtcctactgtggcagccggacagagctctgccaaggctgtggccagttcatcatgcaccgcatgctcgcccagcacagagatgtctgtcggagtgaacaggcccagctcgggaaaggggaaagaatttcagctcctgaaagggaaatctactgtcattattgcaaccaaatgattccagaaaataagtatttccaccatatgggtaaatgttgtccagactcagagtttaagaaacactttcctgttggaaatccagaaattcttccttcatctcttccaagtcaagctgctgaaaatcaaacttccacgatggagaaagatgttcgtccaaagacaagaagtataaacagatttcctcttcattctgaaagttcatcaaagaaagcaccaagaagcaaaaacaaaaccttggatccacttttgatgtcagagcccaagcccaggaccagctcccctagaggagataaagcagcctatgacattctgaggagatgttctcagtgtggcatcctgcttcccctgccgatcctaaatcaacatcaggagaaatgccggtggttagcttcatcaaaaaggaaaacaagtgagaaatttcagctagatttggaaaaggaaaggtactacaaattcaaaagatttcacttttaacactggcattcctgcctacttgctgtggtggtcttgtgaaaggtgatgggttttattcgttgggctttaaaagaaaaggtttggcagaactaaaaacaaaactcacgtatcatctcaatagatacagaaaaggcttttgataaaattcaacttgacttcatgttaaaaaccctcaacaaaccaggcgtcgaaggaacatacctcaaaataataagagccatctatgacaaaaccacagccaacatcatactgaatgagcaaaagctggagcattactcttgagaagtagaacaaggcacttcagtcctattcaacatagtactggaagtctcgccacagcaatcaggcaagagaaagaagtaaaaggcaccc

SEQ ID NO: 1051 - protein, 317 aa, Homo sapiens
MEGDFSVCRNCKRHVVSANFTLHEAYCLRFLVLCPECEEPVPKETMEEHCKLEHQQVGCTMCQQSMQKSSLEFHKANECQERPVECKFCKLDMQLSKLELHESYCGSRTELCQGCGQFIMHRMLAQHRDVCRSEQAQLGKGERISAPEREIYCHYCNQMIPENKYFHHMGKCCPDSEFKKHFPVGNPEILPSSLPSQAAENQTSTMEKDVRPKTRSINRFPLHSESSSKKAPRSKNKTLDPLLMSEPKPRTSSPRGDKAAYDILRRCSQCGILLPLPILNQHQEKCRWLASSKRKTSEKFQLDLEKERYYKFKRFHF

SEQ ID NO: 1052 - DNA, 3837 bp, Homo sapiens
ctgtacgcccagcgacgttggcagaagcgtcgccgcatcccccagaagagcgcaagcacagaagccactcatgagatccactacatcccatctgtgctgctgggtccccaggcgcgggagagcttccgttcatcccggctgcaaacccacaattccgtcattggcgtgcccatccgggagactcccatcctggatgactatgactgtgaggaggatgaggagccacctaggcgggccaaccatgtctcccgcgaggacgagtttggcagccaggtgacccacactctggacagtctgggacatccaggggaagagaaggtggactttgagaagaaaggaggaatcagctttgggagagccaaggggacgtcgggctcagaggcagacgatgaaactcagctgacattctacacggagcagtaccgcagtcgccgccgcagcaaaggtttgctgaaaagcccagtgaacaagacagccctgacactgattgctgtgagttcctgcatcctggccatggtgtgtggcagccagatgtcttgtccactcactgtgaaggtgactctgcatgtgcccgagcacttcatagcagatggaagcagcttcgtggtgagtgaagggagctacctggacatctccgactggttaaacccagccaagctttccctgtattaccagatcaatgccacctcgccatgggtgagggacctctgtggacaaaggacgacagatgcctgtgagcagctctgcgacccagaaaccggagagtgcagctgtcatgaaggctatgcccctgaccctgttcacagacacctgtgtgtgcgcagtgactggggacagagtgaaggaccttggccctacacgacacttgagaggggctatgatctggtgacaggggagcaagcccctgaaaagattctcaggtctactttcagcttgggccaaggcctctggcttcctgtcagcaaaagctttgtggttccgcctgtggagctgtccatcaaccccctggccagctgcaagaccgatgtgctcgtcacggaagaccctgcagatgtcagggaagaagcgatgctgtccacatactttgaaaccatcaatgacctgctgtcttccttcgggccagttcgtgactgctctcggaacaatgggggctgcactcgcaacttcaagtgtgtgtctgaccggcaggtggattcctcgggatgtgtgtgccctgaggagctgaaacccatgaaggatggctctggctgctacgaccactccaaaggcattgactgctctgatggctttaatggcggctgtgagcagctgtgcctgcagcagacgctgcccctgccctacgatgccacttcgagcaccatcttcatgttctgcggttgcgtggaggagtacaaactggctcctgatggaaaatcctgcttaatgctctcagatgtctgcgagggccccaagtgcctcaaacctgactccaaattcaatgataccctctttggagagatgctacatggttacaacaaccggacccagcatgtgaaccaaggccaagtcttccagatgacctttagggagaacaacttcatcaaggactttccccagctggccgatgggctgttggtgatcccgctgccggtggaggagcagtgccggggggtcctctccgagccccttccggacctccaactgctcactggagatatcaggtatgatgaggccatgggttaccccatggtgcagcagtggcgggtccggagcaacctctaccgtgtgaagctcagcaccatcaccctcgcagcaggcttcactaatgttctcaagatcctgaccaaggagagcagtcgggaggagctgctgtccttcatccagcactatggctcccactacatcgcagaggccctctatggctcagagctcacctgcatcatccactttcccagcaagaaggtccagcagcagctgtggctccagtatcagaaagagaccacagagctgggcagcaagaaggagctcaagtccatgcccttcatcacctacctctcaggtttgctgacagcccagatgctgtcagatgaccagctcatttcaggtgtggagattcgctgtgaggagaaggggcgctgtccatctacctgtcacctttgccgccggccaggcaaggagcagctgagccccacaccagtgctgctggaaatcaaccgtgtggtgccactttataccctcatccaagacaatggcacaaaggaggccttcaagagtgcactgatgagttcctactggtgctcagggaaaggggatgtgatcgatgactggtgcaggtgtgacctcagcgcctttgatgccaatgggctccccaactgcagcccccttctgcagccggtgctgcggctgtccccaacagtggagccctccagtactgtggtctccttggagtgggtggatgttcagccagctattgggaccaaggtctccgactatattctgcagcataagaaagtggatgaatacacagacactgacctgtacacaggagaattcctgagttttgctgatgacttactctctggcctgggcacatcttgtgtagcagctggtcgaagccatggagaggtccctgaagtcagtatctactcagtcatcttcaagtgtctggagcccgacggtctctacaagttcactctgtatgctgtggatacacgagggaggcactcagagctaagcacggtgaccctgaggacggcctgtccactggtagatgacaacaaggcagaagaaatagctgacaagatctacaatctgtacaatgggtacacaagtggaaaggagcagcagatggcctacaacacactgatggaggtctcagcctcgatgctgttccgagtccagcaccactacaactctcactatgaaaagtttggcgacttcgtctggagaagtgaggatgagctggggcccaggaaggcccacctgattctacggcgactggagagggtgagtagccactgctccagcctcctgcggagtgcctacatccagagccgcgtggaaacagtgccctatcttttctgccgcagcgaggaggtccggcctgcaggcatggtgtggtatagcatcctcaaggacaccaaaatcacgtgtgaggagaagatggtgtcaatggcccgaaacacgtacggggagtccaagggccggtgagggagggtattgccctccgtgagcacagagactctccatgggagggggagcagtattctcctggatcctggggcctgggtgggctgggggacagctgaggatgggcctagcagatgaagcttgccagcaaggccaaagcaaacggtttctcctgtggatagtggacagagacctttgtaaccaatggaattattcatttttctctatcttttattttttcaaagatattatttgactctatcaaaagtctctcctttttaaaccttttcttatggatggctgtcaatcccgaggcagaagttttcaggtggagaccaagcggcctttgctcttcttccttcttcctgccacactctgctttcttcctgccatggacccctggaggagacctatggagggacagttttgacctgacccctagaggagacagttttgacctcttcagcaccaggaaggaagctctgaggatggttgcagtgaggaagcatgggtctttaaggacttctctctcttttttgctggacattattgagtttgtggaaccctgcctcttcctgctacctgtgggtctgcccagagtccctgcaggcctgtccatgcattaaaaattcctattgtctctcaaaaaaaaaaaaaaaaaaaaaaaaa

SEQ ID NO: 1053 - protein, 891 aa, Homo sapiens
MVCGSQMSCPLTVKVTLHVPEHFIADGSSFVVSEGSYLDISDWLNPAKLSLYYQINATSPWVRDLCGQRTTDACEQLCDPETGECSCHEGYAPDPVHRHLCVRSDWGQSEGPWPYTTLERGYDLVTGEQAPEKILRSTFSLGQGLWLPVSKSFVVPPVELSINPLASCKTDVLVTEDPADVREEAMLSTYFETINDLLSSFGPVRDCSRNNGGCTRNFKCVSDRQVDSSGCVCPEELKPMKDGSGCYDHSKGIDCSDGFNGGCEQLCLQQTLPLPYDATSSTIFMFCGCVEEYKLAPDGKSCLMLSDVCEGPKCLKPDSKFNDTLFGEMLHGYNNRTQHVNQGQVFQMTFRENNFIKDFPQLADGLLVIPLPVEEQCRGVLSEPLPDLQLLTGDIRYDEAMGYPMVQQWRVRSNLYRVKLSTITLAAGFTNVLKILTKESSREELLSFIQHYGSHYIAEALYGSELTCIIHFPSKKVQQQLWLQYQKETTELGSKKELKSMPFITYLSGLLTAQMLSDDQLISGVEIRCEEKGRCPSTCHLCRRPGKEQLSPTPVLLEINRVVPLYTLIQDNGTKEAFKSALMSSYWCSGKGDVIDDWCRCDLSAFDANGLPNCSPLLQPVLRLSPTVEPSSTVVSLEWVDVQPAIGTKVSDYILQHKKVDEYTDTDLYTGEFLSFADDLLSGLGTSCVAAGRSHGEVPEVSIYSVIFKCLEPDGLYKFTLYAVDTRGRHSELSTVTLRTACPLVDDNKAEEIADKIYNLYNGYTSGKEQQMAYNTLMEVSASMLFRVQHHYNSHYEKFGDFVWRSEDELGPRKAHLILRRLERVSSHCSSLLRSAYIQSRVETVPYLFCRSEEVRPAGMVWYSILKDTKITCEEKMVSMARNTYGESKGR

SEQ ID NO: 1054 - DNA, 1700 bp, Homo sapiens
ggcggcggcagcgggttcggttgcgcgtggcgcacggggtgggagcggagcccaggccgggagcaggcgccgccgccagcgaccatggggaacgtgttggctgccagctcgccgcccgcagggccgccaccgccgcctgcgccggccctcgtggggctgccgccacctccgccctcgccgccgggcttcacgctgccgccgctgggaggcagcctgggcgccggcaccagtacgagtcgaagttcggaacggacccccggggctgcaaccgccagcgcctcaggggccgccgaggatggggcctgcggctgcctgcccaacccgggcacattcgaggagtgccaccggaagtgcaaggagctgtttcccattcagatggagggtgtcaagctcacagtcaacaaagggttgagtaaccattttcaggtcaaccacacagtagccctcagcacaatcggggagtccaactaccacttcggggtcacatatgtggggacaaagcagctgagtcccacagaggcgttccctgtactggtgggtgacatggacaacagtggcagtctcaacgctcaggtcattcaccagctgggccccggtctcaggtccaagatggccatccagacccagcagtcgaagtttgtgaactggcaggtggacggggagtatcggggctctgacttcacagcagccgtcaccctggggaacccagacgtcctcgtgggttcaggaatcctcgtagcccactacctccagagcatcacgccttgcctggccctgggtggagagctggtctaccaccggcggcctggagaggagggcactgtcatgtctctagctgggaaatacacattgaacaactggttggcaacggtaacgttgggccaggcgggcatgcacgcaacatactaccacaaagccagtgaccagctgcaggtgggtgtggagtttgaggccagcacaaggatgcaggacaccagcgtctccttcgggtaccagctggacctgcccaaggccaacctcctcttcaaaggctctgtggatagcaactggatcgtgggtgccacgctggagaagaagctcccacccctgcccctgacactggcccttggggccttcctgaatcaccgcaagaacaagtttcagtgtggctttggcctcaccatcggctgagccctcctggcccccgccttccacgcccttccgattccacctccacctccacctccccctgccacagaggggagacctgagcccccctcccttccctccccccttgggggtcggggggggacattggaaaggagggaccccgccaccccagcagctgaggaggggattctggaactgaatggcgcttcgggattctgagtagcaggggcagcatgcccagtgggcctggggtcccgggagggattccggaattgaggggcacgcaggattctgagcaccaggggcagaggcggccagacaacctcagggaggagtgtcctggcgtccccatcctccaaagggcctgggcccgccccgagggggcagcgagaggagcttccccatccccggtcagtccaccctgccccgtccactttcccatctcctcggtataaatcatgtttataagttatggaagaaccgggacattttacagaaaaaaaacaaaaaacaacaaaaaatatacgtgggaaaaaaaaaaaaaaaaaaaa

SEQ ID NO: 1055 - protein, 361 aa, Homo sapiens
MGNVLAASSPPAGPPPPPAPALVGLPPPPPSPPGFTLPPLGGSLGAGTSTSRSSERTPGAATASASGAAEDGACGCLPNPGTFEECHRKCKELFPIQMEGVKLTVNKGLSNHFQVNHTVALSTIGESNYHFGVTYVGTKQLSPTEAFPVLVGDMDNSGSLNAQVIHQLGPGLRSKMAIQTQQSKFVNWQVDGEYRGSDFTAAVTLGNPDVLVGSGILVAHYLQSITPCLALGGELVYHRRPGEEGTVMSLAGKYTLNNWLATVTLGQAGMHATYYHKASDQLQVGVEFEASTRMQDTSVSFGYQLDLPKANLLFKGSVDSNWIVGATLEKKLPPLPLTLALGAFLNHRKNKFQCGFGLTIG

SEQ ID NO: 1056 - DNA, 1339 bp, Homo sapiens
gaaggttctgggcggggctggactgttctaagtgagttcgggtgggggagcttcacgaggggaggctgctctgtgaaggaaccgcctttctctccgcgtgtctcacccttttctccccatatctgtttggacatgagctgagggcacggtcgcgggcggtcagccctgttcgcagctacggcgaggaggggcgcgattgttccttgttgccgctccgcttagtggccgcgtccattccgcgcggtgtcccgattttaggggtagggagaagtgtcagcttcaggcatcgcgaggcgtggcggccccatggccccgctgggaggcgccccgcggctggtactgctgttcagcggcaagaggaaatccgggaaggacttcgtgaccgaggcgctgcagagcagacttggagctgatgtctgtgctgtcctccggctctctggtccactcaaggaacagtatgctcaggagcatggcttgaacttccagagactcctggacaccagcacctacaaggaggcctttcggaaggacatgatccgctggggagaggagaaacgccaggctgacccaggcttcttttgcaggaagattgtggagggcatctcccagcccatctggctggtgagtgacacacggagagtgtctgacatccagtggtttcgggaggcctatggggccgtgacgcagacggtccgcgttgtagcgttggagcagagccgacagcagcggggctgggtgttcacgccaggggtggacgatgctgagtcagaatgtggcctggacaacttcggggactttgactgggtcatcgagaaccatggagttgaacagcgcctggaggagcagttggagaacctgatagaatttatccgctccagactttagtcactaggttctaggagtgagctggggcctgctgaggtgggggtggggctgactctgcaaaatgggggtgtcccccgatcctggccgaggtgaggaacagacagggggggtctagattctgagggggttggtggatattgggcaaggcaggaaacctctggagacctcattttctccatggggaagacagccatgctcttcaggaggagactccaagggcaaaggagggtgtcttggctgtgcttgaaggcgaaaccctgccatatccccagtgccagtcccctcagcctgtggtggccttgcatcctgactggatgttctcagccccttgttctgggcaagaacccagagctccccagtgtggatactaataaacctcttggagcacactctcaaaacaaaaaaaaaaaaaaaaaaaaaaaaaaaaaaaaaaaaaaaaaaaaaaaacctcggg

SEQ ID NO: 1057 - protein, 192 aa, Homo sapiens
MAPLGGAPRLVLLFSGKRKSGKDFVTEALQSRLGADVCAVLRLSGPLKEQYAQEHGLNFQRLLDTSTYKEAFRKDMIRWGEEKRQADPGFFCRKIVEGISQPIWLVSDTRRVSDIQWFREAYGAVTQTVRVVALEQSRQQRGWVFTPGVDDAESECGLDNFGDFDWVIENHGVEQRLEEQLENLIEFIRSRL

SEQ ID NO: 1058 - DNA, 4447 bp, Homo sapiens
tcccatctttcccaccctcttggttgccgctggccacacgccctccgctggcggcgacttctcagctccgtgcgcccgggctggacagtgagcctcgagaggagacgcgggcggctagagccggagtggggcgagccgcggaacccggccgggagccgcgcgaggcgtgatcggagggtatggttggcatggaattgaatttcatctgtctgtgggaattgtaagcaagattgccatcacgaaagccaaagtggatttctccagtgtggtgtgcctgcccccttccgtcattgctgtgaatgggctggacggaggaggggccggcgaaaatgatgatgaaccagtgctcgtgtccttatctgcggcacccagtccccagagtgaagctgttgccaatgaactgcaggagctctccttgcagcccgagctgaccctaggcctccaccctggcaggaatcccaatttgcctccacttagtgagcggaagaatgtgctacagttgaaactccagcagcgccggacccgggaagaactggtgagccaagggatcatgccgcctttgaaaagtccagccgcatttcatgagcagagaaggagcttggagcgggccaggacagaggactatctcaaacggaagattcgttcccggccggagagatcggagctggtcaggatgcacattttggaagagacctcggctgagccatccctccaggccaagcagctgaagctgaagagagccagactagccgatgacctcaatgagaagattgcacagaggcctggccccatggagctggtggagaagaacatccttcctgttgagtccagcctgaaggaagccatcattgtgggccaggtgaactatcccaaagtagcagacagctcttccttcgatgaggacagcagcgatgccttatcccccgagcagcctgccagccatgagtcccagggttctgtgccgtcacccctggaggcccgagtcagcgaaccactgctcagtgccacctctgcatcccccacccaggttgtgtctcaacttccgatgggccgggattccagagaaatgcttttcctggcagagcagcctcctctgcctcccccacctctgctgcctcccagcctcaccaatggaaccactatccccactgccaagtccacccccacactcattaagcaaagccaacccaagtctgccagtgagaagtcacagcgcagcaagaaggccaaggagctgaagccaaaggtgaagaagctcaagtaccaccagtacatccccccggaccagaagcaggacaggggggcaccccccatggactcatcctacgccaagatcctgcagcagcagcagctcttcctccagctgcagatcctcaaccagcagcagcagcagcaccacaactaccaggccatcctgcctgccccgccaaagtcagcaggcgaggccctgggaagcagcgggacccccccagtacgcagcctctccactaccaatagcagctccagctcgggcgcccctgggccctgtgggctggcacgtcagaacagcacctcactgactggcaagccgggagccctgccggccaacctggacgacatgaaggtggcagagctgaagcaggagctgaagttgcgatcactgcctgtctcgggcaccaaaactgagctgattgagcgccttcgagcctatcaagaccaaatcagccctgtgccaggagcccccaaggcccctgccgccacctctatcctgcacaaggctggcgaggtggtggtagccttcccagcggcccggctgagcacggggccagccctggtggcagcaggcctggctccagctgaggtggtggtggccacggtggccagcagtggggtggtgaagtttggcagcacgggctccacgccccccgtgtctcccaccccctcggagcgctcactgctcagcacgggcgatgaaaactccacccccggggacacctttggtgagatggtgacatcacctctgacgcagctgaccctgcaggcctcgccactgcagatcctcgtgaaggaggagggcccccgggccgggtcctgttgcctgagccctggggggcgggcggagctagaggggcgcgacaaggaccagatgctgcaggagaaagacaagcagatcgaggcgctgacgcgcatgctccggcagaagcagcagctggtggagcggctcaagctgcagctggagcaggagaagcgagcccagcagcccgcccccgcccccgcccccctcggcacccccgtgaagcaggagaacagcttctccagctgccagctgagccagcagcccctgggccccgctcacccattcaaccccagcctggcggccccagccaccaaccacatagacccttgtgctgtggccccggggcccccgtccgtggtggtgaagcaggaagccttgcagcctgagcccgagccggtccccgccccccagttgcttctggggcctcagggccccagcctcatcaagggggttgcacctcccaccctcatcaccgactccacagggacccaccttgtcctcaccgtgaccaataagaatgcagacagccctggcctgtccagtgggagcccccagcagccctcgtcccagcctggctctccagcgcctgccccctctgcccagatggacctggagcacccactgcagcccctctttgggacccccacttctctgctgaagaaggaaccacctggctatgaggaagccatgagccagcagcccaaacagcaggaaaatggttcctcaagccagcagatggacgacctgtttgacattctcattcagagcggagaaatttcagcagatttcaaggagccgccatccctgccagggaaggagaagccatccccgaagacagtctgtgggtcccccctggcagcacagccatcaccttctgctgagctcccccaggctgccccacctcctccaggctcaccctccctccctggacgcctggaggacttcctggagagcagcacggggctgcccctgctgaccagtgggcatgacgggccagagcccctttccctcattgacgacctccatagccagatgctgagcagcactgccatcctggaccaccccccgtcacccatggacacctcggaattgcactttgttcctgagcccagcagcaccatgggcctggacctggctgatggccacctggacagcatggactggctggagctgtcgtcaggtggtcccgtgctgagcctagcccccctcagcaccacagcccccagcctcttctccacagacttcctcgatggccatgatttgcagctgcactgggattcctgcttgtagctctctggctcaagacggggtggggaaggggctgggagccagggtactccaatgcgtggctctcctgcgtgattcggcctctccacatggttgtgagtcttgacaatcacagcccctgctttttcccttccctgggaggctagaacagagaagcccttactcctggttcagtgccacgcagggcagaggagagcagctgtcaagaagcagccctggctctcacgctggggttttggacacacggtcagggtcagggccatttcagcttgacctccttttttgaggtcagggggcactgtctgtctggctacaatttggctaaggtaggtgaagcctggccaggcgggaggcttctcttctgacccagggctgagacaggttaaggggtgaatctccttcctttctctccctgctttgctgtgaagggagaaattagcctgggcctctaccccctattccctgtgtctgccaaccccaggatcccagggctccctgccattttagtgtcttggtgtagtgtaaccatttagtggttggtggcaacaattttatgtacaggtgtatatacctctatattatatatcgacatacatatatatttttgggggggggcggacaggagatgggtgcaactccctcccatcctactctcacagaagggcctggatgcaaggttacccttgagctgtgtgccacagtctggtgcccagtctggcatgcagctacccaggcccacccatcacgtgtgattgacatgtaggtaccctgccacggcctatgccccacctgccctgcttcctggctccttatcagtgccatgagggcagaggtgctacctggccttcctgccaggagctctccacccactcacattccgtccccgccgcctcactgcagccagcgtggtcctaggacaggaggagcttcgggcccagcttcaccctgcggtggggctgaggggtggccatctcctgccctggggccactggcttcacattctgggctgactcataggggagtaggggtggagtcaccaaaaccagtgctgggacaaagatggggaaggtgtgtgaactttttaaaataaacacaaaaacacag

SEQ ID NO: 1059 - protein, 931 aa, Homo sapiens
MPPLKSPAAFHEQRRSLERARTEDYLKRKIRSRPERSELVRMHILEETSAEPSLQAKQLKLKRARLADDLNEKIAQRPGPMELVEKNILPVESSLKEAIIVGQVNYPKVADSSSFDEDSSDALSPEQPASHESQGSVPSPLEARVSEPLLSATSASPTQVVSQLPMGRDSREMLFLAEQPPLPPPPLLPPSLTNGTTIPTAKSTPTLIKQSQPKSASEKSQRSKKAKELKPKVKKLKYHQYIPPDQKQDRGAPPMDSSYAKILQQQQLFLQLQILNQQQQQHHNYQAILPAPPKSAGEALGSSGTPPVRSLSTTNSSSSSGAPGPCGLARQNSTSLTGKPGALPANLDDMKVAELKQELKLRSLPVSGTKTELIERLRAYQDQISPVPGAPKAPAATSILHKAGEVVVAFPAARLSTGPALVAAGLAPAEVVVATVASSGVVKFGSTGSTPPVSPTPSERSLLSTGDENSTPGDTFGEMVTSPLTQLTLQASPLQILVKEEGPRAGSCCLSPGGRAELEGRDKDQMLQEKDKQIEALTRMLRQKQQLVERLKLQLEQEKRAQQPAPAPAPLGTPVKQENSFSSCQLSQQPLGPAHPFNPSLAAPATNHIDPCAVAPGPPSVVVKQEALQPEPEPVPAPQLLLGPQGPSLIKGVAPPTLITDSTGTHLVLTVTNKNADSPGLSSGSPQQPSSQPGSPAPAPSAQMDLEHPLQPLFGTPTSLLKKEPPGYEEAMSQQPKQQENGSSSQQMDDLFDILIQSGEISADFKEPPSLPGKEKPSPKTVCGSPLAAQPSPSAELPQAAPPPPGSPSLPGRLEDFLESSTGLPLLTSGHDGPEPLSLIDDLHSQMLSSTAILDHPPSPMDTSELHFVPEPSSTMGLDLADGHLDSMDWLELSSGGPVLSLAPLSTTAPSLFSTDFLDGHDLQLHWDSCL

SEQ ID NO: 1060 - DNA, 1037 bp, Homo sapiens
gcgtcccggaagcgcccgcggggccgggtgcgatggcggcggtggctgcgttgcagctggggctgcgggcggcggggctgggacgggccccggccagcgccgcctggaggagcgtcctcagggtctccccgcgcccaggggtggcctggaggccaagcagatgtggcagttctgcagcagaagcatctgccacaaaagcggaagatgactcctttcttcagtgggtcctgctcctcatccctgtgactgcctttggcttggggacatggcaggtccagcgtcggaagtggaagctgaacctgattgcagagttggagtccagagttctggctgagcctgtccctctgccagccgacccaatggaactgaaaaatctggagtataggccagtgaaggtcagggggtgctttgaccattccaaggagctgtatatgatgccccggaccatggtggaccctgtccgggaggcccgggagggcggcctcatctcctcctcaactcagagtggggcctatgtggtcactcccttccactgcaccgacctgggagtcaccatcctggtaaatagagggttcgttcccaggaagaaagtgaatcctgaaacccggcagaaaggccagattgagggagaagtggacctcattgggatggtgaggctgacagaaaccaggcagccttttgtccctgagaacaatccagaaaggaaccactggcattatcgagacctggaagctatggccagaatcacaggcgcagagcccatcttcattgatgccaacttccagagcacagtccctggaggacccattggagggcaaaccagagttactctgaggaacgagcatctgcagtacatcgtgacctggtatggactctctgcagctacatcctacctgtggtttaagaaattcctacgtgggacacctggtgtgtgacagatcagctgctgaagccctgtccctggataatgcagtatttcaagactgcctttatgctggatcatgtgctactggtataaagttctggccttctacctt

SEQ ID NO: 1061 - protein, 300 aa, Homo sapiens
MAAVAALQLGLRAAGLGRAPASAAWRSVLRVSPRPGVAWRPSRCGSSAAEASATKAEDDSFLQWVLLLIPVTAFGLGTWQVQRRKWKLNLIAELESRVLAEPVPLPADPMELKNLEYRPVKVRGCFDHSKELYMMPRTMVDPVREAREGGLISSSTQSGAYVVTPFHCTDLGVTILVNRGFVPRKKVNPETRQKGQIEGEVDLIGMVRLTETRQPFVPENNPERNHWHYRDLEAMARITGAEPIFIDANFQSTVPGGPIGGQTRVTLRNEHLQYIVTWYGLSAATSYLWFKKFLRGTPGV

SEQ ID NO: 1062 - DNA, 5445 bp, Homo sapiens
aagatggccgcggcgcgcacggctcctgcggcggggtagaggcggaggcggagtcgagtcactcccgcacttcggggctccggtgccccgcgccaggctgcagcttactgcccgccgcggccatgcggggctccgtgcacggatgagagaagccgctgccgcgctggtccctcctcccgcctttgccgtcacgcctgccgccgccatggaggagccgccgccaccgccgccgccgccaccaccgccaccggaacccgagaccgagtcagaacccgagtgctgcttggcggcgaggcaagagggcacattgggagattcagcttgcaagagtcctgaatctgatctagaagacttctccgatgaaacaaatacagagaatctttatggtacctctccccccagcacacctcgacagatgaaacgcatgtcaaccaaacatcagaggaataatgtggggaggccagccagtcggtctaatttgaaagaaaaaatgaatgcaccaaatcagcctccacataaagacactggaaaaacagtggagaatgtggaagaatacagctataagcaggagaaaaagatccgagcagctcttagaacaacagagcgtgatcataaaaaaaatgtacagtgctcattcatgttagactcagtgggtggatctttgccaaaaaaatcaattccagatgtggatctcaataagccttacctcagccttggctgtagcaatgctaagcttccagtatctgtgcccatgcctatagccagacctgcacgccagacttctaggactgactgtccagcagatcgtttaaagttttttgaaactttacgacttttgctaaagcttacctcagtctcaaagaaaaaagacagggagcaaagaggacaagaaaatacgtctggtttctggcttaaccgatctaacgaactgatctggttagagctacaagcctggcatgcaggacggacaattaacgaccaggacttctttttatatacagcccgtcaagccatcccagatattattaatgaaatccttactttcaaagtcgactatgggagcttcgcctttgttagagatagagctggttttaatggtacttcagtagaagggcagtgcaaagccactcctggaacaaagattgtaggttactcaacacatcatgagcatctccaacgccagagggtctcatttgagcaggtaaaacggataatggagctgctagagtacatagaagcactttatccatcattgcaggctcttcagaaggactatgaaaaatatgctgcaaaagacttccaggacagggtgcaggcactctgtttgtggttaaacatcacaaaagacttaaatcagaaattaaggattatgggcactgttttgggcatcaagaatttatcagacattggctggccagtgtttgaaatcccttcccctcgaccatccaaaggtaatgagccggagtatgagggtgatgacacagaaggagaattaaaggagttggaaagtagtacggatgagagtgaagaagaacaaatctctgatcctagggtaccggaaatcagacagcccatagataacagcttcgacatccagtcgcgggactgcatatccaagaagcttgagaggctcgaatctgaggatgattctcttggctggggagcaccagactggagcacagaagcaggctttagtagacattgtctgacttctatttatagaccatttgtagacaaagcactgaagcagatggggttaagaaagttaattttaagacttcacaagctaatggatggttccttgcaaagggcacgtatagcattggtaaagaacgatcgtccagtggagttttctgaatttccagatcccatgtggggttcagattatgtgcagttgtcaaggacaccaccttcatctgaggagaaatgcagtgctgtgtcgtgggaggagctgaaggccatggatttaccttcattcgaacctgccttcctagttctctgccgagtccttctgaatgtcatacatgagtgtctgaagttaagattggagcagagacctgctggagaaccatctctcttgagtattaagcagctggtgagagagtgtaaggaggtcctgaagggcggcctgctgatgaagcagtactaccagttcatgctgcaggaggttctggaggacttggagaagcccgactgcaacattgacgcttttgaagaggatctacataaaatgcttatggtgtattttgattacatgagaagctggatccaaatgctacagcaattacctcaagcatcgcatagtttaaaaaatctgttagaagaagaatggaatttcaccaaagaaataactcattacatacggggaggagaagcacaggccgggaagcttttctgtgacattgcaggaatgctgctgaaatctacaggaagttttttagaatttggcttacaggagagctgtgctgaattttggactagtgcggatgacagcagtgcttccgacgaaatcatcaggtctgttatagagatcagtcgagccctgaaggagctcttccatgaagccagagaaagggcttccaaagcacttggatttgctaaaatgttgagaaaggacctggaaatagcagcagaattcaggctttcagccccagttagagacctcctggatgttctgaaatcaaaacagtatgtcaaggtgcaaattcctgggttagaaaacttgcaaatgtttgttccagacactcttgctgaggagaagagtattattttgcagttactcaatgcagctgcaggaaaggactgttcaaaagattcagatgacgtactcatcgatgcctatctgcttctgaccaagcacggtgatcgagcccgtgattcagaggacagctggggcacctgggaggcacagcctgtcaaagtcgtgcctcaggtggagactgttgacaccctgagaagcatgcaggtggataatcttttactagttgtcatgcagtctgcgcatctcacaattcagagaaaagctttccagcagtccattgagggacttatgactctgtgccaggagcagacatccagtcagccggtcatcgccaaagctttgcagcagctgaagaatgatgcattggagctatgcaacaggataagcaatgccattgaccgcgtggaccacatgttcacatcagaatttgatgctgaggttgatgaatctgaatctgtcaccttgcaacagtactaccgagaagcaatgattcaggggtacaattttggatttgagtatcataaagaagttgttcgtttgatgtctggggagtttagacagaagataggagacaaatatataagctttgcccggaagtggatgaattatgtcctgactaaatgtgagagtggtagaggtacaagacccaggtgggcgactcaaggatttgattttctacaagcaattgaacctgcctttatttcagctttaccagaagatgacttcttgagtttacaagccttgatgaatgaatgcattggccatgtcataggaaaaccacacagtcctgttacaggtttgtaccttgccattcatcggaacagcccccgtcctatgaaggtacctcgatgccatagtgaccctcctaacccacacctcattatccccactccagagggattcagcactcggagcatgccttccgacgcgcggagccatggcagccctgctgctgctgctgctgctgctgctgctgttgctgccagtcggcccagcccctctggtggtgactctgtgctgcccaaatccatcagcagtgcccatgataccaggggttccagcgttcctgaaaatgatcgattggcttccatagctgctgaattgcagtttaggtccctgagtcgtcactcaagccccacggaggagcgagatgaaccagcatatccaagaggagattcaagtgggtccacaagaagaagttgggaacttcggacactaatcagccagagtaaagatactgcttctaaactaggacccatagaagctatccagaagtcagtccgattgtttgaagaaaagaggtaccgagaaatgaggagaaagaatatcattggtcaagtttgtgatacgcctaagtcctatgataatgttatgcacgttggcttgaggaaggtgaccttcaaatggcaaagaggaaacaaaattggagaaggccagtatgggaaggtgtacacctgcatcagcgtcgacaccggggagctgatggccatgaaagagattcgatttcaacctaatgaccataagactatcaaggaaactgcagacgaattgaaaatattcgaaggcatcaaacaccccaatctggttcggtattttggtgtggagctccatagagaagaaatgtacatcttcatggagtactgcgatgaggggactttagaagaggtgtcaaggctgggacttcaggaacatgtgattaggctgtattcaaagcagatcaccattgcgatcaacgtcctccatgagcatggcatagtccaccgtgacattaaaggtgccaatatcttccttacctcatctggattaatcaaactgggagattttggatgttcagtaaagctcaaaaacaatgcccagaccatgcctggtgaagtgaacagcaccctggggacagcagcatacatggcacctgaagtcatcactcgtgccaaaggagagggccatgggcgtgcggccgacatctggagtctggggtgtgttgtcatagagatggtgactggcaagaggccttggcatgagtatgagcacaactttcaaattatgtataaagtggggatgggacataagccaccaatccctgaaagattaagccctgaaggaaaggacttcctttctcactgccttgagagtgacccaaagatgagatggaccgccagccagctcctcgaccattcgtttgtcaaggtttgcacagatgaagaatgaagcctagtagaatatggacttggaaaattctcttaatcactactgtatgtaatatttacataaagactgtgctgagaagcagtataagcctttttaaccttccaagactgaagactgcacaggtgacaagcgtcacttctcctgctgctcctgtttgtctgatgtggcaaaaggccctctggagggctggtggccacgaggttaaagaagctgcatgttaagtgccattactactgtacacggaccatcgcctctgtctcctccgtgtctcgcgcgactgagaaccgtgacatcagcgtagtgttttgacctttctaggttcaaaagaagttgtagtgttatcaggcgtcccataccttgtttttaatctcctgtttgttgagtgcactgactgtgaaacctttaccttttttgttgttgttggcaagctgcaggtttgtaatgcaaaaggctgattactgaaatttaagaaaaaggtt

SEQ ID NO: 1063 - protein, 1607 aa, Homo sapiens
MREAAAALVPPPAFAVTPAAAMEEPPPPPPPPPPPPEPETESEPECCLAARQEGTLGDSACKSPESDLEDFSDETNTENLYGTSPPSTPRQMKRMSTKHQRNNVGRPASRSNLKEKMNAPNQPPHKDTGKTVENVEEYSYKQEKKIRAALRTTERDHKKNVQCSFMLDSVGGSLPKKSIPDVDLNKPYLSLGCSNAKLPVSVPMPIARPARQTSRTDCPADRLKFFETLRLLLKLTSVSKKKDREQRGQENTSGFWLNRSNELIWLELQAWHAGRTINDQDFFLYTARQAIPDIINEILTFKVDYGSFAFVRDRAGFNGTSVEGQCKATPGTKIVGYSTHHEHLQRQRVSFEQVKRIMELLEYIEALYPSLQALQKDYEKYAAKDFQDRVQALCLWLNITKDLNQKLRIMGTVLGIKNLSDIGWPVFEIPSPRPSKGNEPEYEGDDTEGELKELESSTDESEEEQISDPRVPEIRQPIDNSFDIQSRDCISKKLERLESEDDSLGWGAPDWSTEAGFSRHCLTSIYRPFVDKALKQMGLRKLILRLHKLMDGSLQRARIALVKNDRPVEFSEFPDPMWGSDYVQLSRTPPSSEEKCSAVSWEELKAMDLPSFEPAFLVLCRVLLNVIHECLKLRLEQRPAGEPSLLSIKQLVRECKEVLKGGLLMKQYYQFMLQEVLEDLEKPDCNIDAFEEDLHKMLMVYFDYMRSWIQMLQQLPQASHSLKNLLEEEWNFTKEITHYIRGGEAQAGKLFCDIAGMLLKSTGSFLEFGLQESCAEFWTSADDSSASDEIIRSVIEISRALKELFHEARERASKALGFAKMLRKDLEIAAEFRLSAPVRDLLDVLKSKQYVKVQIPGLENLQMFVPDTLAEEKSIILQLLNAAAGKDCSKDSDDVLIDAYLLLTKHGDRARDSEDSWGTWEAQPVKVVPQVETVDTLRSMQVDNLLLVVMQSAHLTIQRKAFQQSIEGLMTLCQEQTSSQPVIAKALQQLKNDALELCNRISNAIDRVDHMFTSEFDAEVDESESVTLQQYYREAMIQGYNFGFEYHKEVVRLMSGEFRQKIGDKYISFARKWMNYVLTKCESGRGTRPRWATQGFDFLQAIEPAFISALPEDDFLSLQALMNECIGHVIGKPHSPVTGLYLAIHRNSPRPMKVPRCHSDPPNPHLIIPTPEGFSTRSMPSDARSHGSPAAAAAAAAAVAASRPSPSGGDSVLPKSISSAHDTRGSSVPENDRLASIAAELQFRSLSRHSSPTEERDEPAYPRGDSSGSTRRSWELRTLISQSKDTASKLGPIEAIQKSVRLFEEKRYREMRRKNIIGQVCDTPKSYDNVMHVGLRKVTFKWQRGNKIGEGQYGKVYTCISVDTGELMAMKEIRFQPNDHKTIKETADELKIFEGIKHPNLVRYFGVELHREEMYIFMEYCDEGTLEEVSRLGLQEHVIRLYSKQITIAINVLHEHGIVHRDIKGANIFLTSSGLIKLGDFGCSVKLKNNAQTMPGEVNSTLGTAAYMAPEVITRAKGEGHGRAADIWSLGCVVIEMVTGKRPWHEYEHNFQIMYKVGMGHKPPIPERLSPEGKDFLSHCLESDPKMRWTASQLLDHSFVKVCTDEE

SEQ ID NO: 1064 - DNA, 5298 bp, Homo sapiens
aagatggccgcggcgcgcacggctcctgcggcggggtagaggcggaggcggagtcgagtcactcccgcacttcggggctccggtgccccgcgccaggctgcagcttactgcccgccgcggccatgcggggctccgtgcacggatgagagaagccgctgccgcgctggtccctcctcccgcctttgccgtcacgcctgccgccgccatggaggagccgccgccaccgccgccgccgccaccaccgccaccggaacccgagaccgagtcagaacccgagtgctgcttggcggcgaggcaagagggcacattgggagattcagcttgcaagagtcctgaatctgatctagaagacttctccgatgaaacaaatacagagaatctttatggtacctctccccccagcacacctcgacagatgaaacgcatgtcaaccaaacatcagaggaataatgtggggaggccagccagtcggtctaatttgaaagaaaaaatgaatgcaccaaatcagcctccacataaagacactggaaaaacagtggagaatgtggaagaatacagctataagcaggagaaaaagatccgagcagctcttagaacaacagagcgtgatcataaaaaaaatgtacagtgctcattcatgttagactcagtgggtggatctttgccaaaaaaatcaattccagatgtggatctcaataagccttacctcagccttggctgtagcaatgctaagcttccagtatctgtgcccatgcctatagccagacctgcacgccagacttctaggactgactgtccagcagatcgtttaaagttttttgaaactttacgacttttgctaaagcttacctcagtctcaaagaaaaaagacagggagcaaagaggacaagaaaatacgtctggtttctggcttaaccgatctaacgaactgatctggttagagctacaagcctggcatgcaggacggacaattaacgaccaggacttctttttatatacagcccgtcaagccatcccagatattattaatgaaatccttactttcaaagtcgactatgggagcttcgcctttgttagagatagagctggttttaatggtacttcagtagaagggcagtgcaaagccactcctggaacaaagattgtaggttactcaacacatcatgagcatctccaacgccagagggtctcatttgagcaggtaaaacggataatggagctgctagagtacatagaagcactttatccatcattgcaggctcttcagaaggactatgaaaaatatgctgcaaaagacttccaggacagggtgcaggcactctgtttgtggttaaacatcacaaaagacttaaatcagaaattaaggattatgggcactgttttgggcatcaagaatttatcagacattggctggccagtgtttgaaatcccttcccctcgaccatccaaaggtaatgagccggagtatgagggtgatgacacagaaggagaattaaaggagttggaaagtagtacggatgagagtgaagaagaacaaatctctgatcctagggtaccggaaatcagacagcccatagataacagcttcgacatccagtcgcgggactgcatatccaagaagcttgagaggctcgaatctgaggatgattctcttggctggggagcaccagactggagcacagaagcaggctttagtagacattgtctgacttctatttatagaccatttgtagacaaagcactgaagcagatggggttaagaaagttaattttaagacttcacaagctaatggatggttccttgcaaagggcacgtatagcattggtaaagaacgatcgtccagtggagttttctgaatttccagatcccatgtggggttcagattatgtgcagttgtcaaggacaccaccttcatctgaggagaaatgcagtgctgtgtcgtgggaggagctgaaggccatggatttaccttcattcgaacctgccttcctagttctctgccgagtccttctgaatgtcatacatgagtgtctgaagttaagattggagcagagacctgctggagaaccatctctcttgagtattaagcagctggtgagagagtgtaaggaggtcctgaagggcggcctgctgatgaagcagtactaccagttcatgctgcaggaggttctggaggacttggagaagcccgactgcaacattgacgcttttgaagaggatctacataaaatgcttatggtgtattttgattacatgagaagctggatccaaatgctacagcaattacctcaagcatcgcatagtttaaaaaatctgttagaagaagaatggaatttcaccaaagaaataactcattacatacggggaggagaagcacaggccgggaagcttttctgtgacattgcaggaatgctgctgaaatctacaggaagttttttagaatttggcttacaggagagctgtgctgaattttggactagtgcggatgacagcagtgcttccgacgaaatcatcaggtctgttatagagatcagtcgagccctgaaggagctcttccatgaagccagagaaagggcttccaaagcacttggatttgctaaaatgttgagaaaggacctggaaatagcagcagaattcaggctttcagccccagttagagacctcctggatgttctgaaatcaaaacagtatgtcaaggtgcaaattcctgggttagaaaacttgcaaatgtttgttccagacactcttgctgaggagaagagtattattttgcagttactcaatgcagctgcaggaaaggactgttcaaaagattcagatgacgtactcatcgatgcctatctgcttctgaccaagcacggtgatcgagcccgtgattcagaggacagctggggcacctgggaggcacagcctgtcaaagtcgtgcctcaggtggagactgttgacaccctgagaagcatgcaggtggataatcttttactagttgtcatgcagtctgcgcatctcacaattcagagaaaagctttccagcagtccattgagggacttatgactctgtgccaggagcagacatccagtcagccggtcatcgccaaagctttgcagcagctgaagaatgatgcattggagctatgcaacaggataagcaatgccattgaccgcgtggaccacatgttcacatcagaatttgatgctgaggttgatgaatctgaatctgtcaccttgcaacagtactaccgagaagcaatgattcaggggtacaattttggatttgagtatcataaagaagttgttcgtttgatgtctggggagtttagacagaagataggagacaaatatataagctttgcccggaagtggatgaattatgtcctgactaaatgtgagagtggtagaggtacaagacccaggtgggcgactcaaggatttgattttctacaagcaattgaacctgcctttatttcagctttaccagaagatgacttcttgagtttacaagccttgatgaatgaatgcattggccatgtcataggaaaaccacacagtcctgttacaggtttgtaccttgccattcatcggaacagcccccgtcctatgaaggtacctcgatgccatagtgaccctcctaacccacacctcattatccccactccagagggattcaggggttccagcgttcctgaaaatgatcgattggcttccatagctgctgaattgcagtttaggtccctgagtcgtcactcaagccccacggaggagcgagatgaaccagcatatccaagaggagattcaagtgggtccacaagaagaagttgggaacttcggacactaatcagccagagtaaagatactgcttctaaactaggacccatagaagctatccagaagtcagtccgattgtttgaagaaaagaggtaccgagaaatgaggagaaagaatatcattggtcaagtttgtgatacgcctaagtcctatgataatgttatgcacgttggcttgaggaaggtgaccttcaaatggcaaagaggaaacaaaattggagaaggccagtatgggaaggtgtacacctgcatcagcgtcgacaccggggagctgatggccatgaaagagattcgatttcaacctaatgaccataagactatcaaggaaactgcagacgaattgaaaatattcgaaggcatcaaacaccccaatctggttcggtattttggtgtggagctccatagagaagaaatgtacatcttcatggagtactgcgatgaggggactttagaagaggtgtcaaggctgggacttcaggaacatgtgattaggctgtattcaaagcagatcaccattgcgatcaacgtcctccatgagcatggcatagtccaccgtgacattaaaggtgccaatatcttccttacctcatctggattaatcaaactgggagattttggatgttcagtaaagctcaaaaacaatgcccagaccatgcctggtgaagtgaacagcaccctggggacagcagcatacatggcacctgaagtcatcactcgtgccaaaggagagggccatgggcgtgcggccgacatctggagtctggggtgtgttgtcatagagatggtgactggcaagaggccttggcatgagtatgagcacaactttcaaattatgtataaagtggggatgggacataagccaccaatccctgaaagattaagccctgaaggaaaggacttcctttctcactgccttgagagtgacccaaagatgagatggaccgccagccagctcctcgaccattcgtttgtcaaggtttgcacagatgaagaatgaagcctagtagaatatggacttggaaaattctcttaatcactactgtatgtaatatttacataaagactgtgctgagaagcagtataagcctttttaaccttccaagactgaagactgcacaggtgacaagcgtcacttctcctgctgctcctgtttgtctgatgtggcaaaaggccctctggagggctggtggccacgaggttaaagaagctgcatgttaagtgccattactactgtacacggaccatcgcctctgtctcctccgtgtctcgcgcgactgagaaccgtgacatcagcgtagtgttttgacctttctaggttcaaaagaagttgtagtgttatcaggcgtcccataccttgtttttaatctcctgtttgttgagtgcactgactgtgaaacctttaccttttttgttgttgttggcaagctgcaggtttgtaatgcaaaaggctgattactgaaatttaagaaaaaggtt

SEQ ID NO: 1065 - protein, 1558 aa, Homo sapiens
MREAAAALVPPPAFAVTPAAAMEEPPPPPPPPPPPPEPETESEPECCLAARQEGTLGDSACKSPESDLEDFSDETNTENLYGTSPPSTPRQMKRMSTKHQRNNVGRPASRSNLKEKMNAPNQPPHKDTGKTVENVEEYSYKQEKKIRAALRTTERDHKKNVQCSFMLDSVGGSLPKKSIPDVDLNKPYLSLGCSNAKLPVSVPMPIARPARQTSRTDCPADRLKFFETLRLLLKLTSVSKKKDREQRGQENTSGFWLNRSNELIWLELQAWHAGRTINDQDFFLYTARQAIPDIINEILTFKVDYGSFAFVRDRAGFNGTSVEGQCKATPGTKIVGYSTHHEHLQRQRVSFEQVKRIMELLEYIEALYPSLQALQKDYEKYAAKDFQDRVQALCLWLNITKDLNQKLRIMGTVLGIKNLSDIGWPVFEIPSPRPSKGNEPEYEGDDTEGELKELESSTDESEEEQISDPRVPEIRQPIDNSFDIQSRDCISKKLERLESEDDSLGWGAPDWSTEAGFSRHCLTSIYRPFVDKALKQMGLRKLILRLHKLMDGSLQRARIALVKNDRPVEFSEFPDPMWGSDYVQLSRTPPSSEEKCSAVSWEELKAMDLPSFEPAFLVLCRVLLNVIHECLKLRLEQRPAGEPSLLSIKQLVRECKEVLKGGLLMKQYYQFMLQEVLEDLEKPDCNIDAFEEDLHKMLMVYFDYMRSWIQMLQQLPQASHSLKNLLEEEWNFTKEITHYIRGGEAQAGKLFCDIAGMLLKSTGSFLEFGLQESCAEFWTSADDSSASDEIIRSVIEISRALKELFHEARERASKALGFAKMLRKDLEIAAEFRLSAPVRDLLDVLKSKQYVKVQIPGLENLQMFVPDTLAEEKSIILQLLNAAAGKDCSKDSDDVLIDAYLLLTKHGDRARDSEDSWGTWEAQPVKVVPQVETVDTLRSMQVDNLLLVVMQSAHLTIQRKAFQQSIEGLMTLCQEQTSSQPVIAKALQQLKNDALELCNRISNAIDRVDHMFTSEFDAEVDESESVTLQQYYREAMIQGYNFGFEYHKEVVRLMSGEFRQKIGDKYISFARKWMNYVLTKCESGRGTRPRWATQGFDFLQAIEPAFISALPEDDFLSLQALMNECIGHVIGKPHSPVTGLYLAIHRNSPRPMKVPRCHSDPPNPHLIIPTPEGFRGSSVPENDRLASIAAELQFRSLSRHSSPTEERDEPAYPRGDSSGSTRRSWELRTLISQSKDTASKLGPIEAIQKSVRLFEEKRYREMRRKNIIGQVCDTPKSYDNVMHVGLRKVTFKWQRGNKIGEGQYGKVYTCISVDTGELMAMKEIRFQPNDHKTIKETADELKIFEGIKHPNLVRYFGVELHREEMYIFMEYCDEGTLEEVSRLGLQEHVIRLYSKQITIAINVLHEHGIVHRDIKGANIFLTSSGLIKLGDFGCSVKLKNNAQTMPGEVNSTLGTAAYMAPEVITRAKGEGHGRAADIWSLGCVVIEMVTGKRPWHEYEHNFQIMYKVGMGHKPPIPERLSPEGKDFLSHCLESDPKMRWTASQLLDHSFVKVCTDEE

SEQ ID NO: 1066 - DNA, 7215 bp, Homo sapiens
tgcggctcgagggggccagcgctgacggtggcgggtacggcaggctcgcgggcgccgggcttcgttacataatctcggaccggaggagcggtggcacatggcggcggaacggcgctgtggaagtatgcgagacttaagagctcaagtgactagtggtctcctgccatttccagaagtgactcttcaagcccttggagaagacgaaataacattagaatctgtgcttcgtggaaagtttgctgcggggaaaaatggacttgcttgcttggcttgtggtccacaacttgaggtagtaaactctataacaggagagcgattgtctgcttacagattcagtggagtcaatgaacagcctcctgtagttttagctgtgaaagaattctcttggcagaagagaactggattattaataggattggaagaaacagaagggagtgttctctgtctttatgaccttggaatatcaaaagtagttaaagcagttgttcttcctggaagggtaacagctattgaacctataattaatcatggaggagccagtgcaagcactcagcatttacatccaagtctgcgatggctttttggagtggcagctgtggtcactgatgttggacagatccttcttattgacctatgtttggatgacttgtcatgcaatcaaaatgaagttgaagcatcagatcttgaagttctaactggtatcccagctgaagtaccacacattagagaaagtgtgatgagagaagggcgccatctgtgtttccagttagtaagtccaacaggaacagccgtttcaactcttagttacataagcaggacaaatcagcttgctgcaggtttttctgatggctatctagcactttggaacatgaaaagcatgaaaagagaatattacatacaattggaaagtggacaagttcctgtatatgctgtcacttttcaagaacctgagaatgatcgtcggaattgctgctacttgtgggctgttcagtctacacaagatagtgaaggggatgttttgagtttgcatctgctgcagctggcctttggtaatagaaagtgtttggcatcaggacaaatcttatatgaggggttagaatactgtgaagaaagatacaccctggacctgacaggtggcatgttccctttgaggggacagacgagtaataccaaattgttgggatgccagagtatagagaaatttcgatctcatggtgacagggaggaaggcgtgaatgaagctctatcgcctgacactagtgtttcagtctttacctggcaggtgaatatatatggacagggaaagccttctgtatatttggggctttttgatataaatcgttggtatcatgcacaaatgccagattcgttaaggtcaggagaatatctacataattgctcttattttgcactgtggtcattggagtctgttgtaagtaggacttctccacatggcatcttggatatattagtacatgagagaagtttaaatagaggagtccctccttcatatccacctcccgagcagttttttaatccaagcacttataattttgatgccacttgtttgttaaactcgggagttgttcatttaacttgtactggctttcagaaggagactttgacttttttaaagaaatcaggtccatcactcaatgaactcattcctgatggttataatcgatgtcttgtagctggccttctttccccaagatttgttgatgttcagccttccagtttaagccaagaagaacagttagaagctatattgtcagcagcaattcagactagttccctgggacttttgactggttatatccgaagatggataacagaagaacaaccaaattctgccactaatttgcgctttgttcttgaatggacgtggaataaagtggttctcacaaaagaggaatttgacagactatgtgtgccattatttgatggttcgtgtcatttcatggatccacaaactatacagtctatccagcaatgctatttgcttcttagcaatcttaatatagtcttgagctgttttgcatcagaagcccgagagatcgctgagagaggactgatagacttaagcaataagtttgtggtttcccacctcatctgtcagtatgcacaagtggttctttggttctctcattctgggcttttaccagaaggcatagatgattctgtgcagttgtcaaggttatgctacaactaccctgtaattcagaactactacaccagtcgtcgacagaagtttgagcgtttatcaagagggaagtggaatcccgattgcttgatgattgatggactggtttctcagttaggagagcgaattgagaagttgtggaaacgagatgaaggaggcacaggaaaatatcctcctgctagtctgcatgcagtacttgatatgtacctattagacggcgttactgaagcagccaaacactctattaccatttatttgctacttgatattatgtattcctttcccaacaaaacagacactcccattgaatctttcccaactgtatttgccatttcttggggccaagttaaacttattcaggggttttggttgatagatcataatgactatgagagtggtttggatcttttgtttcatccagctactgcaaaacctttgtcatggcaacattcaaagattattcaggcattcatgagtcagggcgagcacagacaagccctcagatatattcagacaatgaagccaacagtgtccagtggtaacgatgttatccttcacctcactgttttgctttttaataggtgtatggttgaagcctggaattttttgcggcaacattgcaataggttgaatatagaggagttactgaagcacatgtatgaagtctgtcaggaaatgggcttgatggaagatttactgaagttaccatttacagacactgagcaggaatgtttagtgaaatttttgcagtccagtgccagcgttcagaatcatgaattccttttagtgcaccatttgcagcgtgccaattatgtgcctgccttgaagctgaaccaaactctgaagattaatgttatgaatgatcgtgatcctcgtttgcgggagagatcactggctcgaaattctatattagaccagtatggaaaaatccttcctagagtccatcgaaaattagccattgaacgagctaagccttatcatctgtcaacatcatcagtttttcgattagtttctagacccaaaccattatcagcagttccaaagcaagttgtaacaggaactgtgttgacaagatctgttttcatcaacaatgtgttatctaaaattggagaagtttgggcaagcaaagaacctataaatagcaccacacctttcaatagttctaaaatagaagaaccatctcctatagtgtattcgctcccagctccagagctgcctgaggcattttttggaacaccaatttcaaaagcatcacaaaaaatttctagactgctagatttggttgttcagcctgtcccccggccttctcagtgttcggagtttattcagcaaagctccatgaaatctcctttgtacctagtatcccgttcactgccctcaagttcgcaattaaaaggatcgcctcaggccatctccagggcttcagaattacatttgcttgaaactcctcttgtagttaagaaagctaaaagtttggccatgtcagttactacttctggattttctgagttcactcctcagtccatcctgaggtctactcctcgatcaacacctttagcatctccctctccatcacctggaaggtctcctcaacgacttaaagaaactagaatttcatttgtggaagaagatgtccacccaaaatggattcctggggctgcagatgatagcaaattagaagtatttactacacctaaaaaatgtgcagttccagtggaaactgaatggccgaagagcaaagataggaccacatcttttttcctgaacagccctgaaaaggagcatcaagaaatggatgaggggtcacaaagtttagagaaactggatgtgagcaaaggaaacagcagtgtttcaatcacatccgatgagactaccttagagtatcaggatgcaccgtcaccggaagaccttgaagagactgttttcacggcctctaagcccaaaagctcttccactgcactaactactaatgtaactgaacaaactgaaaaggatggagataaagatgtatttgcatcagaagtaactccttcagacctacagaaacaaatgggcaatttagaagatgcagaaacaaaggatctcttagttgcagcagaggcattttcagaattgaatcacttaagcccggttcaaggaactgaagcttctctttgtgcaccatcagtctatgaagggaaaatcttcacccagaagtccaaggtaccagtgttggacgaaggattaacatctgttgaaacctacacccctgcaattagagcaaatgacaataaatctatggctgatgtccttggtgatggtggaaactcctcgctcactatctctgaaggtcctattgtctctgagcgcaggcttaaccaggaagtagcgctgaacttaaaagaagatcatgaagtagaagttggtgtactaaaagaaagtgttgacttaccagaagaaaagcttccaatttctgacagccctcctgatactcaagaaattcatgtgattgaacaagaaaagcttgaagctcaagattcaggagaagaggctaggaatctttcatttaatgagttatatccctctggaacacttaagcttcagtacaattttgatactattgaccaacagttttgtgacttagctgataacaaagacactgctgaatgtgacattgctgaagtagatggggaactttttgtggctcaaagcaactttaccttgatattggaaggtgaagaaggagaagttgagccaggtgattttgcatcatctgatgtgttacctaaagcagctaacacagcaactgaagaaaaacttgtatgcagtggggaaaatgataatcatggacaaattgcaaatttgccatctgccgtaactagtgaccaaaagtcccaaaaagtagacactttaccatatgtgcctgaacctattaaagtagcaattgcagaaaatttactagatgtaattaaagacacaagaagtaaagaaattacttcagatacaatggaacagtccattcatgaaacaatacctttagtgagccaaaacataatgtgtcccactaaattggtcaaatctgcatttaagactgctcaggaaacaagcacaatgactatgaatgtcagccaggttgatgacgtggtttcctccaaaactcgtacgagaggtcaacgtatccaaaacgtgaatgtcaaatcagcacaacaggaagcatcagcagatgttgctactcctaagatgccagggcagtcagtcaggaagaaaactaggaaggcaaaagaaatttctgaagcttctgaaaacatctattctgatgtcagaggactatttcagaaccagcaaatacctcaaaattctgttacgcctaggagaggaaggagaaagaaagaagttaatcaggacatactagaaaacaccagttctgtggaacaagaattacagatcactacaggtagggaatcaaaaagattaaaatcatctcagctgttggaaccagcagttgaagaaactactaaaaaagaagttaaggtttcatctgttacaaaaaggactcctagaagaattaaaagatctgtagaaaatcaggaaagtgttgaaattataaatgatctaaaagttagtacggtaacaagtcctagcagaatgatcagaaaattgagaagtactaatttagatgcttctgaaaatacaggaaataagcaagatgataaatccagtgacaagcagctgcgtattaaacatgttagaagggtcagagggagagaagttagtccatcagatgtgagagaagactccaaccttgagtcatctcagttgactgttcaagcagaatttgatatgtctgccatacctagaaaacgtggtagaccaagaaaaatcaatccatctgaagatgtaggatctaaggctgttaaggaagagagaagccccaagaagaaagaagctcccagcattagaaggagatctacaagaaataccccagctaaaagtgaaaatgttgatgttggaaaaccagctttaggaaaatccattttagtgccaaacgaggaactttcgatggtgatgagctctaagaaaaaacttacaaaaaagactgaaagtcaaagccaaaaacgttcattgcactcagtatcagaagaacgcacagatgaaatgacacataaagaaacaaatgagcaggaagaaagattgctcgccacagcttccttcactaaatcatcccgcagcagcaggactcggtctagcaaggccatcttgttgccggacctttctgaaccaaacaatgagcctttattttctccagcgtcagaagttccaaggaaagcaaaagctaaaaaaatagaggttcctgcacagctgaaagaattagtttcggatttatcttctcagtttgtcatctcacctcctgctttaaggagcagacaaaaaaacacatccaataagaacaagcttgaagatgaactgaaagatgatgcacaatcagtagaaactctgggaaagccaaaagcgaaacgaatcaggacgtcaaaaacaaaacaagcaagcaaaaacacagaaaaagaaagtgcttggtcacttcctcccatagaaattcggctgatttcccccttggctagcccagctgacggagtcaagagcaaaccaagaaaaactacagaagtgacaggaacaggtcttggaaggaacagaaagaaactgtcttcctatccaaagcaaattttacgcagaaaaatgctgtaatttcttgggaagattttaatgtacacctatttgtaaagtcatcagaatagtgtggattattaaatatctagtttggaagaaaataatttatataaattattgtaaatttttatgtaaacagaaggtcttcaataagtaaagtaactccatatggagtgattgtttcagtccaggcaatttttctattttatattaagacttcatacatttatatatgtaaatatggcttattaatggaatgttaaataaaatgtatacttctcaaaaaaaaaaaaaaaaaaaaaaaaaaa

SEQ ID NO: 1067 - protein, 2266 aa, Homo sapiens
MRDLRAQVTSGLLPFPEVTLQALGEDEITLESVLRGKFAAGKNGLACLACGPQLEVVNSITGERLSAYRFSGVNEQPPVVLAVKEFSWQKRTGLLIGLEETEGSVLCLYDLGISKVVKAVVLPGRVTAIEPIINHGGASASTQHLHPSLRWLFGVAAVVTDVGQILLIDLCLDDLSCNQNEVEASDLEVLTGIPAEVPHIRESVMREGRHLCFQLVSPTGTAVSTLSYISRTNQLAAGFSDGYLALWNMKSMKREYYIQLESGQVPVYAVTFQEPENDRRNCCYLWAVQSTQDSEGDVLSLHLLQLAFGNRKCLASGQILYEGLEYCEERYTLDLTGGMFPLRGQTSNTKLLGCQSIEKFRSHGDREEGVNEALSPDTSVSVFTWQVNIYGQGKPSVYLGLFDINRWYHAQMPDSLRSGEYLHNCSYFALWSLESVVSRTSPHGILDILVHERSLNRGVPPSYPPPEQFFNPSTYNFDATCLLNSGVVHLTCTGFQKETLTFLKKSGPSLNELIPDGYNRCLVAGLLSPRFVDVQPSSLSQEEQLEAILSAAIQTSSLGLLTGYIRRWITEEQPNSATNLRFVLEWTWNKVVLTKEEFDRLCVPLFDGSCHFMDPQTIQSIQQCYLLLSNLNIVLSCFASEAREIAERGLIDLSNKFVVSHLICQYAQVVLWFSHSGLLPEGIDDSVQLSRLCYNYPVIQNYYTSRRQKFERLSRGKWNPDCLMIDGLVSQLGERIEKLWKRDEGGTGKYPPASLHAVLDMYLLDGVTEAAKHSITIYLLLDIMYSFPNKTDTPIESFPTVFAISWGQVKLIQGFWLIDHNDYESGLDLLFHPATAKPLSWQHSKIIQAFMSQGEHRQALRYIQTMKPTVSSGNDVILHLTVLLFNRCMVEAWNFLRQHCNRLNIEELLKHMYEVCQEMGLMEDLLKLPFTDTEQECLVKFLQSSASVQNHEFLLVHHLQRANYVPALKLNQTLKINVMNDRDPRLRERSLARNSILDQYGKILPRVHRKLAIERAKPYHLSTSSVFRLVSRPKPLSAVPKQVVTGTVLTRSVFINNVLSKIGEVWASKEPINSTTPFNSSKIEEPSPIVYSLPAPELPEAFFGTPISKASQKISRLLDLVVQPVPRPSQCSEFIQQSSMKSPLYLVSRSLPSSSQLKGSPQAISRASELHLLETPLVVKKAKSLAMSVTTSGFSEFTPQSILRSTPRSTPLASPSPSPGRSPQRLKETRISFVEEDVHPKWIPGAADDSKLEVFTTPKKCAVPVETEWPKSKDRTTSFFLNSPEKEHQEMDEGSQSLEKLDVSKGNSSVSITSDETTLEYQDAPSPEDLEETVFTASKPKSSSTALTTNVTEQTEKDGDKDVFASEVTPSDLQKQMGNLEDAETKDLLVAAEAFSELNHLSPVQGTEASLCAPSVYEGKIFTQKSKVPVLDEGLTSVETYTPAIRANDNKSMADVLGDGGNSSLTISEGPIVSERRLNQEVALNLKEDHEVEVGVLKESVDLPEEKLPISDSPPDTQEIHVIEQEKLEAQDSGEEARNLSFNELYPSGTLKLQYNFDTIDQQFCDLADNKDTAECDIAEVDGELFVAQSNFTLILEGEEGEVEPGDFASSDVLPKAANTATEEKLVCSGENDNHGQIANLPSAVTSDQKSQKVDTLPYVPEPIKVAIAENLLDVIKDTRSKEITSDTMEQSIHETIPLVSQNIMCPTKLVKSAFKTAQETSTMTMNVSQVDDVVSSKTRTRGQRIQNVNVKSAQQEASADVATPKMPGQSVRKKTRKAKEISEASENIYSDVRGLFQNQQIPQNSVTPRRGRRKKEVNQDILENTSSVEQELQITTGRESKRLKSSQLLEPAVEETTKKEVKVSSVTKRTPRRIKRSVENQESVEIINDLKVSTVTSPSRMIRKLRSTNLDASENTGNKQDDKSSDKQLRIKHVRRVRGREVSPSDVREDSNLESSQLTVQAEFDMSAIPRKRGRPRKINPSEDVGSKAVKEERSPKKKEAPSIRRRSTRNTPAKSENVDVGKPALGKSILVPNEELSMVMSSKKKLTKKTESQSQKRSLHSVSEERTDEMTHKETNEQEERLLATASFTKSSRSSRTRSSKAILLPDLSEPNNEPLFSPASEVPRKAKAKKIEVPAQLKELVSDLSSQFVISPPALRSRQKNTSNKNKLEDELKDDAQSVETLGKPKAKRIRTSKTKQASKNTEKESAWSLPPIEIRLISPLASPADGVKSKPRKTTEVTGTGLGRNRKKLSSYPKQILRRKML

SEQ ID NO: 1068 - DNA, 4646 bp, Homo sapiens
gaatgcaggtgagaaaaggcacggactctgcggctgcgaacccaaacttgggcaccgcacggtgcgcactgctcagccttcgcccccgtgggcgaaaggctgctgcggtttcaggcggctgcttcgtgactaatgaccttgcgcagagttgttaagaaaaaagagaaacccgcgctctccggggtgagaagggactgactctgggcgtctctgaagatggctcgggcttctctttggcgcgccggggggaccctgacactgaccgctctgtgacgcgagtagtctcccctgcaccgtgcccgaagcgacgtgccgggggatttttcattctcgatctgttgactggctcccccgctgcatgagcagagtcggagttgagactggcttgttgctggccccagcgcctggtgcaggaagcgactcacgtttgtctgggtggccggagccggagcagagcctgggtttggagtgagtgcctggaacgtgaattggactcaactcgagtagcagcaaagaccagcgggctggcaggcgggggaggctgcaggctcattccccacctcttcccagccccactgcccgtctgccggagcggttctggccccttccgacagagcggggactagagccggggattctccgcccgctgaggggatgactctgggttgggggagcgccgaacccgcggcgcgcagtgtcccgtgaactgtgagtactgcgactgaacggcggcaggcgagcgggcgattagcacccattgcatgaattatgaaacaataactttcggaagaagcaggaggaaaaaaagaagcatctatcgctgccctcccacccccattcccggccaactctccacgccgcttttgccccctccctcccctccctctcgctccttcctttccgggagaggggagaggactcgggggagggcaggcggccggccccggaggaggggggcgccgagggggctgtggttagaaggagcagtagcagcagcagcaggagaagatgctgaggatgcggaccgcgggatgggcgcgcggctggtgcttgggctgctgcctcctcctgccgctctcgctcagcctggcggccgccaagcagctcctccggtaccggctggccgaggagggccccgccgacgtccgcatcggcaacgtggcttcagacctgggcatcgtgaccggatcgggtgaggtgactttcagcctggagtccggttccgagtacctgaagatcgacaacctcactggcgagctgagcacgagcgagcggcgcatcgaccgcgagaagctgccccagtgtcagatgatcttcgacgagaacgagtgcttcctggacttcgaggtgtcggtgatcgggccctcgcagagctgggtggacctgtttgagggtcaggtcatcgtgcttgacatcaacgacaacacgcccaccttcccgtcgcccgtgctcacgctcacggtggaggagaatcggccggtgggcacactttacctgctgcccacagccaccgaccgcgacttcggccgcaacggcatcgagcgctacgagctgctccaggagcccggaggcggcggcagcggcggcgagagccggcgcgccggggcggccgacagcgccccctaccccgggggcggcgggaacggcgcgagcggcggcggctcgggaggctccaagcggcggctggacgcatcagagggcggcggcggcaccaaccccggcggccgcagcagcgtgttcgagctgcaggtggcggacaccccggacggcgagaagcagccgcagctgatcgtgaagggggcgctggaccgcgagcagcgcgactcctacgagctgaccctgcgagtgcgcgacggcggcgacccgcctcgctcctcgcaggccatcctacgggtcctcatcaccgacgtgaacgacaacagcccccgcttcgagaagagcgtgtacgaggccgacttggctgagaacagcgccccggggacccccatcctgcaactgcgcgcagccgacttggacgtgggggtcaacgggcagatcgaatacgtgttcggggcggccaccgagtcggtgaggcggctgctgcgccttgacgagacgtccggctggctcagcgtcctgcaccggatcgaccgcgaggaggtgaaccagctgcgcttcacggtcatggcccgcgaccgcgggcagccccccaagaccgacaaggccaccgtggtccttaacatcaaagacgagaacgacaacgtgccgtccattgaaatccgcaagattgggcgcatccccctcaaggacggggtggccaacgtggccgaggacgttctggtcgacacccccatcgctctggtgcaggtgtccgaccgagaccaaggcgagaacggggtggtcacctgcaccgtggtgggcgacgtgcccttccagctcaagccagccagcgacaccgagggcgaccagaacaagaaaaagtacttcttgcacacctcgacccctctggactatgaggccacccgggagttcaacgtggtcatcgtggcggtggactcaggcagccccagcctctcgagcaacaactccctgattgtcaaggtgggagacaccaacgacaacccgcccatgttcggccagtcggtggtggaggtttacttccctgagaacaacatcccgggcgagagggtggccacggtgctggcgacagacgcagacagcggtaagaacgccgagatcgcctactcgctggactcctctgtgatggggatctttgccatcgatcccgattctggggacatcctggtcaataccgtgctggaccgcgagcagactgacaggtatgagtttaaagttaacgccaaagacaaaggcatccccgtgctgcagggcagcactacggtgattgtgcaggtggctgataaaaatgacaatgaccctaagtttatgcaggacgtcttcaccttttatgtgaaagaaaacttgcagcccaacagccctgtggggatggtcaccgtgatggatgctgacaaggggcggaatgcagagatgagcctgtacatagaggagaacaataacattttttctattgaaaatgacacggggaccatttactccacaatgtcttttgaccgggaacatcagaccacatacactttcagagtcaaggctgtggatgggggagatcctcccagatctgccacagctacagtctcgctttttgtgatggatgaaaatgacaatgctcccacagttacccttcccaaaaacatttcctacactttactgccaccttcgagtaatgtcaggacagtagtagctacagtgttggcaacagacagtgatgatggcatcaatgcagacctgaactacagcattgtgggaggaaatcccttcaagctgtttgaaattgatcccactagtggtgtggtttccttagtgggaaaactcacccaaaagcattatggcttgcacaggttggtggtgcaagtgaatgacagtgggcagccttcccagtccaccacgactctggtgcacgtgtttgtcaatgaaagtgtttctaatgcaactgcgattgactcccagatagctagaagtttgcacatcccactcacccaggatatagctggtgacccaagctatgaaattagcaaacagagactcagtattgtcattggcgtggttgctggcattatgacggtgattctaatcatcttaattgtagtgatggcaaggtactgcaggtccaaaaataaaaatggctatgaagccggcaaaaaagatcacgaagacttttttacaccccaacagcatgacaaatctaaaaagcctaaaaaggacaagaaaaacaaaaaatctaagcagcctctctacagcagcattgtcactgtggaggcttctaagccaaatggacagaggtatgatagtgtcaatgagaagctgtcagacagcccaagcatggggcgatacaggtccgttaatggtgggcccggcagtcctgacctggcaaggcattacaaatctagttccccattgcctactgttcagcttcatccccagtcaccaactgcaggaaaaaaacaccaggccgtacaagatctaccaccagccaacacatttgtgggagcaggagacaacatttcaattggatcagatcactgctctgagtacagctgtcaaaccaataacaagtacagcaaacagatgcgtctacatccatacattactgtgtttggctgaattccactctaatatgatgctccattatgcaccatactgtgatgacctttctactccgaaacctgctggagcctgcccttggccgtggggtgtcagccaatcactgcttgttccacttgttgtacattttatttttgagtctttttctttctcatatacagaaaaatagtatgaaaataaaataaatgtatgaaacagtattaatgcagaaatgtgctactaatggatgtctgagtcaccagaaattccattcttaaagaggcggttagcacctattagacgtaacagtgatgtcttttaaaaaatccaaaagcatattgcaacaataagtttgagactttgtgtgaacaaagggaaattcagcctcttatgtctttgtctttaatacattaaatactgattttgaataaaaatctaaattgatcaat

SEQ ID NO: 1069 - protein, 1069 aa, Homo sapiens
MLRMRTAGWARGWCLGCCLLLPLSLSLAAAKQLLRYRLAEEGPADVRIGNVASDLGIVTGSGEVTFSLESGSEYLKIDNLTGELSTSERRIDREKLPQCQMIFDENECFLDFEVSVIGPSQSWVDLFEGQVIVLDINDNTPTFPSPVLTLTVEENRPVGTLYLLPTATDRDFGRNGIERYELLQEPGGGGSGGESRRAGAADSAPYPGGGGNGASGGGSGGSKRRLDASEGGGGTNPGGRSSVFELQVADTPDGEKQPQLIVKGALDREQRDSYELTLRVRDGGDPPRSSQAILRVLITDVNDNSPRFEKSVYEADLAENSAPGTPILQLRAADLDVGVNGQIEYVFGAATESVRRLLRLDETSGWLSVLHRIDREEVNQLRFTVMARDRGQPPKTDKATVVLNIKDENDNVPSIEIRKIGRIPLKDGVANVAEDVLVDTPIALVQVSDRDQGENGVVTCTVVGDVPFQLKPASDTEGDQNKKKYFLHTSTPLDYEATREFNVVIVAVDSGSPSLSSNNSLIVKVGDTNDNPPMFGQSVVEVYFPENNIPGERVATVLATDADSGKNAEIAYSLDSSVMGIFAIDPDSGDILVNTVLDREQTDRYEFKVNAKDKGIPVLQGSTTVIVQVADKNDNDPKFMQDVFTFYVKENLQPNSPVGMVTVMDADKGRNAEMSLYIEENNNIFSIENDTGTIYSTMSFDREHQTTYTFRVKAVDGGDPPRSATATVSLFVMDENDNAPTVTLPKNISYTLLPPSSNVRTVVATVLATDSDDGINADLNYSIVGGNPFKLFEIDPTSGVVSLVGKLTQKHYGLHRLVVQVNDSGQPSQSTTTLVHVFVNESVSNATAIDSQIARSLHIPLTQDIAGDPSYEISKQRLSIVIGVVAGIMTVILIILIVVMARYCRSKNKNGYEAGKKDHEDFFTPQQHDKSKKPKKDKKNKKSKQPLYSSIVTVEASKPNGQRYDSVNEKLSDSPSMGRYRSVNGGPGSPDLARHYKSSSPLPTVQLHPQSPTAGKKHQAVQDLPPANTFVGAGDNISIGSDHCSEYSCQTNNKYSKQMRLHPYITVFG

SEQ ID NO: 1070 - DNA, 4921 bp, Homo sapiens
gaatgcaggtgagaaaaggcacggactctgcggctgcgaacccaaacttgggcaccgcacggtgcgcactgctcagccttcgcccccgtgggcgaaaggctgctgcggtttcaggcggctgcttcgtgactaatgaccttgcgcagagttgttaagaaaaaagagaaacccgcgctctccggggtgagaagggactgactctgggcgtctctgaagatggctcgggcttctctttggcgcgccggggggaccctgacactgaccgctctgtgacgcgagtagtctcccctgcaccgtgcccgaagcgacgtgccgggggatttttcattctcgatctgttgactggctcccccgctgcatgagcagagtcggagttgagactggcttgttgctggccccagcgcctggtgcaggaagcgactcacgtttgtctgggtggccggagccggagcagagcctgggtttggagtgagtgcctggaacgtgaattggactcaactcgagtagcagcaaagaccagcgggctggcaggcgggggaggctgcaggctcattccccacctcttcccagccccactgcccgtctgccggagcggttctggccccttccgacagagcggggactagagccggggattctccgcccgctgaggggatgactctgggttgggggagcgccgaacccgcggcgcgcagtgtcccgtgaactgtgagtactgcgactgaacggcggcaggcgagcgggcgattagcacccattgcatgaattatgaaacaataactttcggaagaagcaggaggaaaaaaagaagcatctatcgctgccctcccacccccattcccggccaactctccacgccgcttttgccccctccctcccctccctctcgctccttcctttccgggagaggggagaggactcgggggagggcaggcggccggccccggaggaggggggcgccgagggggctgtggttagaaggagcagtagcagcagcagcaggagaagatgctgaggatgcggaccgcgggatgggcgcgcggctggtgcttgggctgctgcctcctcctgccgctctcgctcagcctggcggccgccaagcagctcctccggtaccggctggccgaggagggccccgccgacgtccgcatcggcaacgtggcttcagacctgggcatcgtgaccggatcgggtgaggtgactttcagcctggagtccggttccgagtacctgaagatcgacaacctcactggcgagctgagcacgagcgagcggcgcatcgaccgcgagaagctgccccagtgtcagatgatcttcgacgagaacgagtgcttcctggacttcgaggtgtcggtgatcgggccctcgcagagctgggtggacctgtttgagggtcaggtcatcgtgcttgacatcaacgacaacacgcccaccttcccgtcgcccgtgctcacgctcacggtggaggagaatcggccggtgggcacactttacctgctgcccacagccaccgaccgcgacttcggccgcaacggcatcgagcgctacgagctgctccaggagcccggaggcggcggcagcggcggcgagagccggcgcgccggggcggccgacagcgccccctaccccgggggcggcgggaacggcgcgagcggcggcggctcgggaggctccaagcggcggctggacgcatcagagggcggcggcggcaccaaccccggcggccgcagcagcgtgttcgagctgcaggtggcggacaccccggacggcgagaagcagccgcagctgatcgtgaagggggcgctggaccgcgagcagcgcgactcctacgagctgaccctgcgagtgcgcgacggcggcgacccgcctcgctcctcgcaggccatcctacgggtcctcatcaccgacgtgaacgacaacagcccccgcttcgagaagagcgtgtacgaggccgacttggctgagaacagcgccccggggacccccatcctgcaactgcgcgcagccgacttggacgtgggggtcaacgggcagatcgaatacgtgttcggggcggccaccgagtcggtgaggcggctgctgcgccttgacgagacgtccggctggctcagcgtcctgcaccggatcgaccgcgaggaggtgaaccagctgcgcttcacggtcatggcccgcgaccgcgggcagccccccaagaccgacaaggccaccgtggtccttaacatcaaagacgagaacgacaacgtgccgtccattgaaatccgcaagattgggcgcatccccctcaaggacggggtggccaacgtggccgaggacgttctggtcgacacccccatcgctctggtgcaggtgtccgaccgagaccaaggcgagaacggggtggtcacctgcaccgtggtgggcgacgtgcccttccagctcaagccagccagcgacaccgagggcgaccagaacaagaaaaagtacttcttgcacacctcgacccctctggactatgaggccacccgggagttcaacgtggtcatcgtggcggtggactcaggcagccccagcctctcgagcaacaactccctgattgtcaaggtgggagacaccaacgacaacccgcccatgttcggccagtcggtggtggaggtttacttccctgagaacaacatcccgggcgagagggtggccacggtgctggcgacagacgcagacagcggtaagaacgccgagatcgcctactcgctggactcctctgtgatggggatctttgccatcgatcccgattctggggacatcctggtcaataccgtgctggaccgcgagcagactgacaggtatgagtttaaagttaacgccaaagacaaaggcatccccgtgctgcagggcagcactacggtgattgtgcaggtggctgataaaaatgacaatgaccctaagtttatgcaggacgtcttcaccttttatgtgaaagaaaacttgcagcccaacagccctgtggggatggtcaccgtgatggatgctgacaaggggcggaatgcagagatgagcctgtacatagaggagaacaataacattttttctattgaaaatgacacggggaccatttactccacaatgtcttttgaccgggaacatcagaccacatacactttcagagtcaaggctgtggatgggggagatcctcccagatctgccacagctacagtctcgctttttgtgatggatgaaaatgacaatgctcccacagttacccttcccaaaaacatttcctacactttactgccaccttcgagtaatgtcaggacagtagtagctacagtgttggcaacagacagtgatgatggcatcaatgcagacctgaactacagcattgtgggaggaaatcccttcaagctgtttgaaattgatcccactagtggtgtggtttccttagtgggaaaactcacccaaaagcattatggcttgcacaggttggtggtgcaagtgaatgacagtgggcagccttcccagtccaccacgactctggtgcacgtgtttgtcaatgaaagtgtttctaatgcaactgcgattgactcccagatagctagaagtttgcacatcccactcacccaggatatagctggtgacccaagctatgaaattagcaaacagagactcagtattgtcattggcgtggttgctggcattatgacggtgattctaatcatcttaattgtagtgatggcaaggtactgcaggtccaaaaataaaaatggctatgaagccggcaaaaaagatcacgaagacttttttacaccccaacagcatgacaaatctaaaaagcctaaaaaggacaagaaaaacaaaaaatctaagcagcctctctacagcagcattgtcactgtggaggcttctaagccaaatggacagaggtatgatagtgtcaatgagaagctgtcagacagcccaagcatggggcgatacaggtccgttaatggtgggcccggcagtcctgacctggcaaggcattacaaatctagttccccattgcctactgttcagcttcatccccagtcaccaactgcaggaaaaaaacaccaggccgtacaagatctaccaccagccaacacatttgtgggagcaggagacaacatttcaattggatcagatcactgctctgagtacagctgtcaaaccaataacaagtacagcaaacaggtaagatgtatcccaaatatatttaaatatcccagggagggctaataactctgagacagattatcttctgtaaagttttgtcttctcgtttttaaagttattaaaattttaacagtaggaatttaatgttaatttttgcaccattaatttagcaaaggccatctacaagaggtataccactgtattttgcaaattagaattaaggttcactaaactactgaaagaagtattcagagtaggcagtgtttggcagttctctttgcacttgacatccctaattcatactacatttttttgtttccagaataaatatgtgtgtattacttagatggttagttttcacctgaaattattttcttctgtggcaactaagtggataattacatccagagaaaaagtttctaaagttactactggtgtctatgcaaattggattccatagaagttttagctatgttatttacaatgcaggattttacagataaatagatgctgattcatgcagatgtagtactaagtctgagatattgaaatactgactactttgatgaaactgctggtttaaaaatatttactgatatgcaaatgtcatgcaaaactccactttcaatcttttatatctataataatcgatacctataacaattagtgttctataatgatatgcaattaccatttgcattctttctgtttggtattaaaagtttgcaaacaaaaatacattgcatgagccatttat

SEQ ID NO: 1071 - protein, 1072 aa, Homo sapiens
MLRMRTAGWARGWCLGCCLLLPLSLSLAAAKQLLRYRLAEEGPADVRIGNVASDLGIVTGSGEVTFSLESGSEYLKIDNLTGELSTSERRIDREKLPQCQMIFDENECFLDFEVSVIGPSQSWVDLFEGQVIVLDINDNTPTFPSPVLTLTVEENRPVGTLYLLPTATDRDFGRNGIERYELLQEPGGGGSGGESRRAGAADSAPYPGGGGNGASGGGSGGSKRRLDASEGGGGTNPGGRSSVFELQVADTPDGEKQPQLIVKGALDREQRDSYELTLRVRDGGDPPRSSQAILRVLITDVNDNSPRFEKSVYEADLAENSAPGTPILQLRAADLDVGVNGQIEYVFGAATESVRRLLRLDETSGWLSVLHRIDREEVNQLRFTVMARDRGQPPKTDKATVVLNIKDENDNVPSIEIRKIGRIPLKDGVANVAEDVLVDTPIALVQVSDRDQGENGVVTCTVVGDVPFQLKPASDTEGDQNKKKYFLHTSTPLDYEATREFNVVIVAVDSGSPSLSSNNSLIVKVGDTNDNPPMFGQSVVEVYFPENNIPGERVATVLATDADSGKNAEIAYSLDSSVMGIFAIDPDSGDILVNTVLDREQTDRYEFKVNAKDKGIPVLQGSTTVIVQVADKNDNDPKFMQDVFTFYVKENLQPNSPVGMVTVMDADKGRNAEMSLYIEENNNIFSIENDTGTIYSTMSFDREHQTTYTFRVKAVDGGDPPRSATATVSLFVMDENDNAPTVTLPKNISYTLLPPSSNVRTVVATVLATDSDDGINADLNYSIVGGNPFKLFEIDPTSGVVSLVGKLTQKHYGLHRLVVQVNDSGQPSQSTTTLVHVFVNESVSNATAIDSQIARSLHIPLTQDIAGDPSYEISKQRLSIVIGVVAGIMTVILIILIVVMARYCRSKNKNGYEAGKKDHEDFFTPQQHDKSKKPKKDKKNKKSKQPLYSSIVTVEASKPNGQRYDSVNEKLSDSPSMGRYRSVNGGPGSPDLARHYKSSSPLPTVQLHPQSPTAGKKHQAVQDLPPANTFVGAGDNISIGSDHCSEYSCQTNNKYSKQVRCIPNIFKYPREG

SEQ ID NO: 1072 - DNA, 4893 bp, Homo sapiens
gaatgcaggtgagaaaaggcacggactctgcggctgcgaacccaaacttgggcaccgcacggtgcgcactgctcagccttcgcccccgtgggcgaaaggctgctgcggtttcaggcggctgcttcgtgactaatgaccttgcgcagagttgttaagaaaaaagagaaacccgcgctctccggggtgagaagggactgactctgggcgtctctgaagatggctcgggcttctctttggcgcgccggggggaccctgacactgaccgctctgtgacgcgagtagtctcccctgcaccgtgcccgaagcgacgtgccgggggatttttcattctcgatctgttgactggctcccccgctgcatgagcagagtcggagttgagactggcttgttgctggccccagcgcctggtgcaggaagcgactcacgtttgtctgggtggccggagccggagcagagcctgggtttggagtgagtgcctggaacgtgaattggactcaactcgagtagcagcaaagaccagcgggctggcaggcgggggaggctgcaggctcattccccacctcttcccagccccactgcccgtctgccggagcggttctggccccttccgacagagcggggactagagccggggattctccgcccgctgaggggatgactctgggttgggggagcgccgaacccgcggcgcgcagtgtcccgtgaactgtgagtactgcgactgaacggcggcaggcgagcgggcgattagcacccattgcatgaattatgaaacaataactttcggaagaagcaggaggaaaaaaagaagcatctatcgctgccctcccacccccattcccggccaactctccacgccgcttttgccccctccctcccctccctctcgctccttcctttccgggagaggggagaggactcgggggagggcaggcggccggccccggaggaggggggcgccgagggggctgtggttagaaggagcagtagcagcagcagcaggagaagatgctgaggatgcggaccgcgggatgggcgcgcggctggtgcttgggctgctgcctcctcctgccgctctcgctcagcctggcggccgccaagcagctcctccggtaccggctggccgaggagggccccgccgacgtccgcatcggcaacgtggcttcagacctgggcatcgtgaccggatcgggtgaggtgactttcagcctggagtccggttccgagtacctgaagatcgacaacctcactggcgagctgagcacgagcgagcggcgcatcgaccgcgagaagctgccccagtgtcagatgatcttcgacgagaacgagtgcttcctggacttcgaggtgtcggtgatcgggccctcgcagagctgggtggacctgtttgagggtcaggtcatcgtgcttgacatcaacgacaacacgcccaccttcccgtcgcccgtgctcacgctcacggtggaggagaatcggccggtgggcacactttacctgctgcccacagccaccgaccgcgacttcggccgcaacggcatcgagcgctacgagctgctccaggagcccggaggcggcggcagcggcggcgagagccggcgcgccggggcggccgacagcgccccctaccccgggggcggcgggaacggcgcgagcggcggcggctcgggaggctccaagcggcggctggacgcatcagagggcggcggcggcaccaaccccggcggccgcagcagcgtgttcgagctgcaggtggcggacaccccggacggcgagaagcagccgcagctgatcgtgaagggcgtgtacgaggccgacttggctgagaacagcgccccggggacccccatcctgcaactgcgcgcagccgacttggacgtgggggtcaacgggcagatcgaatacgtgttcggggcggccaccgagtcggtgaggcggctgctgcgccttgacgagacgtccggctggctcagcgtcctgcaccggatcgaccgcgaggaggtgaaccagctgcgcttcacggtcatggcccgcgaccgcgggcagccccccaagaccgacaaggccaccgtggtccttaacatcaaagacgagaacgacaacgtgccgtccattgaaatccgcaagattgggcgcatccccctcaaggacggggtggccaacgtggccgaggacgttctggtcgacacccccatcgctctggtgcaggtgtccgaccgagaccaaggcgagaacggggtggtcacctgcaccgtggtgggcgacgtgcccttccagctcaagccagccagcgacaccgagggcgaccagaacaagaaaaagtacttcttgcacacctcgacccctctggactatgaggccacccgggagttcaacgtggtcatcgtggcggtggactcaggcagccccagcctctcgagcaacaactccctgattgtcaaggtgggagacaccaacgacaacccgcccatgttcggccagtcggtggtggaggtttacttccctgagaacaacatcccgggcgagagggtggccacggtgctggcgacagacgcagacagcggtaagaacgccgagatcgcctactcgctggactcctctgtgatggggatctttgccatcgatcccgattctggggacatcctggtcaataccgtgctggaccgcgagcagactgacaggtatgagtttaaagttaacgccaaagacaaaggcatccccgtgctgcagggcagcactacggtgattgtgcaggtggctgataaaaatgacaatgaccctaagtttatgcaggacgtcttcaccttttatgtgaaagaaaacttgcagcccaacagccctgtggggatggtcaccgtgatggatgctgacaaggggcggaatgcagagatgagcctgtacatagaggagaacaataacattttttctattgaaaatgacacggggaccatttactccacaatgtcttttgaccgggaacatcagaccacatacactttcagagtcaaggctgtggatgggggagatcctcccagatctgccacagctacagtctcgctttttgtgatggatgaaaatgacaatgctcccacagttacccttcccaaaaacatttcctacactttactgccaccttcgagtaatgtcaggacagtagtagctacagtgttggcaacagacagtgatgatggcatcaatgcagacctgaactacagcattgtgggaggaaatcccttcaagctgtttgaaattgatcccactagtggtgtggtttccttagtgggaaaactcacccaaaagcattatggcttgcacaggttggtggtgcaagtgaatgacagtgggcagccttcccagtccaccacgactctggtgcacgtgtttgtcaatgaaagtgtttctaatgcaactgcgattgactcccagatagctagaagtttgcacatcccactcacccaggatatagctggtgacccaagctatgaaattagcaaacagagactcagtattgtcattggcgtggttgctggcattatgacggtgattctaatcatcttaattgtagtgatggcaaggtactgcaggtccaaaaataaaaatggctatgaagccggcaaaaaagatcacgaagacttttttacaccccaacagcatgacaaatctaaaaagcctaaaaaggacaagaaaaacaaaaaatctaagcagcctctctacagcagcattgtcactgtggaggcttctaagccaaatggacagaggtatgatagtgtcaatgagaagctgtcagacagcccaagcatggggcgatacaggtccgttaatggtgggcccggcagtcctgacctggcaaggcattacaaatctagttccccattgcctactgttcagcttcatccccagtcaccaactgcaggaaaaaaacaccaggccgtacaagatctaccaccagccaacacatttgtgggagcaggagacaacatttcaattggatcagatcactgctctgagtacagctgtcaaaccaataacaagtacagcaaacagccatttcgtagagtgacgttttctgttgtgagtcagcctcaggacccacatcaggggtcactgcagagttgctatgacagcgggctggaggagtcagaaacaccaagcagtaagagttcatcagggccaagactgggtgcgcttccactcccagaggacaactatgaaaggaccacgccggatggcagtgttgattcaaggcctcttccagatgtagccctgactgggaagtgcactcgtgagtgtgatgagtatggccactcagactcctgctggatgccggtccgcacttctccggagaggaagaagagccagcctaaactgtccactttcatgcctgttgatgaacgaggaagccaggaaaagctggccaatggggaggccgccatcatgggtgaccgcaacagaaacctcctgaacaaaaagttgacctcatcctatgagaccttcagtgcagctagtttcagcaaaaatgaggaagccaaccctgaggatattccccttacaaaaacaggggaatataagccatctcctgtcaatactctcactagaagagaagtttacctgtaggctataaaggagcaacagcaaagttctttacatgtatgaaaaggagaataaggggcaaaaaccttacaaagcaaaacgtttaatcacaaagagggggctaccaaagagacaaagctttgcctgccacttctgcctccagatcaggcctttagtgatactgttagcctgattctactgtacaatgtagaaaccatccttgttacttgcatgtctaaccccttcactgattcccaacactcactttctcttccccacccctctccaaaaaaaaaaaaacaaaaa

SEQ ID NO: 1073 - protein, 1200 aa, Homo sapiens
MLRMRTAGWARGWCLGCCLLLPLSLSLAAAKQLLRYRLAEEGPADVRIGNVASDLGIVTGSGEVTFSLESGSEYLKIDNLTGELSTSERRIDREKLPQCQMIFDENECFLDFEVSVIGPSQSWVDLFEGQVIVLDINDNTPTFPSPVLTLTVEENRPVGTLYLLPTATDRDFGRNGIERYELLQEPGGGGSGGESRRAGAADSAPYPGGGGNGASGGGSGGSKRRLDASEGGGGTNPGGRSSVFELQVADTPDGEKQPQLIVKGVYEADLAENSAPGTPILQLRAADLDVGVNGQIEYVFGAATESVRRLLRLDETSGWLSVLHRIDREEVNQLRFTVMARDRGQPPKTDKATVVLNIKDENDNVPSIEIRKIGRIPLKDGVANVAEDVLVDTPIALVQVSDRDQGENGVVTCTVVGDVPFQLKPASDTEGDQNKKKYFLHTSTPLDYEATREFNVVIVAVDSGSPSLSSNNSLIVKVGDTNDNPPMFGQSVVEVYFPENNIPGERVATVLATDADSGKNAEIAYSLDSSVMGIFAIDPDSGDILVNTVLDREQTDRYEFKVNAKDKGIPVLQGSTTVIVQVADKNDNDPKFMQDVFTFYVKENLQPNSPVGMVTVMDADKGRNAEMSLYIEENNNIFSIENDTGTIYSTMSFDREHQTTYTFRVKAVDGGDPPRSATATVSLFVMDENDNAPTVTLPKNISYTLLPPSSNVRTVVATVLATDSDDGINADLNYSIVGGNPFKLFEIDPTSGVVSLVGKLTQKHYGLHRLVVQVNDSGQPSQSTTTLVHVFVNESVSNATAIDSQIARSLHIPLTQDIAGDPSYEISKQRLSIVIGVVAGIMTVILIILIVVMARYCRSKNKNGYEAGKKDHEDFFTPQQHDKSKKPKKDKKNKKSKQPLYSSIVTVEASKPNGQRYDSVNEKLSDSPSMGRYRSVNGGPGSPDLARHYKSSSPLPTVQLHPQSPTAGKKHQAVQDLPPANTFVGAGDNISIGSDHCSEYSCQTNNKYSKQPFRRVTFSVVSQPQDPHQGSLQSCYDSGLEESETPSSKSSSGPRLGALPLPEDNYERTTPDGSVDSRPLPDVALTGKCTRECDEYGHSDSCWMPVRTSPERKKSQPKLSTFMPVDERGSQEKLANGEAAIMGDRNRNLLNKKLTSSYETFSAASFSKNEEANPEDIPLTKTGEYKPSPVNTLTRREVYL

SEQ ID NO: 1074 - DNA, 4777 bp, Homo sapiens
cttttagtttctcttctttctaaagaaggctcgcggagcccggctggagaacctcaccctcgccgagcctagaaccgagagggggccaccccaggcggtcaccagcagatttgcccgcgcgttctctttctttccacccagttgcccttgcggccggctgtaaacctgccactaggacccggtcggtgagatctagcctcttgacctgagagccgagagtggatcgctgggctgggctaacggcgacggagagcgcgccctcgctgactccgggcgcgcccagcagtagcaccgcccgcgcccgcccctggacacttgtaagtttcgatttccgatttccgcggaaccgagtcccgcgccgcggcagagccagcacagccagcgcgccatggcggacccggaggtgtgctgcttcatcaccaaaatcctgtgcgcccacgggggccgcatggccctggacgcgctgctccaggagatcgcgctgtctgagccgcagctctgtgaggtgctgcaggtggccgggcccgaccgctttgtggtgttggagaccggcggcgaggccgggatcacccgatcggtggtggccaccactcgagcccgggtctgccgtcgcaagtactgccagagaccctgcgataacctgcatctctgcaaactcaacttgctgggccggtgcaactattcgcagtccgagcggaatttatgcaaatattctcatgaggttctctcagaagagaacttcaaagtcctgaaaaatcacgaactctctggactgaacaaagaggaattagcagtgctcctcctccaaagtgatcctttttttatgcccgagatatgcaaaagttataagggagagggtcggcagcagatttgtaaccagcagccaccgtgttcaagactccacatctgtgaccacttcacccgagggaactgtcgttttcccaactgcctccggtcccataacctgatggacagaaaggtgctggccatcatgagggagcacgggctgaaccccgacgtggtccagaacatccaggacatctgcaacagcaagcacatgcagaagaatcccccagggcccagagctccttcttcacatcgtagaaacatggcatatagggctagaagcaagagtagagatcggttctttcagggcagccaagaatttcttgcgtctgcttcagcgtctgctgagaggtcctgcacacctagtccagatcagatcagccacagggcttccctggaggacgcgcctgtggacgatctcacccgcaagttcacgtatctggggagtcaggatcgcgctcggcctccctcaggctcgtccaaggctactgatcttggaggaacaagtcaggccgggacaagccagaggtttttagagaacggcagtcaagaggacctcttgcatggaaatccaggcagcacttaccttgcttccaattcaacatcagcccccaactggaagagcctcacatcctggacgaatgaccaaggcgccaggagaaagactgtgttttctcccacgctacctgccgcccgctcttctcttggctctctgcaaacacctgaagctgtgaccaccagaaagggcacaggcttgctttcctcagactacaggatcatcaatggcaaaagtggaactcaggacatccagcctggccctctttttaataataatgctgatggagtggccacagatataacttctaccagatccttaaattacaaaagcactagcagcggtcacagagaaatatcatcacctaggattcaggatgctggacctgcttcccgagatgtccaggccactggcagaatcgcagatgatgctgacccaagagtagcacttgttaacgattctttatctgatgtcacaagtaccacatcttctagggtggatgatcatgactcagaggaaatttgtcttgaccatctgtgtaagggttgtccgcttaatggtagctgcagcaaagtccacttccatctgccttaccggtggcagatgcttattggtaaaacctggacggactttgagcacatggagacgatcgagaaaggctactgtaaccccggaatccacctctgttctgtaggaagttatacaatcaattttcgggtaatgagttgtgattcctttcccatccgacgcctctccactccttcttctgtcaccaagccagccaattctgtcttcaccaccaaatggatttggtattggaagaatgaatctggcacatggattcagtatggagaagagaaagacaaacggaaaaattcaaacgtcgactcttcatacctggagtctctctatcaatcctgtccgaggggagttgtgccatttcaggcgggctcacggaactatgagctgagtttccaagggatgattcagacaaacatagcttccaaaactcaaaaggatgtcatcagaagaccaacatttgtgcctcagtggtatgtgcagcagatgaagagagggccagaccatcagccagcaaagacctcgtcagtgtctttaactgcgacctttcgtcctcaggaggacttttgcttcctatcctcaaagaaatataagttgtcagagatccatcacctacatccagaatatgtcagagtaagtgagcattttaaagcttccatgaaaaatttcaagattgaaaagataaagaagatcgagaactcagagctcctggataaatttacatggaagaaatcgcagatgaaggaagaaggaaaactcctattttatgcgacaagccgtgcctatgtggaatctatctgttcgaataattttgacagtttcctacatgaaactcatgaaaacaaatacggaaaaggaatttactttgcaaaagatgccatctattcccacaaaaattgcccgtatgatgccaaaaacgtcgttatgtttgtagcccaagttctggttggaaagtttactgaaggaaatataacgtacacgagccctcctccacagttcgacagctgtgtggataccagatcgaatccctccgtttttgtcatctttcagaaagatcaggtttacccacaatatgtgattgaatatactgaagacaaagcctgcgtgattagttagaaccgatgaatacagcgtcagaaggatgccataaccattctgttcctttacagaactaaattgccgcagacaggagttaaagttttatattttcctgctcagttatctaatgtcttagatcagtggtccccaaattttgctacatattagaatcatctgggaggttttaaacaaattctgatgcccaggttgcaccccatgccaatgaaatcatttctgggcgtcagcgccaggcagttgtatttttttttttttttttttttttgagactgaatctcactccatcgtccaggctggagtgcagtggcgcgatctcggctcactgcaacctctgcctcccgggttcaagcaattctcctgcctcagcctcccgagtagctggaactacaggcacacactgccgcgcccagctaattttttgtattttttagtagagacagggtttcactgtgttgcccaggctggtctcaaactcctgagctcaggcaatctgcccgccttggcctcccaaagtgctaggattacaggtatgagccaccatgcccggctggcagttgtattttttaaagcccttctgatgattccaatgtgttggaaagtttaccttgtctcagatgtaactggtaaaggctgatttctaaattttctgtaattgcagcaacctttctctcctgtctacccttttagtttactgtatgccatggttttgttttggttacattgaaagaaagttaatttggaaaatttgggagaaatctaatcatgcctattaaggatgtaagacattacagccttagaagaaagattgtgaaaagctggggagaaaatgcttaaggacatgctaggggaaaaaaaagtaaaattgaagtgctattgcagacatggctgcagtactgtaccttatcattctgatgaaactgatttggagcacccttttctttatcgctacatttatttaggggacaaactccatccaggttgactctctctggaatgcggtaataagagctggcaagtaaggctcagagagaagcaaccaactggagttaattgcccatttgggctctttgtataattatggcaaagtagacatttatgttctaattaatatgattacagagaaggctttttctcaggtcaggcttttcatgaaagtattttgagaacaatgaattgcaataaccagcttcacacaagcataactgataaacgcgagtgctattgtagtcttggcaagtgagccaagaacctaggagcagggccattcctactgaaggacgggccccctacggagatgaaatttgtttcctggtgagcacagaatcagaacaaagaacaatatcccaaagaggccctgtgtctaccaggagcttctttttccaaatgtaatggattatgtggaattgtagtgccatcggtttttacttagagcccttgacgtgcttggaccaatatttccttccttcttatgaaccaggtttttccttctgattttcccttttcaacattccttaccagtcaccaaagtttcctgttataatttcttttagcagacaagttataagtcagatttaattagcatcagagttgattttatattagtcagattttggatcatcacagagatctccacaactccttggcttaaacagctccaccggtaaaaaaaaaaaaaaaaaa

SEQ ID NO: 1075 - protein, 160 aa, Homo sapiens
MLIGKTWTDFEHMETIEKGYCNPGIQLCSVGSYTINFRVMSCDSFPIRRLSTPSSVTKPANSVFTTKWIWYWKNESGTWIQYGEEKDKRKNSNVDSSYLESLYQSCPRGVVPFQAGSRNYELSFQGMIQTNIASKTQKDVIRRPTFVPQWYVQQMKRGPE

SEQ ID NO: 1076 - DNA, 3218 bp, Homo sapiens
cttttagtttctcttctttctaaagaaggctcgcggagcccggctggagaacctcaccctcgccgagcctagaaccgagagggggccaccccaggcggtcaccagcagatttgcccgcgcgttctctttctttccacccagttgcccttgcggccggctgtaaacctgccactaggacccggtcggtgagatctagcctcttgacctgagagccgagagtggatcgctgggctgggctaacggcgacggagagcgcgccctcgctgactccgggcgcgcccagcagtagcaccgcccgcgcccgcccctggacacttgtaagtttcgatttccgatttccgcggaaccgagtcccgcgccgcggcagagccagcacagccagcgcgccatggcggacccggaggtgtgctgcttcatcaccaaaatcctgtgcgcccacgggggccgcatggccctggacgcgctgctccaggagatcgcgctgtctgagccgcagctctgtgaggtgctgcaggtggccgggcccgaccgctttgtggtgttggagaccggcggcgaggccgggatcacccgatcggtggtggccaccactcgagcccgggtctgccgtcgcaagtactgccagagaccctgcgataacctgcatctctgcaaactcaacttgctgggccggtgcaactattcgcagtccgagcggaatttatgcaaatattctcatgaggttctctcagaagagaacttcaaagtcctgaaaaatcacgaactctctggactgaacaaagaggaattagcagtgctcctcctccaaagtgatcctttttttatgcccgagatatgcaaaagttataagggagagggtcggcagcagatttgtaaccagcagccaccgtgttcaagactccacatctgtgaccacttcacccgagggaactgtcgttttcccaactgcctccggtcccataacctgatggacagaaaggtgctggccatcatgagggagcacgggctgaaccccgacgtggtccagaacatccaggacatctgcaacagcaagcacatgcagaagaatcccccagggcccagagctccttcttcacatcgtagaaacatggcatatagggctagaagcaagagtagagatcggttctttcagggcagccaagaatttcttgcgtctgcttcagcgtctgctgagaggtcctgcacacctagtccagatcagatcagccacagggcttccctggaggacgcgcctgtggacgatctcacccgcaagttcacgtatctggggagtcaggatcgcgctcggcctccctcaggctcgtccaaggctactgatcttggaggaacaagtcaggccgggacaagccagaggtttttagagaacggcagtcaagaggacctcttgcatggaaatccaggcagcacttaccttgcttccaattcaacatcagcccccaactggaagagcctcacatcctggacgaatgaccaaggcgccaggagaaagactgtgttttctcccacgctacctgccgcccgctcttctcttggctctctgcaaacacctgaagctgtgaccaccagaaagggcacaggcttgctttcctcagactacaggatcatcaatggcaaaagtggaactcaggacatccagcctggccctctttttaataataatgctgatggagtggccacagatataacttctaccagatccttaaattacaaaagcactagcagcggtcacagagaaatatcatcacctaggattcaggatgctggacctgcttcccgagatgtccaggccactggcagaatcgcagatgatgctgacccaagagtagcacttgttaacgattctttatctgatgtcacaagtaccacatcttctagggtggatgatcatgactcagaggaaatttgtcttgaccatctgtgtaagggttgtccgcttaatggtagctgcagcaaagtccacttccatctgccttaccggtggcagatgcttattggtaaaacctggacggactttgagcacatggagacgatcgagaaaggctactgtaaccccggaatccacctctgttctgtaggaagttatacaatcaattttcgggtaatgagttgtgattcctttcccatccgacgcctctccactccttcttctgtcaccaagccagccaattctgtcttcaccaccaaatggatttggtattggaagaatgaatctggcacatggattcagtatggagaagagaaagacaaacggaaaaattcaaacgtcgactcttcatacctggagtctctctatcaatcctgtccgaggggagttgtgccatttcaggcgggctcacggaactatgagctgagtttccaagggatgattcagacaaacatagcttccaaaactcaaaaggatgtcatcagaagaccaacatttgtgcctcagtggtatgtgcagcagatgaagagagggccagagtaagtgttctgaagcagctgtttgctgacagatgcttgagatgttcatgccctgggctcatcaagtcactcgtgaatctggagcctgttttcctgaaaagttcctgtttgcattactctgcagtttccatttgcattatcgatgagtaagatgcttgttaagcagcatggtgtgactgaaaggatactagatcggaaaatgaattttctttctgaaagggaagtctgagcgagtctcctaaatactctgggctttagcttctccagctgtgaagagctggattgatgcagtacacctaaggaataatcatatatactgggtttttgttttgctgtggattcttttttttttttttttttttagagggggtctcactttgttgcccaggctggtcttgaactcctgagctcaagtgatcctcctacctcagtctcccaaagtgctgggattacaggcatgagccaccgtgcctggctttgctgtggattcttttgggtgtcttttgttttcctacacgatttatagaggatgaggggcggagaaagagatagaaaaaagggatgagctagctgttagagcaagggttttggtgagagataatattgattgaagggattttaaaggaaatgttgctgtgggggattcattgtaactctccttgtgaactgctcagtaaactctacattgttcatgaacaaaaaaaaaaaaaaaaaaaaaaaaaaaaaaaaaaaaa

SEQ ID NO: 1077 - protein, 624 aa, Homo sapiens
MADPEVCCFITKILCAHGGRMALDALLQEIALSEPQLCEVLQVAGPDRFVVLETGGEAGITRSVVATTRARVCRRKYCQRPCDNLHLCKLNLLGRCNYSQSERNLCKYSHEVLSEENFKVLKNHELSGLNKEELAVLLLQSDPFFMPEICKSYKGEGRQQICNQQPPCSRLHICDHFTRGNCRFPNCLRSHNLMDRKVLAIMREHGLNPDVVQNIQDICNSKHMQKNPPGPRAPSSHRRNMAYRARSKSRDRFFQGSQEFLASASASAERSCTPSPDQISHRASLEDAPVDDLTRKFTYLGSQDRARPPSGSSKATDLGGTSQAGTSQRFLENGSQEDLLHGNPGSTYLASNSTSAPNWKSLTSWTNDQGARRKTVFSPTLPAARSSLGSLQTPEAVTTRKGTGLLSSDYRIINGKSGTQDIQPGPLFNNNADGVATDITSTRSLNYKSTSSGHREISSPRIQDAGPASRDVQATGRIADDADPKVALVNGKYKGKTLWASTFVHDIPNGSSQVVDKTTDVEKTGATGFGLTMAVKAEKDMLCTGSQSLRNLVPTTPGESTAPAQVSTLPQSPAALSSSNRAAVWGAQGQNCTQVPVSSASELTRKTTGSAQCKSLKDKGASVS

SEQ ID NO: 1078 - DNA, 3702 bp, Homo sapiens
gtttgttagggagtcgtgtgcgtgccttggtcgcttctgtagctccgagggcaggttgcggaagaaagcccaggcggtctgtggcccagaggaaaggcctgcagcaggacgaggacctgagccaggaatgcaggatggcggcggtgaagaaggaagggggtgctctgagtgaagccatgtccctggagggagatgaatgggaactgagtaaagaaaatgtacaacctttaaggcaagggcggatcatgtccacgcttcagggagcactggcacaagaatctgcctgtaacaatactcttcagcagcagaaacgggcatttgaatatgaaattcgattttacactggaaatgaccctctggatgtttgggataggtatatcagctggacagagcagaactatcctcaaggtgggaaggagagtaatatgtcaacgttattagaaagagctgtagaagcactacaaggagaaaaacgatattatagtgatcctcgatttctcaatctctggcttaaattagggcgtttatgcaatgagcctttggatatgtacagttacttgcacaaccaagggattggtgtttcacttgctcagttctatatctcatgggcagaagaatatgaagctagagaaaactttaggaaagcagatgcgatatttcaggaagggattcaacagaaggctgaaccactagaaagactacagtcccagcaccgacaattccaagctcgagtgtctcggcaaactctgttggcacttgagaaagaagaagaggaggaagtttttgagtcttctgtaccacaacgaagcacactagctgaactaaagagcaaagggaaaaagacagcaagagctccaatcatccgtgtaggaggtgctctcaaggctccaagccagaacagaggactccaaaatccatttcctcaacagatgcaaaataatagtagaattactgtttttgatgaaaatgctgatgaggcttctacagcagagttgtctaagcctacagtccagccatggatagcaccccccatgcccagggccaaagagaatgagctgcaagcaggcccttggaacacaggcaggtccttggaacacaggcctcgtggcaatacagcttcactgatagctgtacccgctgtgcttcccagtttcactccatatgtggaagagactgcacaacagccagttatgacaccatgtaaaattgaacctagtataaaccacatcctaagcaccagaaagcctggaaaggaagaaggagattctctacaaagggttcagagccatcagcaagcgtctgaggagaagaaagagaagatgatgtattgtaaggagaagatttatgcaggagtaggggaattctcctttgaagaaattcgggctgaagttttccggaagaaattaaaagagcaaagggaagccgagctattgaccagtgcagagaagagagcagaaatgcagaaacagattgaagagatggagaagaagctaaaagaaatccaaactactcagcaagaaagaacaggtgatcagcaagaagagacgatgcctacaaaggagacaactaaactgcaaattgcttccgagtctcagaaaataccaggaatgactctatccagttctgtttgtcaagtaaactgttgtgccagagaaacttcacttgcggagaacatttggcaggaacaacctcattctaaaggtcccagtgtacctttctccatttttgatgagtttcttctttcagaaaagaagaataaaagtcctcctgcagatcccccacgagttttagctcaacgaagaccccttgcagttctcaaaacctcagaaagcatcacctcaaatgaagatgtgtctccagatgtttgtgatgaatttacaggaattgaacccttgagcgaggatgccattatcacaggcttcagaaatgtaacaatttgtcctaacccagaagacacttgtgactttgccagagcagctcgttttgtatccactccttttcatgagataatgtccttgaaggatctcccttctgatcctgagagactgttaccggaagaagatctagatgtaaagacctctgaggaccagcagacagcttgtggcactatctacagtcagactctcagcatcaagaagctgagcccaattattgaagacagtcgtgaagccacacactcctctggcttctctggttcttctgcctcggttgcaagcacctcctccatcaaatgtcttcaaattcctgagaaactagaacttactaatgagacttcagaaaaccctactcagtcaccatggtgttcacagtatcgcagacagctactgaagtccctaccagagttaagtgcctctgcagagttgtgtatagaagacagaccaatgcctaagttggaaattgagaaggaaattgaattaggtaatgaggattactgcattaaacgagaatacctaatatgtgaagattacaagttattctgggtggcgccaagaaactctgcagaattaacagtaataaaggtatcttctcaacctgtcccatgggacttttatatcaacctcaagttaaaggaacgtttaaatgaagattttgatcatttttgcagctgttatcaatatcaagatggctgtattgtttggcaccaatatataaactgcttcacccttcaggatcttctccaacacagtgaatatattacccatgaaataacagtgttgattatttataaccttttgacaatagtggagatgctacacaaagcagaaatagtccatggtgacttgagtccaaggtgtctgattctcagaaacagaatccacgatccctatgattgtaacaagaacaatcaagctttgaagatagtggacttttcctacagtgttgaccttagggtgcagctggatgtttttaccctcagcggctttcggactgtacagatcctggaaggacaaaagatcctggctaactgttcttctccctaccaggtagacctgtttggtatagcagatttagcacatttactattgttcaaggaacacctacaggtcttctgggatgggtccttctggaaacttagccaaaatatttctgagctaaaagatggtgaattgtggaataaattctttgtgcggattctgaatgccaatgatgaggccacagtgtctgttcttggggagcttgcagcagaaatgaatggggtttttgacactacattccaaagtcacctgaacaaagccttatggaaggtagggaagttaactagtcctggggctttgctctttcagtgagctaggcaatcaagtctcacagattgctgcctcagagcaatggttgtattgtggaacactgaaactgtatgtgctgtaatttaatttaggacacatttagatgcactaccattgctgttctactttttggtacaggtatattttgacgtcactgatattttttatacagtgatatacttactcatggccttgtctaacttttgtgaagaactattttattctaaacagactcattacaaatggttaccttgttatttaacccatttgtctctacttttccctgtacttttcccatttgtaatttgtaaaatgttctcttatgatcaccatgtattttgtaaataataaaatagtatctgttaaaaaaaaaaaaaaaaaaaaaaaaaaaaaaaaaaaaaaaaaaaaaaaaaaaaaa

SEQ ID NO: 1079 - protein, 1050 aa, Homo sapiens
MAAVKKEGGALSEAMSLEGDEWELSKENVQPLRQGRIMSTLQGALAQESACNNTLQQQKRAFEYEIRFYTGNDPLDVWDRYISWTEQNYPQGGKESNMSTLLERAVEALQGEKRYYSDPRFLNLWLKLGRLCNEPLDMYSYLHNQGIGVSLAQFYISWAEEYEARENFRKADAIFQEGIQQKAEPLERLQSQHRQFQARVSRQTLLALEKEEEEEVFESSVPQRSTLAELKSKGKKTARAPIIRVGGALKAPSQNRGLQNPFPQQMQNNSRITVFDENADEASTAELSKPTVQPWIAPPMPRAKENELQAGPWNTGRSLEHRPRGNTASLIAVPAVLPSFTPYVEETAQQPVMTPCKIEPSINHILSTRKPGKEEGDSLQRVQSHQQASEEKKEKMMYCKEKIYAGVGEFSFEEIRAEVFRKKLKEQREAELLTSAEKRAEMQKQIEEMEKKLKEIQTTQQERTGDQQEETMPTKETTKLQIASESQKIPGMTLSSSVCQVNCCARETSLAENIWQEQPHSKGPSVPFSIFDEFLLSEKKNKSPPADPPRVLAQRRPLAVLKTSESITSNEDVSPDVCDEFTGIEPLSEDAIITGFRNVTICPNPEDTCDFARAARFVSTPFHEIMSLKDLPSDPERLLPEEDLDVKTSEDQQTACGTIYSQTLSIKKLSPIIEDSREATHSSGFSGSSASVASTSSIKCLQIPEKLELTNETSENPTQSPWCSQYRRQLLKSLPELSASAELCIEDRPMPKLEIEKEIELGNEDYCIKREYLICEDYKLFWVAPRNSAELTVIKVSSQPVPWDFYINLKLKERLNEDFDHFCSCYQYQDGCIVWHQYINCFTLQDLLQHSEYITHEITVLIIYNLLTIVEMLHKAEIVHGDLSPRCLILRNRIHDPYDCNKNNQALKIVDFSYSVDLRVQLDVFTLSGFRTVQILEGQKILANCSSPYQVDLFGIADLAHLLLFKEHLQVFWDGSFWKLSQNISELKDGELWNKFFVRILNANDEATVSVLGELAAEMNGVFDTTFQSHLNKALWKVGKLTSPGALLFQ

SEQ ID NO: 1080 - DNA, 902 bp, Homo sapiens
gggggggagcggggaaaacaaaaggagacgaaggacgcatgcgtttggtgagtcccggattctggtgggttcttccgctcaggctgggtgaagcgcttccgggtcgccgccggcagcagcctcccggcgcgatgaagacactgaggctcagagaggttaagtgactcagccaaggtcaaacagctagtaagtggtggagccaggactcaaagccagtctaggagccatgtccactttgttcccctcactcttccctcgtgtgactgagactctgtggtttaatctggatcgaccctgtgtggaagagacagagctgcagcagcaggaacagcagcatcaggcctggctccaaagcatcgcggagaaagacaacaacctggttcctattggcaagccagcctcagagcactatgatgacgaggaagaagaggatgatgaagatgatgaggatagtgaagaggactcagaggatgatgaggatatgcaggacatggacgagatgaatgactacaatgagtcaccggatgatggagaggtcaatgaggtggacatggaaggcaacgaacaggatcaggaccagtggatgatctaggtagacaaggcagggtggcctcagggagattccaggccagcccaaactaccctgcatcccaacccccaacccctgcccacagaaccagctgatggccccagtgcctgaaagtgcccttgggcacctcctcagctgctgccaggatctggtctctttggcccctcccaggccatcagtctgcacttgaaatccccagggcctgaaacctactccaccttcctggccagtacctcaccccttgattgccaggtctggtctaagtttctttaataaagacaaaggagtgattttcaaaaaaaaaaaaaaaaaa

SEQ ID NO: 1081 - protein, 121 aa, Homo sapiens
MSTLFPSLFPRVTETLWFNLDRPCVEETELQQQEQQHQAWLQSIAEKDNNLVPIGKPASEHYDDEEEEDDEDDEDSEEDSEDDEDMQDMDEMNDYNESPDDGEVNEVDMEGNEQDQDQWMI

SEQ ID NO: 1082 - DNA, 5113 bp, Homo sapiens
agagcttcagtctgagtcccagcgccgagagcgtgtctgaccggttggacccctacagcagcggcggcggctcctcgtcgtcgtcggaagagctcgaggccgacgcagcctcggccccgacgggggtcccgggccagccccgccgtcccggccaccccgcgcagcccctcccgcttccccagacggcttcctcgcctcagccgcagcagaaagccccgagggccattgacagcccgggcggggccgtccgcgaggggtcgtgcgaggagaaggcagcggcagccgtggccccgggaggcctccagtctacccccgggaggagcggggtgaccgcggagaaggcgcctccgccgcccccgccgcccaccctgtacgtgcagctccacggagagaccacccggcgcttggaggcggaggagaagccattgcagatccaaaatgactacctcttccaactgggatttggggagctgtggagggtgcaggaggaaggcatggactcggagattggctgcctcatccgcttctatgcaggaaaacctcacagcacgggtagctctgaacggattcagctctcaggaatgtataatgtccgtaaaggcaagatgcagttgccagtgaaccgatggacaagacgccaagtcatcctatgtgggacctgcctgatagtatcatctgtgaaagacagcttgaccggaaagatgcatgttctgccactaattggtggaaaagtagaagaagtgaaaaagcaccaacactgtttagcatttagctcctctggaccccaaagccagacttactacatttgctttgatactttcacagaatacttaaggtggctgcgacaagtctccaaggttgcatcccagcgcattagctcagtggacctctcgtgttgtagcctggaacatctgcctgccaacctcttctacagccaagacctcactcatctcaatttaaaacaaaacttcctaaggcagaaccctagccttccagctgccagggggcttaatgaactgcaaaggttcaccaagttgaagagtcttaacctttccaataatcatttaggggacttccctctggcagtctgcagtattccaaccctggcagagctgaacgtgtcctgcaatgccctgcgatcagtcccggcagccgttggagtgatgcacaacttacagacatttttgttggatggaaactttctccaatcccttcctgctgagttggagaacatgaagcagcttagttatctgggtctttctttcaatgaatttactgacattcccgaagtattggagaaattgactgctgtggataaactttgtatgtctggaaactgtgtggagacccttaggctacaggctttaagaaaaatgcctcacattaaacatgtggatctaaggttgaacgtaattaggaagctgatagcagatgaagtggactttctacagcatgttactcagcttgacctacgagacaataagcttggtgatctagatgctatgattttcaacaacattgaagttttacactgtgaaaggaatcaactggtcacattagacatctgtggctatttcctaaaagcgctctatgcctcttctaatgaacttgttcaacttgatgtttacccagttccaaattatctgtcctacatggatgtttcaaggaaccgcttagaaaatgtgcctgagtgggtatgtgaaagccgaaagctagaagttttggatattggccataatcaaatatgtgaacttcctgcccgcttattttgtaatagcagtctccggaaactactggcaggacacaaccagttggcaaggctgcctgaaaggctagaaagaacctcggtggaggtcttggatgtgcaacacaaccagctccttgagctcccacctaaccttctgatgaaggctgacagcctgagattcctgaacgcctctgcgaacaaactggaaagccttcctccagccacgctttccgaagagacaaacagtatcttacaagagttgtatttgacaaataacagcctcacagacaaatgtgtgcccttgttaacgggacacccccatttgaagatccttcacatggcctataaccgacttcagagttttccagcaagtaaaatggcgaaactggaggaacttgaagaaattgatctcagtgggaataagctgaaagccatcccaacaacgatcatgaattgcagccgcatgcacaccgtgattgctcactccaactgcatcgaggtctttcccgaagttatgcagctcccagagatcaagtgtgtggacctgagctgtaatgagctaagtgaagtcacattaccagaaaacctgcctcccaaactgcaggagctagacctgactggaaacccgcgccttgtccttgatcacaaaaccctggaactactgaataatatccgctgtttcaagattgatcagccttctacaggagacgcttccggagccccagctgtatggagtcatggttacactgaagcttcgggggtaaaaaacaagttgtgtgtcgcagccctgtcggtgaataacttctgtgacaaccgcgaagccctgtatggtgtgtttgacggagaccggaatgtggaggtgccctaccttctccagtgcactatgagtgacattttggctgaagagctgcaaaaaacaaaaaacgaagaagaatacatggtcaatacattcattgtcatgcaaaggaaacttggaactgctgggcagaagcttggtggtgccgctgtcctttgtcatatcaagcatgaccctgtggatccaggaggatccttcaccttgacctctgctaatgtgggcaagtgccaaacagttctctgtcgaaatggaaagccgctgcctctgtccagatcttacatcatgagctgtgaagaagagctgaagaggattaaacagcacaaggccattatcactgaggatggcaaggtgaacggagtgactgagtccacgcgcatcctgggctacaccttcctccatcccagtgtggtgcctcgcccccacgtgcagtccgtgctcctgactccccaggatgagttcttcatcctaggcagtaaggggttgtgggacagcctgtccgtcgaggaggccgtggaagccgtgcgcaacgtgcccgatgccctggctgctgccaagaagctgtgtaccctggcccagagctacggctgccacgacagcatcagcgctgtggtggtgcagctcagtgtcactgaggacagcttctgctgctgcgagctcagcgccggtggggctgtgccaccacccagtcctggcatctttcctccctcagtgaacatggtgatcaaggatcggccctcagatgggctgggcgtgccgtcctccagcagcggcatggcttccgagattagcagtgagctctccacttctgagatgagcagcgaggtggggtcaacagcctccgatgagcccccgcccggagccctaagcgagaacagccctgcctaccccagtgagcagcgctgcatgctccaccccatctgtctgtccaactccttccagcgccagctatccagcgccacgttctctagcgccttctccgacaacggccttgacagtgacgatgaggagcccatcgagggcgtcttcaccaacggcagccgggtggaggtggaggtggacatccactgcagccgggccaaggagaaggagaaacagcagcacctgcttcaggtgccagcagaggccagtgatgagggcattgtcatcagcgccaacgaggatgagccaggtctgcccaggaaggcagacttctctgccgttgggaccattgggcgccggagggccaatggctctgttgcgccccaggaaaggagccacaatgtgatagaggtggctacagacgcacctcttcgaaagcctggaggctattttgctgccccggctcagccggatcctgatgatcagtttatcatacccccggagctggaagaggaggtcaaagaaatcatgaagcatcaccaggagcaacagcagcagcagcagccgccaccaccccctcagctccagccgcagctgccgcggcactaccagctggaccagctgccagattattacgacacgccactatgacccagccgagctgtttaacaaataaactaaccacaaaagactgagttgcaagagtctcccaggctcacattaaaccaggggttttactccacatccttcccccagacactgttcccaacctgtcatcgcagctaatctgtaggttctctttctttgggttatttttttaagtaatcaccactttcttctagtgatgctttaccaatatgatttacatttgttaacttctccccctaacatatcagatatgtaaagacaaagaacaaaaggtttaatatattacagagaaacagttaatgataatgtaatattttttaaaatggctttttgttgtttgtttggaaggcagggcaggctgccgttgctaaatgatttaataatattgtaattctgtatttctttggggggaaaaggcttttgttttgttttgttttgttttgttttgtttttgtcttgaaaataatagacatttgtagaatatggagactaactcctaggagttgctttactctgtcaggtgacttaagtcactgggattcactaattttctctgagagaacagctgattgagaatttccattgtaaatagctcagtgttgtatagtgaggcttacgatgttttgtagtcttggcgtaaggacacagcccaagtaactgacgtttcccctccccctcccctctgaggagcctgcctgcctcacaactcaccctcacttcactgaatgaggaggctgagcagctgcagtgtttctgtccggaggaaatggatcttaggccactggacaagaacctgcacccaagggccctgaacccattttcctcccctgtcccagccttcccactttgacagacacttttaactgtgttccttactgctgccacaatcagcatggttgtatagtgccccattaggccatttacatacccagagttatactcaagcagaatgcacaaatggacatgtcataatttttgttacaataaatatgaaatttacaagt

SEQ ID NO: 1083 - protein, 1369 aa, Homo sapiens
SFSLSPSAESVSDRLDPYSSGGGSSSSSEELEADAASAPTGVPGQPRRPGHPAQPLPLPQTASSPQPQQKAPRAIDSPGGAVREGSCEEKAAAAVAPGGLQSTPGRSGVTAEKAPPPPPPPTLYVQLHGETTRRLEAEEKPLQIQNDYLFQLGFGELWRVQEEGMDSEIGCLIRFYAGKPHSTGSSERIQLSGMYNVRKGKMQLPVNRWTRRQVILCGTCLIVSSVKDSLTGKMHVLPLIGGKVEEVKKHQHCLAFSSSGPQSQTYYICFDTFTEYLRWLRQVSKVASQRISSVDLSCCSLEHLPANLFYSQDLTHLNLKQNFLRQNPSLPAARGLNELQRFTKLKSLNLSNNHLGDFPLAVCSIPTLAELNVSCNALRSVPAAVGVMHNLQTFLLDGNFLQSLPAELENMKQLSYLGLSFNEFTDIPEVLEKLTAVDKLCMSGNCVETLRLQALRKMPHIKHVDLRLNVIRKLIADEVDFLQHVTQLDLRDNKLGDLDAMIFNNIEVLHCERNQLVTLDICGYFLKALYASSNELVQLDVYPVPNYLSYMDVSRNRLENVPEWVCESRKLEVLDIGHNQICELPARLFCNSSLRKLLAGHNQLARLPERLERTSVEVLDVQHNQLLELPPNLLMKADSLRFLNASANKLESLPPATLSEETNSILQELYLTNNSLTDKCVPLLTGHPHLKILHMAYNRLQSFPASKMAKLEELEEIDLSGNKLKAIPTTIMNCSRMHTVIAHSNCIEVFPEVMQLPEIKCVDLSCNELSEVTLPENLPPKLQELDLTGNPRLVLDHKTLELLNNIRCFKIDQPSTGDASGAPAVWSHGYTEASGVKNKLCVAALSVNNFCDNREALYGVFDGDRNVEVPYLLQCTMSDILAEELQKTKNEEEYMVNTFIVMQRKLGTAGQKLGGAAVLCHIKHDPVDPGGSFTLTSANVGKCQTVLCRNGKPLPLSRSYIMSCEEELKRIKQHKAIITEDGKVNGVTESTRILGYTFLHPSVVPRPHVQSVLLTPQDEFFILGSKGLWDSLSVEEAVEAVRNVPDALAAAKKLCTLAQSYGCHDSISAVVVQLSVTEDSFCCCELSAGGAVPPPSPGIFPPSVNMVIKDRPSDGLGVPSSSSGMASEISSELSTSEMSSEVGSTASDEPPPGALSENSPAYPSEQRCMLHPICLSNSFQRQLSSATFSSAFSDNGLDSDDEEPIEGVFTNGSRVEVEVDIHCSRAKEKEKQQHLLQVPAEASDEGIVISANEDEPGLPRKADFSAVGTIGRRRANGSVAPQERSHNVIEVATDAPLRKPGGYFAAPAQPDPDDQFIIPPELEEEVKEIMKHHQEQQQQQQPPPPPQLQPQLPRHYQLDQLPDYYDTPL

SEQ ID NO: 1084 - DNA, 5185 bp, Homo sapiens
gagcgctggagttggtgctgggaaacccggggctaatgttgacaacaggctcgagattgtcctgggtcacataatgccagctgagcgtaaaaagccagcaagtatggaagaaaaagactctttaccaaacaacaaggaaaaagactgcagtgaaaggcggacagtgagcagcaaggagaggccaaaagacgatatcaagctcactgccaagaaggaggtcagcaaggcccctgaagacaagaagaagagactggaagatgataagagaaaaaaggaagacaaggaacgcaagaaaaaagacgaagaaaaggtgaaggcagaggaagaatcaaagaaaaaagaagaggaagaaaaaaagaaacatcaagaggaagagagaaagaagcaagaagagcaggccaaacgtcagcaagaagaagaagcagctgctcagatgaaagaaaaagaagaatccattcagcttcatcaggaagcttgggaacgacatcatttaagaaaggaacttcgtagcaaaaaccaaaatgctccggacagccgaccagaggaaaacttcttcagccgcctcgactcaagtttgaagaaaaatactgcttttgtcaagaaactaaaaactattacagaacaacagagagactccttgtcccatgattttaatggcctaaatttaagcaaatacattgcagaagctgtagcttccatcgtggaagcaaaactaaaaatctctgatgtgaactgtgctgtgcacctctgctctctctttcaccagcgttatgctgactttgccccatcacttcttcaggtctggaaaaaacattttgaagcaaggaaagaggagaaaacacctaacatcaccaagttaagaactgatttgcgttttattgcagaattgacaatagttgggattttcactgacaaggaaggtctttccttaatctatgaacagctaaaaaatattattaatgctgatcgggagtcccacactcatgtctctgtagtgattagtttctgtcgacattgtggagatgatattgctggacttgtaccaaggaaagtaaagagtgctgcagagaagtttaatttgagttttcctcctagtgagataattagtccagagaaacaacagcccttccagaatcttttaaaagagtactttacgtctttgaccaaacacctgaaaagggaccacagggagctccagaatactgagagacaaaacaggcgcattctacattctaaaggggagctcagtgaagatagacataaacagtatgaggaatttgctatgtcttaccagaagctgctggcaaattctcaatccttagcagaccttttggatgaaaatatgccagatcttcctcaagacaaaccaacaccagaagaacatgggcctggaattgatatattcacacctggtaaacctggagaatatgacttggaaggtggtatatgggaagatgaagatgctcggaatttttatgagaacctcattgatttgaaggcttttgtcccagccatcttgtttaaagacaatgaaaaaagttgtcagaataaagagtccaacaaagatgataccaaagaggcaaaagaatctaaggagaataaggaggtatcaagtcccgatgatttggaacttgagttggagaatctagaaattaatgatgacaccttagaattagagggtggagatgaagctgaagatcttacaaagaaacttcttgatgaacaagaacaagaagatgaggaagccagcactggatctcatctcaagctcatagtagatgctttcctacagcagttacccaactgtgtcaaccgagatctgatagacaaggcagcaatggatttttgcatgaacatgaacacaaaagcaaacaggaagaagttggtacgggcactcttcatagttcctagacaaaggttggatttgctaccattttatgcaagattggttgctacattgcatccctgcatgtctgatgtagcagaggatctttgttccatgctgaggggggatttcagatttcatgtacggaaaaaggaccagatcaatattgaaacaaagaataaaactgttcgttttataggagaactaactaagtttaagatgttcaccaaaaatgacacactgcattgtttaaagatgcttctgtcagacttctctcatcaccatattgaaatggcatgcaccctgctggagacatgtggacggtttcttttcagatctccagaatctcacctgaggaccagtgtacttttggagcaaatgatgagaaagaagcaagcaatgcatcttgatgcgagatacgtcacaatggtagagaatgcatattactactgcaacccacctccagctgaaaaaaccgtgaaaaagaaacgtcctcctctccaggaatatgtccggaaacttttgtacaaggatctctctaaggttaccaccgagaaggttttgagacagatgcgaaagctgccctggcaggaccaagaagtgaaagactatgttatttgttgtatgataaacatctggaatgtgaaatataatagtattcattgtgtagccaacctcttagcaggactagtgctctaccaagaggatgttgggatccacgttgtggatggagtgttagaagatattcgattaggaatggaggttaatcaacctaaatttaatcagaggcgcatcagcagtgccaagttcttaggagaactttacaattaccgaatggtggaatcagctgttattttcagaactctgtattcttttacctcatttggtgttaatcctgatggctctccaagttccctggacccacctgagcatcttttcagaattagactcgtatgcactattctggacacatgtggccagtactttgacagaggttccagtaaacgaaaacttgattgtttccttgtatattttcagcgttatgtttggtggaagaaaagtttggaggtttggacaaaagaccatccatttcctattgatatagattacatgatcagtgatacactagaactgctaagaccaaagatcaaactctgtaattctctggaagaatccatcaggcaggtacaagacttggaacgagaattcttaataaaactaggcctagtaaatgacaaagactcaaaagattctatgacagaaggagaaaatcttgaagaggatgaagaagaagaagaaggtggggctgaaacagaagaacaatctggaaatgaaagtgaagtaaatgagccagaagaagaggagggttctgataatgatgatgatgagggagaagaagaggaggaagagaatacagattaccttacagattccaataaggaaaatgaaaccgatgaagagaatactgaggtaatgattaaaggcggtggacttaagcatgtaccttgtgtagaagatgaggacttcattcaagctctggataaaatgatgctagaaaatctacagcaacgaagtggtgaatctgttaaagtgcaccaactagatgttgccattcctttgcatctcaaaagccagctgaggaaagggcccccactgggaggtggggaaggagaggctgagtctgcagacacaatgccgtttgtcatgttaacaagaaaaggcaataaacagcagtttaagatccttaatgtacccatgtcctctcaacttgctgcaaatcactggaaccagcaacaggcagaacaagaagagaggatgagaatgaaaaagctcacactagatatcaatgaacggcaagaacaagaagattatcaagaaatgttgcagtctcttgcacagcgcccagctccagcaaacaccaatcgtgagaggcggcctcgctaccaacatccgaagggagcacctaatgcagatctaatctttaagactggtgggaggagacgttgatccagcagcacgtgtcatttcattaggtcctgtatctgatgttgtggttagtggagtcctccagcaattgaatgagagcagtggacacatctcagcaggtcggtctagagagttgcgaatctaaacctgggacaggctggggccaggaggcagaaacaccagcctctgccaacaccggaacaagccgacgcttccagacaaggcggaaaaggccttttgtaatggaaatctcgcgagggttaatcttctcttgagaatggcagtcaagaaatgagatggttcacttgactactgagcagttacaccaaggagagcgtgaaggagatgattgagccagagaagaaacgggttgtgatggtaatggtgtgggggaaatgaacttgagctttaaacttgatttgagtttcagtgtctctgaattgaacatcccacgttggaagaagatacatttgggggctccaggactacagtagaaaagtatagagcaagcaggaaaatcttctagtaaaacttacatgcaggacaacaaaatgatgaaagatatccaaataccagataatccaccaggaaggcttttgtttaggaatttgtttcaagaggaacaagggatgagggagaaaaatccgttttatccatcagagtcagtgctataaaattgcctattaaggtaaaagaaaaatgtggagactattttactatacagagagcattaattcagatggcttagaaaagtgataccagcccaagaacagggatctaggtgagcccattgtaagtatcattgaaaacaaaacatgcccgtcaacatgtcacagaaaacgaacgaaggacaacaagaagtggatgagaatattttgttgaccttcatgggtttacagcctctgtctctaaacaaagtatggaaacaagtagagcttttattttgcttttgtttttgttttgtttttttttttgttttcccccactaaatagaaatgagggtccttagtctgtttctgacaatctgttaatttcttaggacagctgtctttggtttgctttccagcaggcgtagtatatttagtcggagagcacatctgtatgcgacaacttgattacatctttttttctagctattttgcattttttcttttaccatgtttcagtttctgcatgtagatttaaataaaaaacaaaacttgtaaagttgtaacatttcacatggaaatgctgcccaatcttcaccagcttcagaaatctgacctttgccgatgctgcaataaagtgttgtaatttaaaaaaaaaaaaaaaaaa

SEQ ID NO: 1085 - protein, 1272 aa, Homo sapiens
MPAERKKPASMEEKDSLPNNKEKDCSERRTVSSKERPKDDIKLTAKKEVSKAPEDKKKRLEDDKRKKEDKERKKKDEEKVKAEEESKKKEEEEKKKHQEEERKKQEEQAKRQQEEEAAAQMKEKEESIQLHQEAWERHHLRKELRSKNQNAPDSRPEENFFSRLDSSLKKNTAFVKKLKTITEQQRDSLSHDFNGLNLSKYIAEAVASIVEAKLKISDVNCAVHLCSLFHQRYADFAPSLLQVWKKHFEARKEEKTPNITKLRTDLRFIAELTIVGIFTDKEGLSLIYEQLKNIINADRESHTHVSVVISFCRHCGDDIAGLVPRKVKSAAEKFNLSFPPSEIISPEKQQPFQNLLKEYFTSLTKHLKRDHRELQNTERQNRRILHSKGELSEDRHKQYEEFAMSYQKLLANSQSLADLLDENMPDLPQDKPTPEEHGPGIDIFTPGKPGEYDLEGGIWEDEDARNFYENLIDLKAFVPAILFKDNEKSCQNKESNKDDTKEAKESKENKEVSSPDDLELELENLEINDDTLELEGGDEAEDLTKKLLDEQEQEDEEASTGSHLKLIVDAFLQQLPNCVNRDLIDKAAMDFCMNMNTKANRKKLVRALFIVPRQRLDLLPFYARLVATLHPCMSDVAEDLCSMLRGDFRFHVRKKDQINIETKNKTVRFIGELTKFKMFTKNDTLHCLKMLLSDFSHHHIEMACTLLETCGRFLFRSPESHLRTSVLLEQMMRKKQAMHLDARYVTMVENAYYYCNPPPAEKTVKKKRPPLQEYVRKLLYKDLSKVTTEKVLRQMRKLPWQDQEVKDYVICCMINIWNVKYNSIHCVANLLAGLVLYQEDVGIHVVDGVLEDIRLGMEVNQPKFNQRRISSAKFLGELYNYRMVESAVIFRTLYSFTSFGVNPDGSPSSLDPPEHLFRIRLVCTILDTCGQYFDRGSSKRKLDCFLVYFQRYVWWKKSLEVWTKDHPFPIDIDYMISDTLELLRPKIKLCNSLEESIRQVQDLEREFLIKLGLVNDKDSKDSMTEGENLEEDEEEEEGGAETEEQSGNESEVNEPEEEEGSDNDDDEGEEEEEENTDYLTDSNKENETDEENTEVMIKGGGLKHVPCVEDEDFIQALDKMMLENLQQRSGESVKVHQLDVAIPLHLKSQLRKGPPLGGGEGEAESADTMPFVMLTRKGNKQQFKILNVPMSSQLAANHWNQQQAEQEERMRMKKLTLDINERQEQEDYQEMLQSLAQRPAPANTNRERRPRYQHPKGAPNADLIFKTGGRRR

SEQ ID NO: 1086 - DNA, 5223 bp, Homo sapiens
gcatgccgcagggaagacgatcaggactgtttttaatcgggcagtcgcgcggatggccttttccctctcgcctccttccgccccgcccccactctcagcccggccgcgctgattgtcctgggtcacataatgccagctgagcgtaaaaagccagcaagtatggaagaaaaagactctttaccaaacaacaaggaaaaagactgcagtgaaaggcggacagtgagcagcaaggagaggccaaaagacgatatcaagctcactgccaagaaggaggtcagcaaggcccctgaagacaagaagaagagactggaagatgataagagaaaaaaggaagacaaggaacgcaagaaaaaagacgaagaaaaggtgaaggcagaggaagaatcaaagaaaaaagaagaggaagaaaaaaagaaacatcaagaggaagagagaaagaagcaagaagagcaggccaaacgtcagcaagaagaagaagcagctgctcagatgaaagaaaaagaagaatccattcagcttcatcaggaagcttgggaacgacatcatttaagaaaggaacttcgtagcaaaaaccaaaatgctccggacagccgaccagaggaaaacttcttcagccgcctcgactcaagtttgaagaaaaatactgcttttgtcaagaaactaaaaactattacagaacaacagagagactccttgtcccatgattttaatggcctaaatttaagcaaatacattgcagaagctgtagcttccatcgtggaagcaaaactaaaaatctctgatgtgaactgtgctgtgcacctctgctctctctttcaccagcgttatgctgactttgccccatcacttcttcaggtctggaaaaaacattttgaagcaaggaaagaggagaaaacacctaacatcaccaagttaagaactgatttgcgttttattgcagaattgacaatagttgggattttcactgacaaggaaggtctttccttaatctatgaacagctaaaaaatattattaatgctgatcgggagtcccacactcatgtctctgtagtgattagtttctgtcgacattgtggagatgatattgctggacttgtaccaaggaaagtaaagagtgctgcagagaagtttaatttgagttttcctcctagtgagataattagtccagagaaacaacagcccttccagaatcttttaaaagagtactttacgtctttgaccaaacacctgaaaagggaccacagggagctccagaatactgagagacaaaacaggcgcattctacattctaaaggggagctcagtgaagatagacataaacagtatgaggaatttgctatgtcttaccagaagctgctggcaaattctcaatccttagcagaccttttggatgaaaatatgccagatcttcctcaagacaaaccaacaccagaagaacatgggcctggaattgatatattcacacctggtaaacctggagaatatgacttggaaggtggtatatgggaagatgaagatgctcggaatttttatgagaacctcattgatttgaaggcttttgtcccagccatcttgtttaaagacaatgaaaaaagttgtcagaataaagagtccaacaaagatgataccaaagaggcaaaagaatctaaggagaataaggaggtatcaagtcccgatgatttggaacttgagttggagaatctagaaattaatgatgacaccttagaattagagggtggagatgaagctgaagatcttacaaagaaacttcttgatgaacaagaacaagaagatgaggaagccagcactggatctcatctcaagctcatagtagatgctttcctacagcagttacccaactgtgtcaaccgagatctgatagacaaggcagcaatggatttttgcatgaacatgaacacaaaagcaaacaggaagaagttggtacgggcactcttcatagttcctagacaaaggttggatttgctaccattttatgcaagattggttgctacattgcatccctgcatgtctgatgtagcagaggatctttgttccatgctgaggggggatttcagatttcatgtacggaaaaaggaccagatcaatattgaaacaaagaataaaactgttcgttttataggagaactaactaagtttaagatgttcaccaaaaatgacacactgcattgtttaaagatgcttctgtcagacttctctcatcaccatattgaaatggcatgcaccctgctggagacatgtggacggtttcttttcagatctccagaatctcacctgaggaccagtgtacttttggagcaaatgatgagaaagaagcaagcaatgcatcttgatgcgagatacgtcacaatggtagagaatgcatattactactgcaacccacctccagctgaaaaaaccgtgaaaaagaaacgtcctcctctccaggaatatgtccggaaacttttgtacaaggatctctctaaggttaccaccgagaaggttttgagacagatgcgaaagctgccctggcaggaccaagaagtgaaagactatgttatttgttgtatgataaacatctggaatgtgaaatataatagtattcattgtgtagccaacctcttagcaggactagtgctctaccaagaggatgttgggatccacgttgtggatggagtgttagaagatattcgattaggaatggaggttaatcaacctaaatttaatcagaggcgcatcagcagtgccaagttcttaggagaactttacaattaccgaatggtggaatcagctgttattttcagaactctgtattcttttacctcatttggtgttaatcctgatggctctccaagttccctggacccacctgagcatcttttcagaattagactcgtatgcactattctggacacatgtggccagtactttgacagaggttccagtaaacgaaaacttgattgtttccttgtatattttcagcgttatgtttggtggaagaaaagtttggaggtttggacaaaagaccatccatttcctattgatatagattacatgatcagtgatacactagaactgctaagaccaaagatcaaactctgtaattctctggaagaatccatcaggcaggtacaagacttggaacgagaattcttaataaaactaggcctagtaaatgacaaagactcaaaagattctatgacagaaggagaaaatcttgaagaggatgaagaagaagaagaaggtggggctgaaacagaagaacaatctggaaatgaaagtgaagtaaatgagccagaagaagaggagggttctgataatgatgatgatgagggagaagaagaggaggaagagaatacagattaccttacagattccaataaggaaaatgaaaccgatgaagagaatactgaggtaatgattaaaggcggtggacttaagcatgtaccttgtgtagaagatgaggacttcattcaagctctggataaaatgatgctagaaaatctacagcaacgaagtggtgaatctgttaaagtgcaccaactagatgttgccattcctttgcatctcaaaagccagctgaggaaagggcccccactgggaggtggggaaggagaggctgagtctgcagacacaatgccgtttgtcatgttaacaagaaaaggcaataaacagcagtttaagatccttaatgtacccatgtcctctcaacttgctgcaaatcactggaaccagcaacaggcagaacaagaagagaggatgagaatgaaaaagctcacactagatatcaatgaacggcaagaacaagaagattatcaagaaatgttgcagtctcttgcacagcgcccagctccagcaaacaccaatcgtgagaggcggcctcgctaccaacatccgaagggagcacctaatgcagatctaatctttaagactggtgggaggagacgttgatccagcagcacgtgtcatttcattaggtcctgtatctgatgttgtggttagtggagtcctccagcaattgaatgagagcagtggacacatctcagcaggtcggtctagagagttgcgaatctaaacctgggacaggctggggccaggaggcagaaacaccagcctctgccaacaccggaacaagccgacgcttccagacaaggcggaaaaggccttttgtaatggaaatctcgcgagggttaatcttctcttgagaatggcagtcaagaaatgagatggttcacttgactactgagcagttacaccaaggagagcgtgaaggagatgattgagccagagaagaaacgggttgtgatggtaatggtgtgggggaaatgaacttgagctttaaacttgatttgagtttcagtgtctctgaattgaacatcccacgttggaagaagatacatttgggggctccaggactacagtagaaaagtatagagcaagcaggaaaatcttctagtaaaacttacatgcaggacaacaaaatgatgaaagatatccaaataccagataatccaccaggaaggcttttgtttaggaatttgtttcaagaggaacaagggatgagggagaaaaatccgttttatccatcagagtcagtgctataaaattgcctattaaggtaaaagaaaaatgtggagactattttactatacagagagcattaattcagatggcttagaaaagtgataccagcccaagaacagggatctaggtgagcccattgtaagtatcattgaaaacaaaacatgcccgtcaacatgtcacagaaaacgaacgaaggacaacaagaagtggatgagaatattttgttgaccttcatgggtttacagcctctgtctctaaacaaagtatggaaacaagtagagcttttattttgcttttgtttttgttttgtttttttttttgttttcccccactaaatagaaatgagggtccttagtctgtttctgacaatctgttaatttcttaggacagctgtctttggtttgctttccagcaggcgtagtatatttagtcggagagcacatctgtatgcgacaacttgattacatctttttttctagctattttgcattttttcttttaccatgtttcagtttctgcatgtagatttaaataaaaaacaaaacttgtaaagttgtaacatttcacatggaaatgctgcccaatcttcaccagcttcagaaatctgacctttgccgatgctgcaataaagtgttgtaattt

SEQ ID NO: 1087 - DNA, 2704 bp, Homo sapiens
ggcacgaggagaaaacggccgggcggcggtggctgtaggttgtgcggctgcagcggctcttccctgggcggacgatggacagccagggcaggaaggtggtggtgtgcgacaacggcaccgggtttgtgaagtgtggatatgcaggctctaactttccagaacacatcttcccagctttggttggaagacctattatcagatcaaccaccaaagtgggaaacattgaaatcaaggatcttatggttggtgatgaggcaagtgaattacgatcaatgttagaagttaactaccctatggaaaatggcatagtacgaaattgggatgacatgaaacacctgtgggactacacatttggaccagagaaacttaatatagataccagaaattgtaaaatcttactcacagaacctcctatgaacccaaccaaaaacagagagaagattgtagaggtaatgtttgaaacttaccagttttccggtgtatatgtagccatccaggcagttctgactttgtacgctcaaggtttattgactggtgtagtggtagactctggagatggtgtgactcacatttgcccagtatatgaaggcttttctctccctcatcttaccaggagactggatattgctgggagggatataactagatatcttatcaagctacttctgttgcgaggatacgccttcaaccactctgctgattttgaaacggttcgcatgattaaagaaaaactgtgttacgtgggatataatattgagcaagagcagaaactggccttagaaaccacagtattagttgaatcttatacactcccagatggacgtatcatcaaagttgggggagagagatttgaagcaccagaagctttatttcagcctcacttgatcaatgttgaaggagttggtgttgctgaattgctttttaacacaattcaggcagctgacattgataccagatctgaattctacaaacacattgtgctttctggagggtctactatgtatcctggcctgccatcacggttggaacgagaacttaaacagctttacttagaacgagttttgaagggtgatgtggaaaaactttctaaatttaagatccgcattgaagacccaccccgcagaaagcacatggtattcctgggtggtgcagttctagcggatatcatgaaagacaaagacaacttttggatgacccgacaagagtaccaagaaaagggtgtccgtgtgctagagaaacttggtgtgactgttcgataaactccaaagcttgttcccatcatacccgtaatgctttcttttttcctttattgccaatctttgaactcattcaactccaggacatggaagaggcctctctctgccctttgactggaaaggtcaagttttattctggtgtcttggggaagctttgttaaatttttgttaatgtgggtaaatctgagtttaattcaactgcttccctatatagactagagggctaaggattctgtctgctgctttgtttcttctaagtaggcatttagatcattcctgtaggcttcctattttcactttactgctctaatgctgctagtcgtagtctttagcacactaggtggtatgcctttattagcataaaacaaaaaaaactttaacaggagcttttacatattactgggatggggggtggttcgggatgggtgggcagctgctgaaccctttagggcatttcctctgtaatgtggcgctttcaactgtactgctgcagctttaagtaccttaaagcttctcctgtgaacttcttagggaaatgttaggttcagaactaaagtgttttgggtgggttttgttgcgggggggagggtaacaatgggtggtcttctgatttttatttttgaggttttgtcaactggagtacgtagaggaactttatttacagtactttgatttggcaggttttcttctacttgtgctctgcctggagctgtttccatatgatataaaaagcaagtgtagtattccattactatgtggcttagggatttatttgttttttaaaatcaaccatgttagctgggattagactccctacagtccttcaatggaaaagtaacatttaaaaatcctttgggtaattcaaattacagatttaaaagagcttaagatctggtgttttgttaatgcttctgtttattccagaagcattaaggtaacccattgccaagtatcattcttgcaaattattcttttatataactgaccagtgcttaataaaacaagcaggtacttacaaataattactggcagtaggttataattggtggtttaaaaataacattggaatacaggacttgttgccaattgggtaattttcattagttgttttgtttgttttgatttgaaacctggaaatacagtaaaatttgactgtttaaaatgttggccaaaaaaatcaagatttaatttttttatttgtactgaaaaactaatcataactgttaattctcagccatctttgaagcttgaaagaagagtctttggtattttgtaaacgttagcagactttcctgccagtgtcagaaaatcctatttatgaatcctgtcggtattccttggtatctgaaaaaaataccaaatagtaccatacatgagttatttctaagtttgaaaaataaaaagaaattgcatcacactaattacaaaataaaaaaaaaaaaaaaaaa

SEQ ID NO: 1088 - protein, 394 aa, Homo sapiens
MDSQGRKVVVCDNGTGFVKCGYAGSNFPEHIFPALVGRPIIRSTTKVGNIEIKDLMVGDEASELRSMLEVNYPMENGIVRNWDDMKHLWDYTFGPEKLNIDTRNCKILLTEPPMNPTKNREKIVEVMFETYQFSGVYVAIQAVLTLYAQGLLTGVVVDSGDGVTHICPVYEGFSLPHLTRRLDIAGRDITRYLIKLLLLRGYAFNHSADFETVRMIKEKLCYVGYNIEQEQKLALETTVLVESYTLPDGRIIKVGGERFEAPEALFQPHLINVEGVGVAELLFNTIQAADIDTRSEFYKHIVLSGGSTMYPGLPSRLERELKQLYLERVLKGDVEKLSKFKIRIEDPPRRKHMVFLGGAVLADIMKDKDNFWMTRQEYQEKGVRVLEKLGVTVR

SEQ ID NO: 1089 - DNA, 5963 bp, Homo sapiens
gtgagaaggcggcggcggcggcggagtagcagccggacgagacgtcccagcggctcaggcgctgcccagcgccggccctggcagggagcctggtggggtggcggagggggagactgtgccgtggagggcctcgccatgtcctgctgcccgacttccttgtgaaacctcctagtagaaaaagttcttgggacaaacttcatttgacttcaccataagggaaagaagagagccttgttggacactgaagaagggacggggatttctcctcctaatctgggcctcttgtcatggatgaagagactcggcacagccttgagtgcatccaggccaatcagatctttcccaggaagcagctgatccgggaggatgagaatcttcaggttcctttccttgaacttcatggagagagcacagagtttgtgggccgtgccgaggatgccatcattgccctttccaattacagacttcacatcaagttcaaggagtctcttgttaatgttccattacagcttatagaaagtgttgaatgccgagatatatttcagcttcatttgacttgcaaagactgcaaagttatcaggtgtcagttttcaacctttgagcagtgtcaagagtggctgaagagactgaacaacgcaatccgaccacctgctaaaatagaagatctcttctcatttgcataccatgcttggtgcatggaggtctatgccagtgaaaaagagcaacatggagacctgtgcagaccaggggagcatgtaacttcaaggtttaaaaacgaggtggagaggatgggttttgatatgaacaacgcctggaggatttccaacatcaatgagaagtacaaattatgtggtagctatcctcaagagctcatagtgcctgcctggatcactgacaaagaactggaaagtgtatcaagtttcaggtcctggaagcgcatccctgccgtcatctacaggcaccagagcaatggagctgtcattgcccgctgtggacagccagaggttagctggtggggctggcgaaatgcagatgatgagcatctggtacagtcagtagccaaagcttgtgcctctgactcccgatcgagtggcagcaagctgtcaactaggaacacttctcgagactttcccaatgggggagacctttctgacgtggagttcgattcttctctgtcaaatgcttcaggagcagagagtttagccatccaaccgcagaagcttttgatcttggatgcacgctcctatgcagctgctgtggcaaaccgagccaaaggaggaggctgcgaatgcccagagtattacccaaactgtgaagttgtgtttatggggatggcaaacattcattctattcggaggagttttcagtctctgcggttgctgtgcactcagatgccagatccgggaaattggctatcagctcttgaaagcacaaaatggctccatcacttgtctgtgcttctgaaatcagcgcttctggtagtgcatgctgtggatcaggatcagcggccggtgctagtacactgctcagatggctgggaccgcaccccccagattgtggcattggctaagctcttgctggacccttattaccgaaccatagagggtttccaggtcctcgtggaaatggagtggctggattttggccataaatttgctgaccggtgtggtcatggggagaactcggatgatctgaatgaacgttgcccagtgtttctgcagtggcttgactgtgttcatcagcttcagaggcaatttccttgctcttttgagttcaatgaagcattccttgtgaaactggtgcagcatacctattcctgcctgtttggaacattcctgtgcaacaacgccaaggagagaggggaaaagcatactcaggaacggacatgttccgtgtggtcacttcttcgggcaggcaacaaggctttcaaaaacctactgtattcctctcagtcagaagccgtgctgtaccctgtgtgccatgtgcgtaacctgatgctgtggagtgcagtgtacctgccctgcccatccccaaccacccctgtggacgacagctgtgcaccatacccagccccaggcaccagccctgatgatccccccctgagccggctaccaaagactagatcatacgacaatctgaccacagcctgtgacaacacagtgcctctggccagccggcgctgcagcgaccccagcctgaacgagaagtggcaggagcaccggcgctcactagagctgagcagcctggctggccctggagaggatcccctttctgccgacagcctagggaagcccaccagagtgccggggggtgccgagctttctgttgcagccggagtagctgaggggcagatggagaacatcttgcaggaggccaccaaagaggagagtggagtagaggaacctgcccacagggcaggcattgagatacaggagggtaaagaggaccctctcttagaaaaggagagcaggaggaagacacctgaggcctcagccattggacttcaccaagacccagaactgggtgatgctgctctgaggagccatctggatatgagctggcctctgttctcacagggcatttctgaacagcagagtgggctcagtgttctcctcagttctctccaggtcccccccaggggagaggattccctggaggtccctgtggagcagtttcgaatagaagagattgcagagggtagggaggaagcagttcttccaatcccagtagatgcaaaagttggctatggtacctcacagtcatgttctctgctaccttcccaagtcccttttgagaccagaggaccaaacgtggacagttctacagacatgttagtggaagataaggtgaagtcagtaagtgggccccaaggtcatcatagatcttgccttgtaaatagtggcaaggacaggcttcctcagaccatggaacccagcccttcagagacaagcctggtcgagaggccccaagtggggtctgtggtgcataggacttcccttggcagcactctcagcctgacacgttccccttgtgccttgcctttagccgaatgtaaagaggggcttgtgtgcaatggtgccccagagactgaaaacagggcctcagagcagcccccaggtcttagcaccctccagatgtaccccacacccaatgggcattgcgccaatggggaggctggtaggagcaaggactcactgagccgtcagctgtctgctatgagctgcagctctgcccacttacactcaaggaacttgcaccacaagtggctgcatagccactcaggaaggccatctgcaaccagcagccccgaccagccttcccgcagccacctggacgatgatggcatgtcagtgtacacagacacgatccaacagcgcctgcgtcagattgagtcaggccaccagcaggaagtagaaactttgaagaaacaagtccaggagctgaagagtcgcctggagagccagtacctgaccagctccctacactttaatggagactttggggatgaggtgacttcaatccccgactcggaaagcaatctggatcagaactgtttgtctcgctgcagcacagagattttctctgaagccagctgggagcaggtggataaacaggacacagagatgacccgttggcttcctgaccacctggccgcccactgctatgcgtgcgacagtgccttctggcttgccagcaggaagcaccactgcaggaattgtgggaacgtattctgctccagttgttgtaaccagaaggttccagttcccagccagcagctctttgaacccagtcgagtatgcaagtcttgctatagcagcctacatcccacaagctccagcattgaccttgaactggataagcccattgctgccacttccaactgaagctcagtgacctgggtgggcagtggccaagctgctgttcctatgacaggcccactcaacctgggcagaccgagaggcccgtgcactttggaatgggagcgtggaaccacctgtacagagtgacagatttgggatgcaccactggattgtagattgatttttctttcctgtccccctactccctccctaccttttccatcctcctcctctgccttcaaaaaaggaaactttcccttggttgtcttaattttttttttttttgatggaagaccaagggttgccaggcccactgtaactgccgagctgcctgctgtcacgtgacactgagggatggcttgtttcttccgggtgggaggatggtggtcagagccaggagtatggagatctgagaccgtgagcagggaagaaagccagtgctaacatgcaaccattcctcacgccaccgccacatcagagctggttgggaaccctttgctgctggggaggctggaagcatattccccaagagcactgccctgggcatcatctccctcctgcgaggagctgagccagtcccctcacagatggataaatgaggctgatgtttggagggagaggcacacggtaaatggcatccccttaggcgcctctttgggaaaggaaagtggatgctcctttgaggcaggcgaggggctgggagtgggtagccgtcatgttgtcccccgtgggatcccatttttaacttgacccagattgtcttgggctccttttactttcagggggctgctttcctgggccaggctgtgtagcacttcccaccctcaggcatgagtacagactggtcaaaatgtttatgcagtcaaggccaaagcctgccctgagcccagacacacctgggtccccattctggggcctggtcccctaaacaatctcttcctcagccagcacagggaaatccagactcagggttccagaaatcccccgttcccaaaccaaaccaatcatggatcttccctttaaggggtagaatcagcctttagagttacaagcccctggaaaagggagcaggtcccatacaatcagcctttctcctcttctcttcttgggacaggaataactgctgagcagtccccctttgccactcctggctgtctgagtgggcacttgtctggctgctggccagcagtgaagggccacttggtgacttcgtagggttccttagagaagtgacatggccttgaggagattcagggcacctttcctcagtgagctttgatatggtccaaaaacagccttaaatcaagaatatttgtggaggtaggtgtggggaaggttggagaagagttaggtttgtgctttgtaatcttggcatccatgttttgtgcctgccctccctcttggggaggccatgcttgactctgctgaaagctgctaactggtgacagggtggatcatggtgaggactaggggtaaggtcagggaatgcttaagctctggccctgccctgtattcctcttccccttggtagcagttccctgaccaagggcaaggtgtgtctcaggaaggtggttctgtgcatgcctgggtgtggttaaggcgtggcccagaaggcttccctggtgctctcagtccaggcaaagcccagagcatctgagcacgtctctgacttccagtggcaacacagtttgaacgtggtgaaacagggtgtagttcttttccacattctgtgtcatctagtcgtgcaggtagggaaaaagttggtctaattgaagattgtgcatttcctagtgacaggtgccaagaggttatgatacgggtttcttgggtctgatgtacagtgtgaataaatgcttgcagctcttagctcttttttgatcgatgaagcacttttttattaatattttcctttgttaaaggaggaaccgtaactctccatagctgtacatataacccttttctcctaaagaggagtcagtcagtgctcctatatttttcattttttgtcaaagcaagaagtaaatactttagaattgttaaatatataaataaagcaaataaagttgagtgttccacatggtagcatttgctaacacttcctaa

SEQ ID NO: 1090 - protein, 1198 aa, Homo sapiens
MDEETRHSLECIQANQIFPRKQLIREDENLQVPFLELHGESTEFVGRAEDAIIALSNYRLHIKFKESLVNVPLQLIESVECRDIFQLHLTCKDCKVIRCQFSTFEQCQEWLKRLNNAIRPPAKIEDLFSFAYHAWCMEVYASEKEQHGDLCRPGEHVTSRFKNEVERMGFDMNNAWRISNINEKYKLCGSYPQELIVPAWITDKELESVSSFRSWKRIPAVIYRHQSNGAVIARCGQPEVSWWGWRNADDEHLVQSVAKACASDSRSSGSKLSTRNTSRDFPNGGDLSDVEFDSSLSNASGAESLAIQPQKLLILDARSYAAAVANRAKGGGCECPEYYPNCEVVFMGMANIHSIRRSFQSLRLLCTQMPDPGNWLSALESTKWLHHLSVLLKSALLVVHAVDQDQRPVLVHCSDGWDRTPQIVALAKLLLDPYYRTIEGFQVLVEMEWLDFGHKFADRCGHGENSDDLNERCPVFLQWLDCVHQLQRQFPCSFEFNEAFLVKLVQHTYSCLFGTFLCNNAKERGEKHTQERTCSVWSLLRAGNKAFKNLLYSSQSEAVLYPVCHVRNLMLWSAVYLPCPSPTTPVDDSCAPYPAPGTSPDDPPLSRLPKTRSYDNLTTACDNTVPLASRRCSDPSLNEKWQEHRRSLELSSLAGPGEDPLSADSLGKPTRVPGGAELSVAAGVAEGQMENILQEATKEESGVEEPAHRAGIEIQEGKEDPLLEKESRRKTPEASAIGLHQDPELGDAALRSHLDMSWPLFSQGISEQQSGLSVLLSSLQVPPRGEDSLEVPVEQFRIEEIAEGREEAVLPIPVDAKVGYGTSQSCSLLPSQVPFETRGPNVDSSTDMLVEDKVKSVSGPQGHHRSCLVNSGKDRLPQTMEPSPSETSLVERPQVGSVVHRTSLGSTLSLTRSPCALPLAECKEGLVCNGAPETENRASEQPPGLSTLQMYPTPNGHCANGEAGRSKDSLSRQLSAMSCSSAHLHSRNLHHKWLHSHSGRPSATSSPDQPSRSHLDDDGMSVYTDTIQQRLRQIESGHQQEVETLKKQVQELKSRLESQYLTSSLHFNGDFGDEVTSIPDSESNLDQNCLSRCSTEIFSEASWEQVDKQDTEMTRWLPDHLAAHCYACDSAFWLASRKHHCRNCGNVFCSSCCNQKVPVPSQQLFEPSRVCKSCYSSLHPTSSSIDLELDKPIAATSN

SEQ ID NO: 1091 - DNA, 5879 bp, Homo sapiens
gtgagaaggcggcggcggcggcggagtagcagccggacgagacgtcccagcggctcaggcgctgcccagcgccggccctggcagggagcctggtggggtggcggagggggagactgtgccgtggagggcctcgccatgtcctgctgcccgacttccttgtgaaacctcctagtagaaaaagttcttgggacaaacttcatttgacttcaccataagggaaagaagagagccttgttggacactgaagaagggacggggatttctcctcctaatctgggcctcttgtcatggatgaagagactcggcacagccttgagtgcatccaggccaatcagatctttcccaggaagcagctgatccgggaggatgagaatcttcaggttcctttccttgaacttcatggagagagcacagagtttgtgggccgtgccgaggatgccatcattgccctttccaattacagacttcacatcaagttcaaggagtctcttgttaatgttccattacagcttatagaaagtgttgaatgccgagatatatttcagcttcatttgacttgcaaagactgcaaagttatcaggtgtcagttttcaacctttgagcagtgtcaagagtggctgaagagactgaacaacgcaatccgaccacctgctaaaatagaagatctcttctcatttgcataccatgcttggtgcatggaggtctatgccagtgaaaaagagcaacatggagacctgtgcagaccaggggagcatgtaacttcaaggtttaaaaacgaggtggagaggatgggttttgatatgaacaacgcctggaggatttccaacatcaatgagaagtacaaattatgtggtagctatcctcaagagctcatagtgcctgcctggatcactgacaaagaactggaaagtgtatcaagtttcaggtcctggaagcgcatccctgccgtcatctacaggcaccagagcaatggagctgtcattgcccgctgtggacagccagaggttagctggtggggctggcgaaatgcagatgatgagcatctggtacagtcagtagccaaagcttgtgcctctgactcccgatcgagtggcagcaagctgtcaactaggaacacttctcgagactttcccaatgggggagacctttctgacgtggagttcgattcttctctgtcaaatgcttcaggagcagagagtttagccatccaaccgcagaagcttttgatcttggatgcacgctcctatgcagctgctgtggcaaaccgagccaaaggaggaggctgcgaatgcccagagtattacccaaactgtgaagttgtgtttatggggatggcaaacattcattctattcggaggagttttcagtctctgcggttgctgtgcactcagatgccagatccgggaaattggctatcagctcttgaaagcacaaaatggctccatcacttgtctgtgcttctgaaatcagcgcttctggtagtgcatgctgtggatcaggatcagcggccggtgctagtacactgctcagatggctgggaccgcaccccccagattgtggcattggctaagctcttgctggacccttattaccgaaccatagagggtttccaggtcctcgtggaaatggagtggctggattttggccataaatttgctgaccggtgtggtcatggggagaactcggatgatctgaatgaacgttgcccagtgtttctgcagtggcttgactgtgttcatcagcttcagaggcaatttccttgctcttttgagttcaatgaagcattccttgtgaaactggtgcagcatacctattcctgcctgtttggaacattcctgtgcaacaacgccaaggagagaggggaaaagcatactcaggaacggacatgttccgtgtggtcacttcttcgggcaggcaacaaggctttcaaaaacctactgtattcctctcagtcagaagccgtgctgtaccctgtgtgccatgtgcgtaacctgatgctgtggagtgcagtgtacctgccctgcccatccccaaccacccctgtggacgacagctgtgcaccatacccagccccaggcaccagccctgatgatccccccctgagccggctaccaaagactagatcatacgacaatctgaccacagcctgtgacaacacagtgcctctggccagccggcgctgcagcgaccccagcctgaacgagaagtggcaggagcaccggcgctcactagagctgagcagcctggctggccctggagaggatcccctttctgccgacagcctagggaagcccaccagagtgccggggggtgccgagctttctgttgcagccggagtagctgaggggcagatggagaacatcttgcaggaggccaccaaagaggagagtggagtagaggaacctgcccacagggcaggcattgagatacaggagggtaaagaggaccctctcttagaaaaggagagcaggaggaagacacctgaggcctcagccattggacttcaccaagacccagaactgggtgatgctgctctgaggagccatctggatatgagctggcctctgttctcacagggcatttctgaacagcagagtgggctcagtgttctcctcagttctctccaggtcccccccaggggagaggattccctggaggtccctgtggagcagtttcgaatagaagagattgcagagggtagggaggaagcagttcttccaatcccagtagatgcaaaagttggctatggtacctcacagtcatgttctctgctaccttcccaagtcccttttgagaccagaggaccaaacgtggacagttctacagacatgttagtggaagataaggtgaagtcagtaagtgggccccaaggtcatcatagatcttgccttgtaaatagtggcaaggacaggcttcctcagaccatggaacccagcccttcagagacaagcctggtcgagaggccccaagtggggtctgtggtgcataggacttcccttggcagcactctcagcctgacacgttccccttgtgccttgcctttagccgaatgtaaagaggggcttgtgtgcaatggtgccccagagactgaaaacagggcctcagagcagcccccaggtcttagcaccctccagatgtaccccacacccaatgggcattgcgccaatggggaggctggtaggagcaaggactcactgagccgtcagctgtctgctatgagctgcagctctgcccacttacactcaaggaacttgcaccacaagtggctgcatagccactcaggaaggccatctgcaaccagcagccccgaccagccttcccgcagccacctggacgatgatggcatgtcagtgtacacagacacgatccaacagcgcctgcgtcagattgagtcaggccaccagcaggaagtagaaactttgaagaaacaagtccaggagctgaagagtcgcctggagagccagtacctgaccagctccctacactttaatggagactttggggatgaggtgatgacccgttggcttcctgaccacctggccgcccactgctatgcgtgcgacagtgccttctggcttgccagcaggaagcaccactgcagggacactgaccgtgttgatcaaacgtggaattgtgggaacgtattctgctccagttgttgtaaccagaaggttccagttcccagccagcagctctttgaacccagtcgagtatgcaagtcttgctatagcagcctacatcccacaagctccagcattgaccttgaactggataagcccattgctgccacttccaactgaagctcagtgacctgggtgggcagtggccaagctgctgttcctatgacaggcccactcaacctgggcagaccgagaggcccgtgcactttggaatgggagcgtggaaccacctgtacagagtgacagatttgggatgcaccactggattgtagattgatttttctttcctgtccccctactccctccctaccttttccatcctcctcctctgccttcaaaaaaggaaactttcccttggttgtcttaattttttttttttttgatggaagaccaagggttgccaggcccactgtaactgccgagctgcctgctgtcacgtgacactgagggatggcttgtttcttccgggtgggaggatggtggtcagagccaggagtatggagatctgagaccgtgagcagggaagaaagccagtgctaacatgcaaccattcctcacgccaccgccacatcagagctggttgggaaccctttgctgctggggaggctggaagcatattccccaagagcactgccctgggcatcatctccctcctgcgaggagctgagccagtcccctcacagatggataaatgaggctgatgtttggagggagaggcacacggtaaatggcatccccttaggcgcctctttgggaaaggaaagtggatgctcctttgaggcaggcgaggggctgggagtgggtagccgtcatgttgtcccccgtgggatcccatttttaacttgacccagattgtcttgggctccttttactttcagggggctgctttcctgggccaggctgtgtagcacttcccaccctcaggcatgagtacagactggtcaaaatgtttatgcagtcaaggccaaagcctgccctgagcccagacacacctgggtccccattctggggcctggtcccctaaacaatctcttcctcagccagcacagggaaatccagactcagggttccagaaatcccccgttcccaaaccaaaccaatcatggatcttccctttaaggggtagaatcagcctttagagttacaagcccctggaaaagggagcaggtcccatacaatcagcctttctcctcttctcttcttgggacaggaataactgctgagcagtccccctttgccactcctggctgtctgagtgggcacttgtctggctgctggccagcagtgaagggccacttggtgacttcgtagggttccttagagaagtgacatggccttgaggagattcagggcacctttcctcagtgagctttgatatggtccaaaaacagccttaaatcaagaatatttgtggaggtaggtgtggggaaggttggagaagagttaggtttgtgctttgtaatcttggcatccatgttttgtgcctgccctccctcttggggaggccatgcttgactctgctgaaagctgctaactggtgacagggtggatcatggtgaggactaggggtaaggtcagggaatgcttaagctctggccctgccctgtattcctcttccccttggtagcagttccctgaccaagggcaaggtgtgtctcaggaaggtggttctgtgcatgcctgggtgtggttaaggcgtggcccagaaggcttccctggtgctctcagtccaggcaaagcccagagcatctgagcacgtctctgacttccagtggcaacacagtttgaacgtggtgaaacagggtgtagttcttttccacattctgtgtcatctagtcgtgcaggtagggaaaaagttggtctaattgaagattgtgcatttcctagtgacaggtgccaagaggttatgatacgggtttcttgggtctgatgtacagtgtgaataaatgcttgcagctcttagctcttttttgatcgatgaagcacttttttattaatattttcctttgttaaaggaggaaccgtaactctccatagctgtacatataacccttttctcctaaagaggagtcagtcagtgctcctatatttttcattttttgtcaaagcaagaagtaaatactttagaattgttaaatatataaataaagcaaataaagttgagtgttccacatggtagcatttgctaacacttcctaa

SEQ ID NO: 1092 - protein, 1170 aa, Homo sapiens
MDEETRHSLECIQANQIFPRKQLIREDENLQVPFLELHGESTEFVGRAEDAIIALSNYRLHIKFKESLVNVPLQLIESVECRDIFQLHLTCKDCKVIRCQFSTFEQCQEWLKRLNNAIRPPAKIEDLFSFAYHAWCMEVYASEKEQHGDLCRPGEHVTSRFKNEVERMGFDMNNAWRISNINEKYKLCGSYPQELIVPAWITDKELESVSSFRSWKRIPAVIYRHQSNGAVIARCGQPEVSWWGWRNADDEHLVQSVAKACASDSRSSGSKLSTRNTSRDFPNGGDLSDVEFDSSLSNASGAESLAIQPQKLLILDARSYAAAVANRAKGGGCECPEYYPNCEVVFMGMANIHSIRRSFQSLRLLCTQMPDPGNWLSALESTKWLHHLSVLLKSALLVVHAVDQDQRPVLVHCSDGWDRTPQIVALAKLLLDPYYRTIEGFQVLVEMEWLDFGHKFADRCGHGENSDDLNERCPVFLQWLDCVHQLQRQFPCSFEFNEAFLVKLVQHTYSCLFGTFLCNNAKERGEKHTQERTCSVWSLLRAGNKAFKNLLYSSQSEAVLYPVCHVRNLMLWSAVYLPCPSPTTPVDDSCAPYPAPGTSPDDPPLSRLPKTRSYDNLTTACDNTVPLASRRCSDPSLNEKWQEHRRSLELSSLAGPGEDPLSADSLGKPTRVPGGAELSVAAGVAEGQMENILQEATKEESGVEEPAHRAGIEIQEGKEDPLLEKESRRKTPEASAIGLHQDPELGDAALRSHLDMSWPLFSQGISEQQSGLSVLLSSLQVPPRGEDSLEVPVEQFRIEEIAEGREEAVLPIPVDAKVGYGTSQSCSLLPSQVPFETRGPNVDSSTDMLVEDKVKSVSGPQGHHRSCLVNSGKDRLPQTMEPSPSETSLVERPQVGSVVHRTSLGSTLSLTRSPCALPLAECKEGLVCNGAPETENRASEQPPGLSTLQMYPTPNGHCANGEAGRSKDSLSRQLSAMSCSSAHLHSRNLHHKWLHSHSGRPSATSSPDQPSRSHLDDDGMSVYTDTIQQRLRQIESGHQQEVETLKKQVQELKSRLESQYLTSSLHFNGDFGDEVMTRWLPDHLAAHCYACDSAFWLASRKHHCRDTDRVDQTWNCGNVFCSSCCNQKVPVPSQQLFEPSRVCKSCYSSLHPTSSSIDLELDKPIAATSN

SEQ ID NO: 1093 - DNA, 5852 bp, Homo sapiens
gtgagaaggcggcggcggcggcggagtagcagccggacgagacgtcccagcggctcaggcgctgcccagcgccggccctggcagggagcctggtggggtggcggagggggagactgtgccgtggagggcctcgccatgtcctgctgcccgacttccttgtgaaacctcctagtagaaaaagttcttgggacaaacttcatttgacttcaccataagggaaagaagagagccttgttggacactgaagaagggacggggatttctcctcctaatctgggcctcttgtcatggatgaagagactcggcacagccttgagtgcatccaggccaatcagatctttcccaggaagcagctgatccgggaggatgagaatcttcaggttcctttccttgaacttcatggagagagcacagagtttgtgggccgtgccgaggatgccatcattgccctttccaattacagacttcacatcaagttcaaggagtctcttgttaatgttccattacagcttatagaaagtgttgaatgccgagatatatttcagcttcatttgacttgcaaagactgcaaagttatcaggtgtcagttttcaacctttgagcagtgtcaagagtggctgaagagactgaacaacgcaatccgaccacctgctaaaatagaagatctcttctcatttgcataccatgcttggtgcatggaggtctatgccagtgaaaaagagcaacatggagacctgtgcagaccaggggagcatgtaacttcaaggtttaaaaacgaggtggagaggatgggttttgatatgaacaacgcctggaggatttccaacatcaatgagaagtacaaattatgtggtagctatcctcaagagctcatagtgcctgcctggatcactgacaaagaactggaaagtgtatcaagtttcaggtcctggaagcgcatccctgccgtcatctacaggcaccagagcaatggagctgtcattgcccgctgtggacagccagaggttagctggtggggctggcgaaatgcagatgatgagcatctggtacagtcagtagccaaagcttgtgcctctgactcccgatcgagtggcagcaagctgtcaactaggaacacttctcgagactttcccaatgggggagacctttctgacgtggagttcgattcttctctgtcaaatgcttcaggagcagagagtttagccatccaaccgcagaagcttttgatcttggatgcacgctcctatgcagctgctgtggcaaaccgagccaaaggaggaggctgcgaatgcccagagtattacccaaactgtgaagttgtgtttatggggatggcaaacattcattctattcggaggagttttcagtctctgcggttgctgtgcactcagatgccagatccgggaaattggctatcagctcttgaaagcacaaaatggctccatcacttgtctgtgcttctgaaatcagcgcttctggtagtgcatgctgtggatcaggatcagcggccggtgctagtacactgctcagatggctgggaccgcaccccccagattgtggcattggctaagctcttgctggacccttattaccgaaccatagagggtttccaggtcctcgtggaaatggagtggctggattttggccataaatttgctgaccggtgtggtcatggggagaactcggatgatctgaatgaacgttgcccagtgtttctgcagtggcttgactgtgttcatcagcttcagaggcaatttccttgctcttttgagttcaatgaagcattccttgtgaaactggtgcagcatacctattcctgcctgtttggaacattcctgtgcaacaacgccaaggagagaggggaaaagcatactcaggaacggacatgttccgtgtggtcacttcttcgggcaggcaacaaggctttcaaaaacctactgtattcctctcagtcagaagccgtgctgtaccctgtgtgccatgtgcgtaacctgatgctgtggagtgcagtgtacctgccctgcccatccccaaccacccctgtggacgacagctgtgcaccatacccagccccaggcaccagccctgatgatccccccctgagccggctaccaaagactagatcatacgacaatctgaccacagcctgtgacaacacagtgcctctggccagccggcgctgcagcgaccccagcctgaacgagaagtggcaggagcaccggcgctcactagagctgagcagcctggctggccctggagaggatcccctttctgccgacagcctagggaagcccaccagagtgccggggggtgccgagctttctgttgcagccggagtagctgaggggcagatggagaacatcttgcaggaggccaccaaagaggagagtggagtagaggaacctgcccacagggcaggcattgagatacaggagggtaaagaggaccctctcttagaaaaggagagcaggaggaagacacctgaggcctcagccattggacttcaccaagacccagaactgggtgatgctgctctgaggagccatctggatatgagctggcctctgttctcacagggcatttctgaacagcagagtgggctcagtgttctcctcagttctctccaggtcccccccaggggagaggattccctggaggtccctgtggagcagtttcgaatagaagagattgcagagggtagggaggaagcagttcttccaatcccagtagatgcaaaagttggctatggtacctcacagtcatgttctctgctaccttcccaagtcccttttgagaccagaggaccaaacgtggacagttctacagacatgttagtggaagataaggtgaagtcagtaagtgggccccaaggtcatcatagatcttgccttgtaaatagtggcaaggacaggcttcctcagaccatggaacccagcccttcagagacaagcctggtcgagaggccccaagtggggtctgtggtgcataggacttcccttggcagcactctcagcctgacacgttccccttgtgccttgcctttagccgaatgtaaagaggggcttgtgtgcaatggtgccccagagactgaaaacagggcctcagagcagcccccaggtcttagcaccctccagatgtaccccacacccaatgggcattgcgccaatggggaggctggtaggagcaaggactcactgagccgtcagctgtctgctatgagctgcagctctgcccacttacactcaaggaacttgcaccacaagtggctgcatagccactcaggaaggccatctgcaaccagcagccccgaccagccttcccgcagccacctggacgatgatggcatgtcagtgtacacagacacgatccaacagcgcctgcgtcagattgagtcaggccaccagcaggaagtagaaactttgaagaaacaagtccaggagctgaagagtcgcctggagagccagtacctgaccagctccctacactttaatggagactttggggatgaggtgatgacccgttggcttcctgaccacctggccgcccactgctatgcgtgcgacagtgccttctggcttgccagcaggaagcaccactgcaggaattgtgggaacgtattctgctccagttgttgtaaccagaaggttccagttcccagccagcagctctttgaacccagtcgagtatgcaagtcttgctatagcagcctacatcccacaagctccagcattgaccttgaactggataagcccattgctgccacttccaactgaagctcagtgacctgggtgggcagtggccaagctgctgttcctatgacaggcccactcaacctgggcagaccgagaggcccgtgcactttggaatgggagcgtggaaccacctgtacagagtgacagatttgggatgcaccactggattgtagattgatttttctttcctgtccccctactccctccctaccttttccatcctcctcctctgccttcaaaaaaggaaactttcccttggttgtcttaattttttttttttttgatggaagaccaagggttgccaggcccactgtaactgccgagctgcctgctgtcacgtgacactgagggatggcttgtttcttccgggtgggaggatggtggtcagagccaggagtatggagatctgagaccgtgagcagggaagaaagccagtgctaacatgcaaccattcctcacgccaccgccacatcagagctggttgggaaccctttgctgctggggaggctggaagcatattccccaagagcactgccctgggcatcatctccctcctgcgaggagctgagccagtcccctcacagatggataaatgaggctgatgtttggagggagaggcacacggtaaatggcatccccttaggcgcctctttgggaaaggaaagtggatgctcctttgaggcaggcgaggggctgggagtgggtagccgtcatgttgtcccccgtgggatcccatttttaacttgacccagattgtcttgggctccttttactttcagggggctgctttcctgggccaggctgtgtagcacttcccaccctcaggcatgagtacagactggtcaaaatgtttatgcagtcaaggccaaagcctgccctgagcccagacacacctgggtccccattctggggcctggtcccctaaacaatctcttcctcagccagcacagggaaatccagactcagggttccagaaatcccccgttcccaaaccaaaccaatcatggatcttccctttaaggggtagaatcagcctttagagttacaagcccctggaaaagggagcaggtcccatacaatcagcctttctcctcttctcttcttgggacaggaataactgctgagcagtccccctttgccactcctggctgtctgagtgggcacttgtctggctgctggccagcagtgaagggccacttggtgacttcgtagggttccttagagaagtgacatggccttgaggagattcagggcacctttcctcagtgagctttgatatggtccaaaaacagccttaaatcaagaatatttgtggaggtaggtgtggggaaggttggagaagagttaggtttgtgctttgtaatcttggcatccatgttttgtgcctgccctccctcttggggaggccatgcttgactctgctgaaagctgctaactggtgacagggtggatcatggtgaggactaggggtaaggtcagggaatgcttaagctctggccctgccctgtattcctcttccccttggtagcagttccctgaccaagggcaaggtgtgtctcaggaaggtggttctgtgcatgcctgggtgtggttaaggcgtggcccagaaggcttccctggtgctctcagtccaggcaaagcccagagcatctgagcacgtctctgacttccagtggcaacacagtttgaacgtggtgaaacagggtgtagttcttttccacattctgtgtcatctagtcgtgcaggtagggaaaaagttggtctaattgaagattgtgcatttcctagtgacaggtgccaagaggttatgatacgggtttcttgggtctgatgtacagtgtgaataaatgcttgcagctcttagctcttttttgatcgatgaagcacttttttattaatattttcctttgttaaaggaggaaccgtaactctccatagctgtacatataacccttttctcctaaagaggagtcagtcagtgctcctatatttttcattttttgtcaaagcaagaagtaaatactttagaattgttaaatatataaataaagcaaataaagttgagtgttccacatggtagcatttgctaacacttcctaa

SEQ ID NO: 1094 - protein, 1161 aa, Homo sapiens
MDEETRHSLECIQANQIFPRKQLIREDENLQVPFLELHGESTEFVGRAEDAIIALSNYRLHIKFKESLVNVPLQLIESVECRDIFQLHLTCKDCKVIRCQFSTFEQCQEWLKRLNNAIRPPAKIEDLFSFAYHAWCMEVYASEKEQHGDLCRPGEHVTSRFKNEVERMGFDMNNAWRISNINEKYKLCGSYPQELIVPAWITDKELESVSSFRSWKRIPAVIYRHQSNGAVIARCGQPEVSWWGWRNADDEHLVQSVAKACASDSRSSGSKLSTRNTSRDFPNGGDLSDVEFDSSLSNASGAESLAIQPQKLLILDARSYAAAVANRAKGGGCECPEYYPNCEVVFMGMANIHSIRRSFQSLRLLCTQMPDPGNWLSALESTKWLHHLSVLLKSALLVVHAVDQDQRPVLVHCSDGWDRTPQIVALAKLLLDPYYRTIEGFQVLVEMEWLDFGHKFADRCGHGENSDDLNERCPVFLQWLDCVHQLQRQFPCSFEFNEAFLVKLVQHTYSCLFGTFLCNNAKERGEKHTQERTCSVWSLLRAGNKAFKNLLYSSQSEAVLYPVCHVRNLMLWSAVYLPCPSPTTPVDDSCAPYPAPGTSPDDPPLSRLPKTRSYDNLTTACDNTVPLASRRCSDPSLNEKWQEHRRSLELSSLAGPGEDPLSADSLGKPTRVPGGAELSVAAGVAEGQMENILQEATKEESGVEEPAHRAGIEIQEGKEDPLLEKESRRKTPEASAIGLHQDPELGDAALRSHLDMSWPLFSQGISEQQSGLSVLLSSLQVPPRGEDSLEVPVEQFRIEEIAEGREEAVLPIPVDAKVGYGTSQSCSLLPSQVPFETRGPNVDSSTDMLVEDKVKSVSGPQGHHRSCLVNSGKDRLPQTMEPSPSETSLVERPQVGSVVHRTSLGSTLSLTRSPCALPLAECKEGLVCNGAPETENRASEQPPGLSTLQMYPTPNGHCANGEAGRSKDSLSRQLSAMSCSSAHLHSRNLHHKWLHSHSGRPSATSSPDQPSRSHLDDDGMSVYTDTIQQRLRQIESGHQQEVETLKKQVQELKSRLESQYLTSSLHFNGDFGDEVMTRWLPDHLAAHCYACDSAFWLASRKHHCRNCGNVFCSSCCNQKVPVPSQQLFEPSRVCKSCYSSLHPTSSSIDLELDKPIAATSN

SEQ ID NO: 1095 - DNA, 4283 bp, Homo sapiens
ttgcgggaaagagccaaaccctggcgttggggggcccgggcggggagcccctcccgcggtccacagcgacgcctgcccagccctcctccccttccggctccggcacggggccccgaggcgttcggaggccaggcgggtttctgtcaggcccggggaggaggggcgggcggggcggccgctgcctccccgggacgggccgtaccacgcggacggggaggacggggccaggggactgcagggcggctgcaccgcccgggggcggggtgcggagcgggccggcgggctccccggggcggggcgggagggcggggcgtggggcggacggaaccaccggggcggggtgggaggtaacgggacgggcgcgaccatggcgcggtgagggagcgggggtggggatcggtccgggggaggcctgaggccgctggcttgtgcgctgtctccgccgcccccctctttcgccgccgccgccgccgccccgggcatgtcgtccaactgcaccagcaccacggcggtggcggtggcgccgctcagcgccagcaagaccaagaccaagaagaagcatttcgtgtgccagaaagtgaagctattccgggccagcgagccgatcctcagcgtcctgatgtggggggtgaaccacacgatcaatgagctgagcaatgttcctgttcctgtcatgctaatgccagatgacttcaaagcctacagcaagatcaaggtggacaatcatctcttcaataaggagaacctgcccagccgctttaagtttaaggagtattgccccatggtgttccgaaaccttcgggagaggtttggaattgatgatcaggattaccagaattcagtgacgcgcagcgcccccatcaacagtgacagccagggtcggtgtggcacgcgtttcctcaccacctacgaccggcgctttgtcatcaagactgtgtccagcgaggacgtggcggagatgcacaacatcttaaagaaataccaccagtttatagtggagtgtcatggcaacacgcttttgccacagttcctgggcatgtaccgcctgaccgtggatggtgtggaaacctacatggtggttaccaggaacgtgttcagccatcggctcactgtgcatcgcaagtatgacctcaagggttctacggttgccagagaagcgagcgacaaggagaaggccaaggacttgccaacattcaaagacaatgacttcctcaatgaagggcagaagctgcatgtgggagaggagagtaaaaagaacttcctggagaaactgaagcgggacgttgagttcttggcacagctgaagatcatggactacagcctgctggtgggcatccacgacgtggaccgggcagagcaggaggagatggaggtggaggagcgggcagaggacgaggagtgtgagaatgatggggtgggtggcaacctactctgctcctatggcacacctccggacagccctggcaacctcctcagctttcctcggttctttggtcctggggaattcgacccctctgttgacgtctatgccatgaaaagccatgaaagttcccccaagaaggaggtgtatttcatggccatcattgatatcctcacgccatacgatacaaagaagaaagctgcacatgctgccaaaacggtgaaacacggggcaggggccgagatctcgactgtgaaccctgagcagtactccaaacgcttcaacgagtttatgtccaacatcctgacgtagttctcttctaccttcagccagagccagagagctggatatggggtcggggatcgggagttagggagaagggtgtatttgggctagatgggagggtgggagcagagtcgggtttgggagggctttagcaatgagactgcagcctgtgacaccgaaagagactttagctgaagaggagggggatgtgctgtgtgtgcacctgctcacaggatgtaaccccaccttctgcttacccttgattttttctccccatttgacacccaggttaaaaaggggttccctttttggtaccttgtaaccttttaagataccttggggctagagatgacttcgtgggtttatttgggttttgtttctgaaatttcattgctccaggtttgctatttataatcatatttcatcagcctacccaccctccccatctttgctgagctctcagttcccttcaattaaagagatacccagtagacccagcacaagggtccttccagaaccaagtgctatggatgccagattggagaggtcagacacctcgccctgctgcatttgctcttgtctggattaactttgtaatttatggagtattgtgcacaacttcctccacctttcccttggattcaagtgaaaactgttgcattattcctccatcctgtctggaatacaccaggtcaacaccagagatctcagatcagaatcagagatctcagaggggaataagttcatcctcatgggatggtgaggggcaggaaagcggctgggctcttggacacctggttctcagagaaccctgtgatgatcacccaagccccaggctgtcttagcccctggagttcagaagtcctctctgtaaagcctgcctcccactaggtcaagaggaactagagtacctttggatttatcaggaccctcatgtttaaatggttatttccctttgggaaaacttcagaaactgatgtatcaaatgaggccctgtgccctcgatctatttccttcttccttctgacctcctcccaggcactcttacttctagccgaactcttagctctgggcagatctccaagcgcctggagtgctttttagcagagacacctcgttaagctccgggatgaccttgtaggagatctgtctccctgtgcctggagagttacagccagcaaggtgcccccatcttagagtgtggtgtccaaacgtgaggtggcttcctagttacatgaggatgtgatccaggaaatccagtttggaggcttgatgtgggttttgacctggcctcagccttggggctgtttttccttgttgccccgctctagacttttagcagatctgcagcccacaggcttttttggaaggagtggcttcctgcaggtgttccacctgccttcggagcctgccacccaggccctcagaactgagccacaggctgctctggccaggagagaaacagctctgttgttctgcattgggggaggtacattcctgcatcttctcaccccctcaaccaggaactggggatttgggatgagatatggtcagacttgtagataaccccaaagatgtgaagatcgcttgtgaaaccattttgaatgaatagattggtttcctgtggctccctccaaacctggccaagcccagcttccgaagcaggaaccagcactgtctctgtgcctgactcacagcatataggtcaggaaagaatggagacggcattcttggacttcactggggctgctggattggatgggaaaccttctggaagaggcagatgggggtcaaaccactgccttggccccaggaaggggccataggtaggtctgaacaactgccgcaagaccactacatgacttagggaacttgaaaccaactggctcatggagaaaacaaatttgacttgggaaagggattatgtaggaataatgtttggacttgatttccccacgtcataatgaagaatggaagtttggatctgctcctcgtcaggcgcagcatctctgaagcttggaaagctgtcttccagcctccaaacctggccaagcccagcttccgaagcaggaaccagcactgtctctgtgcctgactcacagcatataggtcaggaaagaatggagacggcattcttggacttcactggggctgctggattggatgggaaaccttctggaagaggcagatgggggtcaaaccactgccttggccccaggaaggggccataggtaggtctgaacaactgccgcaagaccactacatgacttagggaacttgaaaccaactggctcatggagaaaacaaatttgacttgggaaagggattatgtaggaataatgtttggacttgatttccccacgtcataatgaagaatggaagtttggatctgctcctcgtcaggcgcagcatctctgaagcttggaaagctgtcttccagcagcctccgtggcctcgggttcctaccggcttctctgcatttggtctgctgatcatgttgccataatgtgtatggaaagtgtaacacattcttactggttaaagacgactaccaggtatctaacttgtttaacattga

SEQ ID NO: 1096 - protein, 416 aa, Homo sapiens
MSSNCTSTTAVAVAPLSASKTKTKKKHFVCQKVKLFRASEPILSVLMWGVNHTINELSNVPVPVMLMPDDFKAYSKIKVDNHLFNKENLPSRFKFKEYCPMVFRNLRERFGIDDQDYQNSVTRSAPINSDSQGRCGTRFLTTYDRRFVIKTVSSEDVAEMHNILKKYHQFIVECHGNTLLPQFLGMYRLTVDGVETYMVVTRNVFSHRLTVHRKYDLKGSTVAREASDKEKAKDLPTFKDNDFLNEGQKLHVGEESKKNFLEKLKRDVEFLAQLKIMDYSLLVGIHDVDRAEQEEMEVEERAEDEECENDGVGGNLLCSYGTPPDSPGNLLSFPRFFGPGEFDPSVDVYAMKSHESSPKKEVYFMAIIDILTPYDTKKKAAHAAKTVKHGAGAEISTVNPEQYSKRFNEFMSNILT

SEQ ID NO: 1097 - DNA, 1486 bp, Homo sapiens
ttgcgggaaagagccaaaccctggcgttggggggcccgggcggggagcccctcccgcggtccacagcgacgcctgcccagccctcctccccttccggctccggcacggggccccgaggcgttcggaggccaggcgggtttctgtcaggcccggggaggaggggcgggcggggcggccgctgcctccccgggacgggccgtaccacgcggacggggaggacggggccaggggactgcagggcggctgcaccgcccgggggcggggtgcggagcgggccggcgggctccccggggcggggcgggagggcggggcgtggggcggacggaaccaccggggcggggtgggaggtaacgggacgggcgcgaccatggcgcggtgagggagcgggggtggggatcggtccgggggaggcctgaggccgctggcttgtgcgctgtctccgccgcccccctctttcgccgccgccgccgccgccccgggcatgtcgtccaactgcaccagcaccacggcggtggcggtggcgccgctcagcgccagcaagaccaagaccaagaagaagcatttcgtgtgccagaaagtgaagctattccgggccagcgagccgatcctcagcgtcctgatgtggggggtgaaccacacgatcaatgagctgagcaatgttcctgttcctgtcatgctaatgccagatgacttcaaagcctacagcaagatcaaggtggacaatcatctcttcaataaggagaacctgcccagccgctttaagtttaaggagtattgccccatggtgttccgaaaccttcgggagaggtttggaattgatgatcaggattaccagaattcagtgacgcgcagcgcccccatcaacagtgacagccagggtcggtgtggcacgcgtttcctcaccacctacgaccggcgctttgtcatcaagactgtgtccagcgaggacgtggcggagatgcacaacatcttaaagaaataccaccagtttatagtggagtgtcatggcaacacgcttttgccacagttcctgggcatgtaccgcctgaccgtggatggtgtggaaacctacatggtggttaccaggaacgtgttcagccatcggctcactgtgcatcgcaagtatgacctcaagggttctacggttgccagagaagcgagcgacaaggagaaggccaaggacttgccaacattcaaagacaatgacttcctcaatgaagggcagaagctgcatgtgggagaggagagtaaaaagaacttcctggagaaactgaagcgggacgttgaggagattctcgttctgtccccaggctggagaatcgcttgaacccaggaggcggaggttgcggtgaccctccagcttgggcaacatgttatgaatgaaactccatctcaaaaaataaaaaaaaaaaaaggaagcaaaaaaaaaaaaaaaaaaaaaaaaaaaaaaaaaaaaaaaaaaaaaaaaaaaaaaaaaaaaaaaaaa

SEQ ID NO: 1098 - protein, 281 aa, Homo sapiens
MSSNCTSTTAVAVAPLSASKTKTKKKHFVCQKVKLFRASEPILSVLMWGVNHTINELSNVPVPVMLMPDDFKAYSKIKVDNHLFNKENLPSRFKFKEYCPMVFRNLRERFGIDDQDYQNSVTRSAPINSDSQGRCGTRFLTTYDRRFVIKTVSSEDVAEMHNILKKYHQFIVECHGNTLLPQFLGMYRLTVDGVETYMVVTRNVFSHRLTVHRKYDLKGSTVAREASDKEKAKDLPTFKDNDFLNEGQKLHVGEESKKNFLEKLKRDVEEILVLSPGWRIA

SEQ ID NO: 1099 - DNA, 628 bp, Homo sapiens
ggctgcgaggaccgtgggcagccagggtcggtgaaggatcccaaaatggctgggcgaaaacttgctctaaaaaccattgactgggtagcttttgcagagatcataccccagaaccaaaaggccattgctagttccctgaaatcctggaatgagaccctcacctccaggttggctgctttacctgagaatccaccagctatcgactgggcttactacaaggccaatgtggccaaggctggcttggtggatgactttgagaagaagtttaatgcgctgaaggttcccgtgccagaggataaatatactgcccaggtggatgccgaagaaaaagaagatgtgaaatcttgtgctgagtgggtgtctctctcaaaggccaggattgtagaatatgagaaagagatggagaagatgaagaacttaattccatttgatcagatgaccattgaggacttgaatgaagctttcccagaaaccaaattagacaagaaaaagtatccctattggcctcaccaaccaattgagaatttataaaattgagtccaggaggaagctctggcccttgtattacacattctggacattaaaaataataattatacaaaaaaaaaaaaaaaaaaaaaaaaaaaaa

SEQ ID NO: 1100 - protein, 161 aa, Homo sapiens
MAGRKLALKTIDWVAFAEIIPQNQKAIASSLKSWNETLTSRLAALPENPPAIDWAYYKANVAKAGLVDDFEKKFNALKVPVPEDKYTAQVDAEEKEDVKSCAEWVSLSKARIVEYEKEMEKMKNLIPFDQMTIEDLNEAFPETKLDKKKYPYWPHQPIENL

SEQ ID NO: 1101 - DNA, 2923 bp, Homo sapiens
aaggaatcaagcccccaagatggcggcagcggcggaggagcggatggcagaggaaggaggcggcggccaaggcgacggcggttcctctttggcctccggctctacccagcgacagcctccaccgcccgcgccacagcacccgcagccggggtcccaggcgctcccagcccccgcgctggctccggaccagctgcctcaaaacaacacgcttgtggcgctgcccatcgtagccatcgagaacatcctcagctttatgtcctacgacgaaattagccagctccgcctggtttgtaaaagaatggacttggtctgccagagaatgttgaatcagggatttctgaaagtggagaggtaccataatctatgtcagaaacaagttaaagcacaactcccaaggagagagtcagaaaggagaaaccattcattagctcgtcatgcagacattcttgctgctgttgaaacaaggctgtcactattaaatatgactttcatgaaatatgtggattccaatctctgttgcttcatcccaggaaaggtgattgatgagatttatcgtgtgttgagatatgtcaattctaccagagcccctcaacgagctcatgaagtacttcaagaattaagggatatatcctctatggcaatggagtactttgatgaaaagattgttccaattttaaagaggaaattaccaggatcagatgtttctggaagactcatgggctctcctccagttccaggaccgtctgcagccctaacaacaatgcagctcttctccaagcaaaatccttcaagacaagaggttaccaaactccagcagcaggttaaaacaaatggtgctggcgtgactgttctcaggcgtgaaatttctgagcttcgcaccaaagtgcaagaacagcaaaaacagcttcaagaccaggaccagaaactgctagagcagacccagatcataggtgaacaaaatgcacggttggcagagctagaacgcaaactacgagaagtaatggaaagtgctgtaggaaattcctcagggtccgggcagaatgaggagtctcctcggaaacgaaaaaaggccacggaagccatagactctcttaggaaatctaaacgtcttcggaatagaaagtaaattggaatgtggttctagttccagaggaagacacagcttagtagcttaagcagttatgcatatcaggatactgtgagcaacatggtgtcccttaagcttctaggctttcagaacacaacttaaacttgaactcttatggttgggacattcttttcctgcttctcctgattgaactgatgcacagaatctttttactttgcaatagatttgtactaaccagacctgttctatcatgttttgaggagttaacttttttctgtgcagataatgttgaaagtaagttaatttgtttctgcatatatgcacatacatacgtaaggatcttaaacccagtcttgacagactagaagttaagtttaatacagaaaatgtcctgttcacttgaaagaaaagacctactttttaaatggacactatcttggttctttttttttaagtcatctttttgttataagtgacctttgtctggaatgtctgaaaagtagttaatgctttttggtattgaagtaatgggtaactaaaatggacttccatagtattgactgtagaaggagcctctacaatattgactatatatttttataaactactggcaaggaacttacccagctgttatacatgttttcagttctctttgggggccatgtcctacatttgcatggatggatgcatgcattgcctagtcaactcacttaaaaagctcttgcactggtattgatcttgaacctctatacttctccactttttagagcggcgtcttagtttatttaaacgcttaacatcttccaccgcaacagcttgcctctagagggggaattgttcatccatttgtcctccagttttataggaacaagagactattaaagcccattgctttatctgctctctgtagggttcaggtacactggctaaggcagaaccccaaatttcaaggctctttctatcaatattggacctctgggagctaatactcctctttgctcaccaccatgtgatcattgatcagatgtggtgagtgagtaggggactcgacttgcgggatgcagttttgccattgcagcaaagttcattgaggaaaattgtaccatgaaaaagcattttgattatttcatttctggaggatgaccttgagggaagctttttaatattagtttcaagctttccttaccctacaactttaaacaaaagctttaattttgtttgcactcctattttgagcttgtaactggaaaagcatgtcttgcactgttcaacctcctgagtggtcgctttaacaacctccaaattgtgtacagtggttattttccccagttgtatagttttgagacattcaattatcactgtcttagttgtattttaatttactaaattatgtagctatctgactgttaagttcttttaaacaactgtttccttgggcttcagttatttaaagtaaatttaggtgtaatatagaaaactgtccctttccaggtgggagcttaacacctgtataaaacctaaggttttagtaagtaccttagttgaataaaagcacaaggttatcaccttttttatccgtccaccgtgacatggttatgcatcctttagattaacctcaccaaatgaagctttttctatccatttttaatattgtccttacataatattgtccttagattttgatcaattctatgtctgactttgaaataccatttacaatgtagtatgttttcaatgaaaaaccataaagtaacatccaagtgtttcatggtttgttgggaaggtaattttaaaataaaacaatttccaaaaaac

SEQ ID NO: 1102 - protein, 368 aa, Homo sapiens
MAAAAEERMAEEGGGGQGDGGSSLASGSTQRQPPPPAPQHPQPGSQALPAPALAPDQLPQNNTLVALPIVAIENILSFMSYDEISQLRLVCKRMDLVCQRMLNQGFLKVERYHNLCQKQVKAQLPRRESERRNHSLARHADILAAVETRLSLLNMTFMKYVDSNLCCFIPGKVIDEIYRVLRYVNSTRAPQRAHEVLQELRDISSMAMEYFDEKIVPILKRKLPGSDVSGRLMGSPPVPGPSAALTTMQLFSKQNPSRQEVTKLQQQVKTNGAGVTVLRREISELRTKVQEQQKQLQDQDQKLLEQTQIIGEQNARLAELERKLREVMESAVGNSSGSGQNEESPRKRKKATEAIDSLRKSKRLRNRK

SEQ ID NO: 1103 - DNA, 3615 bp, Homo sapiens
cggtcctgcctcgctgccttcagtccctagtgtctgggtccccgccctccagccgcctttgagtcgtgcctgggtcctcgcccttgcctcagaaccgcgaagaaaggaagctcgcgtgtttgctagaaaacctagttgggagtgcgaggcagagaacgttcagcacctttgttcctcccgaaccctcgggacagaggcagggttctgagggcagggattccccctcgtcttggccccaccgcccgggctgggcactaaactcgggccgcggcggggcgagcgaggcgggctccggagggagctgacgcctgatgatggcgcagtccaacatgtttaccgtggctgatgtgttgagtcaagatgaactgcgcaaaaagctataccagacgtttaaggatcggggtatactggatacactcaagacacaacttcgaaaccagctaattcatgagttgatgcaccctgtattgagtggagaactgcagcctcggtccatttcagtagaagggagctccctcttaataggcgcctctaactctttagtggcagatcacttacaaagatgtggctatgaatattcactttctgttttctttccagaaagtggtttggcaaaagaaaaggtatttactatgcaggatctattacaactcattaaaatcaaccctacttccagtctctacaaatcactggtttcaggatctgataaagaaaatcaaaaaggttttcttatgcattttttaaaagaattggcagaatatcatcaagctaaagagagttgtaatatggaaactcagacaagttcgacatttaacagagattctctggctgagaagcttcagcttattgatgatcagtttgcagatgcttaccctcagcgtatcaagttcgaatctttagaaataaagctaaatgagtataagagagaaatagaagagcaacttcgggcagaaatgtgtcaaaagttgaagttttttaaagataccgagatagcaaaaattaaaatggaagcaaaaaaaaagtatgaaaaggagttaaccatgttccagaatgattttgaaaaagcttgtcaagcaaaatctgaagctctcgttcttcgggaaaagagtacccttgaaagaattcacaagcaccaagagattgaaacaaaagaaatttatgctcaaaggcaacttttactaaaagatatggatttgctaagaggaagagaagcagagctgaagcaaagagttgaagcttttgaattgaaccagaagctccaggaagaaaaacataaaagcataactgaggcacttaggagacaggagcagaatataaagagttttgaggagacctatgaccgaaagctcaagaatgaacttctaaagtatcaacttgaactgaaggatgactacatcattagaactaatcgactgattgaagatgaaaggaagaataaagaaaaagctgttcatttgcaagaggagctcatagctattaattcaaaaaaggaggaactcaatcaatctgtaaatcgtgtgaaagaacttgagcttgaattagagtctgtcaaagcccagtctttggcaataacaaaacaaaaccatatgctgaatgaaaaggttaaagagatgagtgattattcactactaaaagaagagaaactggagcttctggcacaaaataaattacttaaacaacaactggaagagagtagaaatgaaaacctgcgtctcctaaaccgcctagctcagccggctcctgaacttgcagtctttcagaaagaactacggaaagccgaaaaggctatagtggttgagcatgaggagttcgaaagctgcaggcaagctctgcacaaacaactgcaagacgaaattgagcattctgcacagctgaaggcccagattctaggttacaaagcttctgtaaagagtttaactactcaggttgccgatttaaaattgcaactgaagcaaactcagacagccctagagaatgaagtgtactgcaatccaaagcagtctgtgatcgatcgttctgtcaatggattaataaatggcaatgtggtgccttgcaatggtgagataagtggggatttcttgaacaatccttttaaacaggaaaacgttctagcacgtatggttgcatcaaggatcacaaattatccaactgcatgggtggagggtagttcccctgattctgaccttgagtttgtagccaatactaaggcaagggtcaaagagcttcagcaagaggccgaacgcttggaaaaggctttcagaagttaccatcggagagtcattaaaaactctgccaaaagcccactagcagcaaagagcccaccatctctgcacttgctggaagccttcaaaaacattacttccagttccccggaaagacatatttttggagaggacagagttgtctctgagcagcctcaagtgggcacacttgaagaaaggaatgacgtcgtggaagcactgacaggcagtgcagcctcgaggctccgcgggggcacttcctccagacgcctctcttccacaccccttccaaaagcaaaaagaagcctcgaaagtgaaatgtatctggaaggtctgggcagatcacacattgcttcccccagtccttgtcctgacagaatgcccctaccatcacccactgagtctaggcacagcctctccatccctcctgtctccagccctccggagcagaaagtgggtctttatcgaagacaaactgaacttcaagacaaaagtgaattttcagatgtggacaagctagcttttaaggataatgaggagtttgaatcatcttttgaatctgcagggaacatgccaaggcagttggaaatgggcgggctttctcctgccggggatatgtctcatgtggacgctgctgcagctgctgtgcccctctcatatcagcacccaagtgtagatcagaaacaaattgaagaacaaaaggaagaagaaaaaatacgggaacagcaagtgaaagaacgaaggcagagagaagaaagaaggcagagtaacctacaagaagttttagaaagggaacgaagagaactagaaaaactgtatcaggaaaggaagatgattgaagaatcactgaagattaaaataaaaaaggaattagaaatggaaaatgaattagaaatgagtaatcaagaaataaaagacaaatctgctcacagtgaaaatcctttagagaaatacatgaaaatcatccagcaggagcaagaccaggagtcggcagataagagctcaaaaaagatggtccaagaaggctccctagtggacacgctgcaatctagtgacaaagtcgaaagtttaacaggcttttctcatgaagaactagacgactcttggtaaccatgtttgctgcccagcttctaacttacataccgtgagaagttacgtaacatttactcctttgtaaatgtttccctatcatcagacaaaactcaataaaaatgtgtgtaatccaatgtgggtttttttttccataattaattttgataccatagtgtgtgaaccaagaataatctagtcacgtgaaacctcttctccagtcatagtatttctcattcattataataaaagtaactggcttttaaaaaaaaaaaaaaaaaaaaaa

SEQ ID NO: 1104 - protein, 1012 aa, Homo sapiens
MMAQSNMFTVADVLSQDELRKKLYQTFKDRGILDTLKTQLRNQLIHELMHPVLSGELQPRSISVEGSSLLIGASNSLVADHLQRCGYEYSLSVFFPESGLAKEKVFTMQDLLQLIKINPTSSLYKSLVSGSDKENQKGFLMHFLKELAEYHQAKESCNMETQTSSTFNRDSLAEKLQLIDDQFADAYPQRIKFESLEIKLNEYKREIEEQLRAEMCQKLKFFKDTEIAKIKMEAKKKYEKELTMFQNDFEKACQAKSEALVLREKSTLERIHKHQEIETKEIYAQRQLLLKDMDLLRGREAELKQRVEAFELNQKLQEEKHKSITEALRRQEQNIKSFEETYDRKLKNELLKYQLELKDDYIIRTNRLIEDERKNKEKAVHLQEELIAINSKKEELNQSVNRVKELELELESVKAQSLAITKQNHMLNEKVKEMSDYSLLKEEKLELLAQNKLLKQQLEESRNENLRLLNRLAQPAPELAVFQKELRKAEKAIVVEHEEFESCRQALHKQLQDEIEHSAQLKAQILGYKASVKSLTTQVADLKLQLKQTQTALENEVYCNPKQSVIDRSVNGLINGNVVPCNGEISGDFLNNPFKQENVLARMVASRITNYPTAWVEGSSPDSDLEFVANTKARVKELQQEAERLEKAFRSYHRRVIKNSAKSPLAAKSPPSLHLLEAFKNITSSSPERHIFGEDRVVSEQPQVGTLEERNDVVEALTGSAASRLRGGTSSRRLSSTPLPKAKRSLESEMYLEGLGRSHIASPSPCPDRMPLPSPTESRHSLSIPPVSSPPEQKVGLYRRQTELQDKSEFSDVDKLAFKDNEEFESSFESAGNMPRQLEMGGLSPAGDMSHVDAAAAAVPLSYQHPSVDQKQIEEQKEEEKIREQQVKERRQREERRQSNLQEVLERERRELEKLYQERKMIEESLKIKIKKELEMENELEMSNQEIKDKSAHSENPLEKYMKIIQQEQDQESADKSSKKMVQEGSLVDTLQSSDKVESLTGFSHEELDDSW

SEQ ID NO: 1105 - DNA, 2918 bp, Homo sapiens
gaggagctctcctgggcggctgaagaaggagcttcttctccggagtgcgaaggcggtggcgcctgcggacctaactagctccaggttaggccgagctttgcgggaaagcagcggacttgaaaatactggaaatctgtccggatccaaattattttgcaagccagatgagtaaccagagggcatgaaaggttgagaacatttgacttccctgcaaaccttggtatagatcacttccttttctgtaggaaaggaaaggcaccaaagagcacaatgagtacaagaaagcgtcgtggtggagcaataaattctagacaagctcagaagcgaactcgggaagcaacctccacccccgagatctccttggaagcagaacccatagaactcgtggaaactgctggagatgaaattgtggacctcacttgtgaatctttagagcctgtggtggttgatctgactcacaatgactctgttgtgattgttgacgaaagaagaagaccaaggaggaatgctaggaggctgccccaggaccatgctgacagctgtgtggtgagcagtgacgatgaggagttgtccagggacagagacgtatatgtgactacccatactcccagaaacgccagggatgagggcgctacaggcctcaggccctcaggtactgtcagttgtcccatctgcatggacggatactcagagatcgtgcagaatggacgtctcatcgtttccacagaatgcggccatgtcttctgtagccagtgcctccgtgattccctgaagaatgctaatacttgcccaacttgtaggaaaaagatcaaccacaaacggtaccaccccatttatatatgaagtattcagagccccccaggagagacggatggacagacagacagccaggttctccagtggtatctgcctccattttcctgagatcaaaaagactgtttcgaaaccaacatctgatatgtaaactgctcttttgtttccaaccccttccttttgttatctccagtttgatgctatggcgctggacccagggccctcccaggccatctctgttcctctggggtggtccagttctagagtgggagaaagggagtcaggcgcattgggaatcgtggttccagtctggttgcagaatctgcacatttgccaagaaattttccctgtttggaaagtttgccccagctttcccgggcacaccaccttttgtcccaagtgtctgccggtcgaccaatctgcctgccacacattgaccaagccagacccggttcacccagctcgaggatcccaggttgaagagtggccccttgaggccctggaaagaccaatcactggacttcttcccttgagagtcagaggtcacccgtgattctgcctgcaccttatcattgatctgcagtgatttctgcaaatcaagagaaactctgcagggcactcccctgtttcctaagaacgaaaaagtgcaataaaggccattcgttacctacttttcagcagcccacaagatgtagcactattagtgtccccctcagaggcttaatgttgcctgtggagcagtgcccatcccagcccgtttctgcccaccagttgttctcaggaaccttacccatgctccagcgtccttcacctggcacaggacatgcaagataaatagggcaggcacgtgtttgggtgtcctctcttttctgataaaatccatcccgtgtttgccacacgccctccagtcctcagttcccactgcctaacgtctgcccccgtgtagatactgagaggtggtggcagtaattgtggccttatcagccgctcagttccaggcttttgcccaggtcactgttgccccatgttcggagaacctggcccacctgtcttggctttctcatccttcccaacccagtgccgtttatttcagaagcttcctggccactgggcttggatgcttcgggcttctgactgctccataggttttgactggtgaaacaggggcccagatgacaacctctccttcgctccacaggtacgcgggagcctcaggttctctcaggggcagcaaagtggcccaagctgcccctgacagcacagggcctgggggtggctaacgagagaggccttacagtgccggcatgcctcctcttccactgtcgtccttcctcagagggcctcacgccaaacaaacggccttttcgtgtgaaacatcttcagggcgggaaaggggccacttctggctttgttagcaataactgaccttcagtttacccttctgaaggagcagggactcagcacagaattcactttagacggggctgaaggagtgtccctcctctatgtgaaaagaaaattgttttattcttcattctgactttttaactgtttggctcacttccagttagtttgaatgaaaataataattttctacttggagttgaagagggcagaatccgcagctctcatcattgtgatgtgtagcatgtctgccctctgactggacatcattgccattaactttcttctgggcatcacggcagtgtcacgatgcccagacttggagcaaggcaaccttggagtcagtccactcataaaatatggtaacacccattttaaaatttaagttttgtccttaaagacaacttcagtggttaattataaaagttgtgttacttcgtcctaaattaaattgatagaaagatttaaaaatgtgttttgtttctactattcagaaactgcgaactagggaaaggttggtatgaaaaaatgtctttccttttttcaatgtacatagttcaactctttctttgttacatttaaactatatccatggatatcagtctgctttggactcctctgctagtgttacagatggaaataaaaccattaatttgaaccaaaaaaaaaaaaaaaaaaaaaaaaaaaaaaaaaaaaaaaaa

SEQ ID NO: 1106 - protein, 190 aa, Homo sapiens
MSTRKRRGGAINSRQAQKRTREATSTPEISLEAEPIELVETAGDEIVDLTCESLEPVVVDLTHNDSVVIVDERRRPRRNARRLPQDHADSCVVSSDDEELSRDRDVYVTTHTPRNARDEGATGLRPSGTVSCPICMDGYSEIVQNGRLIVSTECGHVFCSQCLRDSLKNANTCPTCRKKINHKRYHPIYI

SEQ ID NO: 1107 - DNA, 6722 bp, Homo sapiens
ggcacggggacatcaggatatcctgagtgtgtctgcagatggtggcatcgtgatgggctattctagtggcgtcaccaatgggctgaatgatgccagcgactccatctacacgaaaggcaccccggagattgctttctggggaagcaatgctggggtgaaaacaacacggctagaagctcattctgaaatggggagcactgaaattttggaaaaggagaccccagaaaatctcagtaatggtaccagcagcaatgtggaagcagccaaaaggttggccaaacgcctttatcagctggacagattcaaaagatcagatgttgcaaaacaccttggcaagaacaacgaatttagcaaactagttgcagaagaatatctgaagttttttgattttacaggaatgacgctggatcagtcactcaggtatttctttaaagcattctctcttgtgggagaaactcaagaacgagagagagttttaatacacttctccaatagatatttttattgtaacccagataccattgcttcacaagatggagtccattgccttacctgtgcaataatgcttcttaataccgatctacatggccacgtgaatattggaaagaagatgacctgtcaggagttcattgcaaatctgcaaggggtaaatgagggtgttgatttctccaaggatctgctgaaagctctgtacaactcaatcaagaatgagaagcttgaatgggcagtagatgatgaagagaaaaaaaagtctccctcagaaagtactgaggagaaagctaacggaacacatccaaagaccatcagtcgtattggaagtactactaacccatttttggacattcctcatgatccaaatgctgctgtgtacaaaagtggattcttggctcggaaaattcatgcagatatggatggaaagaagactccaagaggaaaacgaggatggaaaaccttttatgctgtactgaagggaacagttctttacttgcaaaaggatgaatacaagccagaaaaggccttgtctgaagaggacttgaaaaacgctgtgagtgtgcaccacgcattggcatccaaggccacggactatgagaagaaaccaaacgtgtttaaacttaaaactgccgactggagggtcttgctttttcaaactcagagcccagaggaaatgcaagggtggataaacaaaatcaattgtgtggcagctgtattttctgcaccaccatttccagcagcaatcggctctcagaagaagtttagccgcccacttctgcctgccactacaacaaaactgtctcaggaggagcaactgaagtcacatgaaagtaagctgaagcagatcaccaccgagctggccgagcaccgctcatatccccccgacaagaaggtcaaagccaaggacgtcgatgagtacaaactgaaagaccactatctggagtttgagaaaacccgctatgaaatgtatgtcagcattctcaaggaaggaggcaaagagctactgagtaacgatgaaagcgaggctgcaggactgaagaagtcgcactcgagtccttcgctgaacccggatacttctccaatcactgccaaagtcaagcgtaacgtgtcagagaggaaggatcaccgacctgaaacaccaagcattaagcaaaaagttacttagagtccatctgcggccaggaagtgctggtcatggagcaaaatagggtttttcaagatctttctggtaatccgtgaatatatttaaaaaaaaaaaagtctgtgacaaaacggtgcattagtaattttttctattgtatatttttgttagtttctgtacagattgtctttgctcttgatttcttttgctttgatgatttttgcaacttgatagctaatgcaccttttctgtgaggaggaggggatcgtgatttcagaatgaattatgtatcccttctcttttggttttctcttgtttgcagtctgctcagttgttttatgtattctcatatcaactgttaaacttttttttaaggttaaagaatttaatccattgtgaaacacttaactggacaaactgtagttttagtaaattctagctggagttaatatacgcctttatatgtgaaatcttgcccagtcacagaggtagaattgagcactcacagatgctccagtaagaatcacagtgctgggaatctagttgctccaatatgaggcagcttcatgtgcagcttagcacttgttgttgagatcggaccctgctggaagcagggaaaagaagcgtgaagatcgtaggattgagaacttagggaagcacattagcttgcttgaagtgctgattccatttcagccaagcaagggaaagaggaagtggagtcattttgcctttgaaggctgaggaaagattgatacccagttaattttgtttgctaaaggatgggggcaataatcggcccttgaggagctgcagcagtaggcatgtgctcagtctgcaggaattgttacctcactcccacagggtctagactagaaatccatcatctctatcgttgatatccttccatccaggaatagatttttcttactctacatatgtgtgtgtgcgtgcgtgtgtgtgcgtgtgtgggcatggggttgtgtcctggttgtgatattgaggtcttccttcctaacaaattaatactaaaatgaaacagcttttcttgtgtccttaagacaaaataaggaaggaaaacgtagctgcagttgtccacgatggatattggttctttaaaatatatctgaaagtagtagtcagaatgaattatggttggaaaactgaggaatcttctggttgcaggtgcaaagtgactttgtttattcttgtctcagtctccttgatagccacttcactctgctactactcaactttctcctaaaaatacttcatctattttcagtcctttctttctgtctactcaaaatggttctattaactttgcagtcatgagcttgttccagttacagtccctttgaagttcagggtgataaacagaatattcttctgtagaggaagagaaaggagtgaaagtttagcccactgagacctagagctttgtgatttcctaaccttgaaactctgtaatccctaaagttaaaatctccgcaagtggcacaacttcagaactaatagtatcactttgatttttctttttcctcccttagaaagtttctctagttctatagtttatttgttgaaggtactatgaccaaagaatcagctgctctacaggaatagcatggttccagtgaattagagaaaacctgctgtaaagccatggtagtgtctaagtggtatgttattatgatgtactagcatttatttacagaattatttattaacgtttacttccttcccctctgtaaatgtccatgactattgcccagagaaggcttacccctctctagggttgcagttgctttctttgtaataagtattttgccacacctgtaaaaaaaaaaaacctcacttttaactctctgccttgtttgggtaaaggcagtaactaagtttatgtttcagaactgcaaaacaaacaggatagttaccaatatggcccatgtgtcagattgatttttgtagcctctcactgaatccaacatatccacaagcaagttatctgtctttctacctgataatctaaattatcaggatatttgttttctgcctaaatgtttatactaagccgaggggagagaggtacctagaccatgtcatctacgagcttcagtaactaaagaaaaaggaacttccctgagtggcttgaatgtgtttgcccacagtctatatctatgtatatagaatgtctgtatgtattttacttatttaatatacattgaatggtaccttgctacagtatttctgacatttagagtagtgttgaaatactcggctagcatcagcaccactatagcactgtccgtgtcatatgagtcactaatattaactccagggacttctggataggctaatagatcattggatacgaagggctcttttgaagcttcagtataccatgtttgcatagtttatctttaaaaacaactttaaaggttcttttgtgagccaggatctcagactgccgtagcatgatgctgtccatctttagcgcatgggctgagaacacctcttccctgaggcttctgaaggttgctgtctgtcatgagtgcatgaaggaggccaagagtttatgctatgggaggaaccagtcactgatttgcctagattctgagagtctggcccatagccaaccacattttcctttgggataatttatttcctgtggcatctagccagaagaaattgaggatgtttcctttcacagctgctccaagcctgttgcccaattcacggtacaagggagcaccccttccctttcctctgaaggtacgccacccacctccgtcgcccacctcagcgcccaggagccttgggacttccttccatatgataaatcattcttcttcacgtcaatacacttcatattaatttctagtacagaaaatcttgacagctatcagaatgccttggtcatagtgttgttgcaaaattgaccatacaggtggcccatgtataaaatctgaattttaggggtttgtccccacctcgcatgctggcttttacagggaggtgtctgggattcctcattagcaatcaaaacttaattactgggatgcagagtccttactttatcgccagcccgtaggcatttctgaagtgcacttttttgaaacatcattttgctaactctcagcagtgtctaattaaactgagcaatacttttgtgaattttaattaatctcagcaaaaccatgatgggagagagtcctctgatggaaatgtagtccctggattatgtgtaacctttttattgctcttagatgcagaggatagaaagcattttttggtgcagtggtcttgtggcaaacacaagaccctctatgcgtctccaactgttatcctaatctagaaaatgaggactggcccctgggcaaaagtgacatgaggaatttactctggaagaggaaaatctgggtggctttccaaggctaagataggtttgtatttcaccctgtggccaagctacagaacttctgagattgtggaagaatttttgcaaccagcagggaaagaggcctcttactgcctaaacacaaagttacactgagcttttctactgtcctttgcctattgctccctctatcatgtaaagatctgggaaggatgagaggcagggcctgcttgtcatgagctgcactcttttctttttaactaatcattgacaattggaagaaaattgacgttaaagaagtttctccattgtcttactaacaaaaccttttgggtttcattaattgtccttgaaattgagttcctttggcatttttccttgcagtcatcagttaagcatgttgcatcctgaattcacagaagtttagctttgcaggtttgaatctctgtaatttaactcccgtggacttggtcgagttttcagcaggttgggagccacctctcttcatttcagcagtgagtcatcccttgacttttcaaatgacagaattttttccaattgtaaaattagcactgtaaaacaaagaaccaaagtggcatcctaagagttgttaaacctgaagtctagtttatgaggaattgtccaagttggagtttaaatagtatctgcttttgtctcaaagcatctaagttattctgacagaaaatggtaagtcagctttgcaggcagatgcgcctctgggcctcctaccttgctccacagctttctggccatcttgtctcccaggccatgccactgctctgccacatgtcagcaaatttctttccaccagtcttatagcatcttacatgatcaaatcatcacagaataaccccgtgatagattattgatagcaatagagaggggcggctttgtcactgatttttctctcagattccttttccatctctcatccataaaggaaggactgaaatccaaaggcattctccttttgtacctacagtatccagaacccacgtgggcagccttctgcttatgacaataattggcccattgcatgcagagagaatgtcttcatagagagaatgtcattaaatacttgaatctgcatgacagtttgacttgaatgcaacagcaggaaaattttgcaagttacataattgtatatacagtaggttttcttaagtctcttcggttcatcctttgtaatttgtgtgtgtatctgtagtattgcaggcttttggagactattcttacaggcagtatgtcagtcatcaaagaaaatgctgtcacctgccattgttgtatttgtgggtatttatagttgtatgtatgtaaatgcatcagtgtgtagattgcatatcagtgtatggtacatgtacatcaaaattatttttgtccttaatcagtgtgatatgaaaagcaagtacaacctcataggactgattatataatgaagttgttgagagtatatatagtggtattgttttattaaacttaaactcaaataatattttgattaaaatttttaataagactttatgctagaaaattctttgagctttgaatcaccagggcaaaaatgactttcaactaaccttgtgaatcttttgcagtgtactgtgtgcaataccaagggcatagctccctgtaatttgggaaatacagaaagaaaagaaaaaaaaaaaaaaaaaa

SEQ ID NO: 1108 - protein, 534 aa, Homo sapiens
MGYSSGVTNGLNDASDSIYTKGTPEIAFWGSNAGVKTTRLEAHSEMGSTEILEKETPENLSNGTSSNVEAAKRLAKRLYQLDRFKRSDVAKHLGKNNEFSKLVAEEYLKFFDFTGMTLDQSLRYFFKAFSLVGETQERERVLIHFSNRYFYCNPDTIASQDGVHCLTCAIMLLNTDLHGHVNIGKKMTCQEFIANLQGVNEGVDFSKDLLKALYNSIKNEKLEWAVDDEEKKKSPSESTEEKANGTHPKTISRIGSTTNPFLDIPHDPNAAVYKSGFLARKIHADMDGKKTPRGKRGWKTFYAVLKGTVLYLQKDEYKPEKALSEEDLKNAVSVHHALASKATDYEKKPNVFKLKTADWRVLLFQTQSPEEMQGWINKINCVAAVFSAPPFPAAIGSQKKFSRPLLPATTTKLSQEEQLKSHESKLKQITTELAEHRSYPPDKKVKAKDVDEYKLKDHYLEFEKTRYEMYVSILKEGGKELLSNDESEAAGLKKSHSSPSLNPDTSPITAKVKRNVSERKDHRPETPSIKQKVT

SEQ ID NO: 1109 - DNA, 2504 bp, Homo sapiens
tcccggcgggctgtgcggcccggctctccggcggcagcgagtgccacgtcccaagtgctacgcggaggattagagcaggcggtgcgctgggggcgggagcagcgcggagcccggctcggccacaccgatcgcccgccgccatgggctcctcgcaaagcgtcgagatcccgggcgggggcaccgagggctaccacgttctgcgggtacaagaaaattccccaggacacagagctggtttggagcctttctttgattttattgtttctattaatggttcaagattaaataaagacaatgacactcttaaggatctgctgaaagcaaacgttgaaaagcctgtaaagatgcttatctatagcagcaaaacattggaactgcgagagacctcagtcacaccaagtaacctgtggggcggccagggcttattgggagtgagcattcgtttctgcagctttgatggggcaaatgaaaatgtttggcatgtgctggaggtggaatcaaattctcctgcagcactggcaggtcttagaccacacagtgattatataattggagcagatacagtcatgaatgagtctgaagatctattcagccttatcgaaacacatgaagcaaaaccattgaaactgtatgtgtacaacacagacactgataactgtcgagaagtgattattacaccaaattctgcatggggtggagaaggcagcctaggatgtggcattggatatggttatttgcatcgaatacctacacgcccatttgaggaaggaaagaaaatttctcttccaggacaaatggctggtacacctattacacctcttaaagatgggtttacagaggtccagctgtcctcagttaatcccccgtctttgtcaccaccaggaactacaggaattgaacagagtctgactggactttctattagctcaactccaccagctgtcagtagtgttctcagtacaggtgtaccaacagtaccgttattgccaccacaagtaaaccagtccctcacttctgtgccaccaatgaatccagctactacattaccaggtctgatgcctttaccagcaggactgcccaacctccccaacctcaacctcaacctcccagcaccacacatcatgccaggggttggcttaccagaacttgtaaacccaggtctgccacctcttccttccatgcctccccgaaacttacctggcattgcacctctccccctgccatccgagttcctcccgtcattccccttggttccagagagctcttctgcagcaagctcaggagagctgctgtcttccctcccgcccaccagcaacgcaccctctgaccctgccacaactactgcaaaggcagacgctgcctcctcactcactgtggatgtgacgccccccactgccaaggcccccaccaccgttgaggacagagtcggcgactccaccccagtcagcgagaagcctgtttctgcggctgtggatgccaatgcttctgagtcaccttaactttgaaccattctttggaattggcgtggtatatttaaccacgggagcgtgtctggaaacgcaaactatcattaatttcatactagtttgtaccgtatctgtaggcatcctgtaaataattccaaggggaaaactaaacgaggacgtgggttgtatcctgccaggttgagtggggctcacacgctagggtgagatgtcagaaagcgcttgtattttaaacaaccaaaaagaattgtaagggtggcttgctgccaggcttgcactgccgttcctgggggtgtgcatcttcgggaaaggtggtggcggggcgtccactaggtttcctgtcccctgctgctccttccgtaagaaaatgaaatattctatgcctaatactcacacgcaacatttcttgtactttgtaagtcgtttgcgagaatgcagaccacctcactaaactgtaaacggtaaagagatttttacttttggtctccgtgagtcgcatctctactaaggtttacacaggaattccacctgaagacttgtgttaaagttctacagcgcgcactgttaactgaacgtctttttcttcagcctatacgcggatccttgttttgagctctcagaatcactcagacaacattttgtaactgctgctgttgctttctacatacaccttataaagtgacatttcaaaagaaataaggtgccacagttttaaaccagaaggtggcactctgtggctccttgtagtattatagctatactgggaaagcatagatacagcaataaagtacagtaattttactttttttcttgtgttacatctaaattacaacccttaattgccacgtgtgcacttactactctccagtatgtcttattactctccagtatgtcacgcatctttaacttttcacgtcctatgtttgctttctcccatttttaagagatggtaagttaactggaattgatttactgaatgaaattaaatgcagatatccctgtttttgaaataagaaaaaa

SEQ ID NO: 1110 - protein, 452 aa, Homo sapiens
MGSSQSVEIPGGGTEGYHVLRVQENSPGHRAGLEPFFDFIVSINGSRLNKDNDTLKDLLKANVEKPVKMLIYSSKTLELRETSVTPSNLWGGQGLLGVSIRFCSFDGANENVWHVLEVESNSPAALAGLRPHSDYIIGADTVMNESEDLFSLIETHEAKPLKLYVYNTDTDNCREVIITPNSAWGGEGSLGCGIGYGYLHRIPTRPFEEGKKISLPGQMAGTPITPLKDGFTEVQLSSVNPPSLSPPGTTGIEQSLTGLSISSTPPAVSSVLSTGVPTVPLLPPQVNQSLTSVPPMNPATTLPGLMPLPAGLPNLPNLNLNLPAPHIMPGVGLPELVNPGLPPLPSMPPRNLPGIAPLPLPSEFLPSFPLVPESSSAASSGELLSSLPPTSNAPSDPATTTAKADAASSLTVDVTPPTAKAPTTVEDRVGDSTPVSEKPVSAAVDANASESP

SEQ ID NO: 1111 - DNA, 1714 bp, Homo sapiens
cggacgcgtgggctcggccgcccctgtggtgtgaggcgcgtgttcgggctcttgccgtccccgcacccgcaccgcggttactggcttgcggtccgccgttcgacaaccagcccttgggtccccgcccgccacggacatgccgcgcgtctacataggacgcctgagctacaacgtccgggagaaggacatccagcgctttttcagtggctatggccgcctcctcgaagtagacctcaaaaatgggtacggcttcgtggagttcgaggactcccgcgacgccgacgacgccgtttacgagctgaacggcaaggagctctgcggcgagcgcgtgatcgtagagcacgcccggggcccgcgtcgcgatcgcgacggctacagctacggaagccgcagtggtggaggtggatacagcagtcggagaacatctggcagagacaaatacggaccacctgttcgtacagaatacaggcttattgtagaaaatctttctagtcggtgcagttggcaagatttaaaggattttatgcgacaagcaggtgaagtaacctatgcggatgcccacaaggaacgaacaaatgagggtgtaattgagtttcgctcctactctgacatgaagcgtgctttggacaaactggatggcacagaaataaatggcagaaatattaggcttattgaagataagccacgcacaagccataggcgatcttactctggaagcagatccaggtctcgatctagaagacggtcacgaagtaggagtcgcaggagcagccgcagtagatctcgaagtatctcaaaaagtcgctcccgttccaggtcgcggagcaaaggtcgatcacgttctcgatcaaaaggcaggaaatctagatcaaagagcaaatctaagcccaagtctgatcggggctcccattcacattctcgaagcagatctaaggatgagtatgagaaatctcgaagcaggtctcggtcccgatcccccaaagaaaatggaaagggtgatataaagtcaaaatccagatcaaggagccagtcccgttccaattcgccgctacctgttccaccctcaaaggcccgttctgtgtcccctccaccaaaaagagctacttcaagatcccgttctagatctcgctcaaagtcaagatcaaggtccaggtcgagttccagagattaactcagaactccttgtttgcacattattatggaacactttcctacttaggcagttactcttccatgtttatacttggcctcttctgcaagaggaatctcttgaaaacaggggcacacagaaatttgatttgtggccaaattggatgaaaaagatgaggctctaaggaaatggtggcatgaagaccctctcccttctttgtagaattaagataactttgattttatagcttttgagctaacgtaacttttgtaaagattaagctcatttagtgttgttttttttttttttttttttttttttttttagtatttcagcaggatctgctggcagggtttttttgttttatttgtttgcttatttttaaattaactgttttgagctttgaatacttaaggctttagagggagaacccaattttcaattatgttggctttttataaagcttgagttatgtaagatttaaataaaagtttgctaccaaaaaaaaaaaaaaaaaaaaaaaaaaaaaaaaaaaaaaaaaaaaaaaaaaaaaaaaaaaaaaaa

SEQ ID NO: 1112 - protein, 344 aa, Homo sapiens
MPRVYIGRLSYNVREKDIQRFFSGYGRLLEVDLKNGYGFVEFEDSRDADDAVYELNGKELCGERVIVEHARGPRRDRDGYSYGSRSGGGGYSSRRTSGRDKYGPPVRTEYRLIVENLSSRCSWQDLKDFMRQAGEVTYADAHKERTNEGVIEFRSYSDMKRALDKLDGTEINGRNIRLIEDKPRTSHRRSYSGSRSRSRSRRRSRSRSRRSSRSRSRSISKSRSRSRSRSKGRSRSRSKGRKSRSKSKSKPKSDRGSHSHSRSRSKDEYEKSRSRSRSRSPKENGKGDIKSKSRSRSQSRSNSPLPVPPSKARSVSPPPKRATSRSRSRSRSKSRSRSRSSSRD

SEQ ID NO: 1113 - DNA, 2772 bp, Homo sapiens
atggaaggagcaaagccgacattgcagctcgtgtaccaggcagtgcaggcgctttaccacgacccagatcccagcggaaaggagcgcgcctctttttggcttggggagctgcagcgttcggttcatgcatgggagatctcagaccagttgttacagatccggcaggatgtggagtcatgctattttgctgcacagaccatgaaaatgaagattcagacctcattttatgagctccccacagactctcatgcctctttacgggactcattgctaacccatatccagaacttgaaagacttgtcacctgttattgtaacgcagctggctttagcaatagcagatcttgccctacagatgccttcctggaagggatgtgtgcaaacactggtggaaaaatacagcaatgatgtgacttctttgccttttttgctggagatccttacagtgttacctgaagaagtacatagtcgttccttacgaattggagctaatcggcgcacagaaattatagaagatttggccttctactctagtacagtagtatctctattgatgacctgtgtagaaaaagcaggaacagatgagaaaatgcttatgaaggtttttcgctgtttgggaagttggtttaacttgggagttttggacagtaacttcatggctaacaataaattactagcactcctttttgaggttttgcaacaggataagacctcgtctaacctacatgaagctgcttcggactgtgtatgctcagctctctatgccattgagaatgtggagactaacttgccattagccatgcaactttttcagggagtgctgacattggagactgcctatcatatggccgtggcacgtgaagatttagacaaagttctgaattactgccgtattttcactgaactatgtgaaacttttcttgaaaaaattgtttgtactccaggccaaggtcttggggaccttcgaactctggagctgctgcttatctgtgcaggccatcctcaatatgaggtagtagaaatttcatttaacttttggtaccgactgggggaacatttgtacaaaactaacgatgaagttattcatggcatcttcaaagcttacattcagaggctgcttcacgccttggctcgacactgccagctggaaccagaccatgagggggttcctgaggagactgatgactttggggagtttcgcatgagggtatcagacctggtaaaggacttgattttcttgatagggtctatggagtgttttgctcagttatattctactctgaaagaaggcaacccaccctgggaggtgacagaagcggttctctttatcatggctgctatagcaaagagtgttgatccggaaaacaatccaacacttgtggaagtcctagaaggagttgtccgcctcccggagaccgtacatacggctgtgcgatacaccagcattgaattggttggagagatgagtgaagtcgttgatcgaaatcctcagttccttgaccctgtgttgggctatttgatgaaaggcctgtgtgaaaagcccctggcttctgctgcagccaaagccattcataacatttgctctgtctgccgagatcacatggctcagcactttaatggactcctggagattgcccgctccctcgattccttcctgttgtctccagaagctgctgtgggcttgctaaaagggacagcacttgtcctagcccgattacctttggataagattaccgaatgtcttagtgaactatgttctgttcaggttatggcattgaaaaagctgttgtctcaagagcccagcaatggcatatcctcagatcccacagtgttcttagatcgccttgcagtgatatttaggcataccaatcccattgtggaaaatggacagactcatccgtgtcagaaagtcatacaggaaatatggccagttttatccgagactctaaataagcaccgagctgataatcggattgtagagcgttgttgcaggtgcctgcgctttgctgttcgctgtgtaggcaaaggatctgcagcactgctgcagccactagtcacacagatggtgaatgtgtaccacgtacatcagcattcctgcttcctgtaccttggcagtatccttgtggatgaatatggcatggaagaaggctgtcggcagggactgctagacatgctccaggcactgtgcatccccacctttcagctcctagaacagcagaatggtctccagaatcaccctgacactgtagatgacctgttccggctagccaccaggtttattcagcgtagccctgtcaccttgctgcggagccaagtggtcatccctatcttacagtgggccattgcctctactaccctggaccaccgggatgccaattgtagtgtcatgaggtttctacgagacctcattcatacaggggtagccaatgatcatgaagaagactttgaattacggaaagaactgattggacaggtgatgaaccagcttggacagcagcttgtcagccagctgctgcacacctgctgcttttgcctccccccctataccctaccagatgtggctgaagtgctctgggagatcatgcaggttgacagaccgactttttgtcgatggttagaaaattccttaaaaggtttgccaaaggaaacaaccgtgggagctgtcacagtgacacacaaacaacttacagacttccacaagcaagtcactagtgctgaggaatgtaaacaagtttgctgggccttgcgagacttcaccaggttgtttcgatag

SEQ ID NO: 1114 - protein, 923 aa, Homo sapiens
MEGAKPTLQLVYQAVQALYHDPDPSGKERASFWLGELQRSVHAWEISDQLLQIRQDVESCYFAAQTMKMKIQTSFYELPTDSHASLRDSLLTHIQNLKDLSPVIVTQLALAIADLALQMPSWKGCVQTLVEKYSNDVTSLPFLLEILTVLPEEVHSRSLRIGANRRTEIIEDLAFYSSTVVSLLMTCVEKAGTDEKMLMKVFRCLGSWFNLGVLDSNFMANNKLLALLFEVLQQDKTSSNLHEAASDCVCSALYAIENVETNLPLAMQLFQGVLTLETAYHMAVAREDLDKVLNYCRIFTELCETFLEKIVCTPGQGLGDLRTLELLLICAGHPQYEVVEISFNFWYRLGEHLYKTNDEVIHGIFKAYIQRLLHALARHCQLEPDHEGVPEETDDFGEFRMRVSDLVKDLIFLIGSMECFAQLYSTLKEGNPPWEVTEAVLFIMAAIAKSVDPENNPTLVEVLEGVVRLPETVHTAVRYTSIELVGEMSEVVDRNPQFLDPVLGYLMKGLCEKPLASAAAKAIHNICSVCRDHMAQHFNGLLEIARSLDSFLLSPEAAVGLLKGTALVLARLPLDKITECLSELCSVQVMALKKLLSQEPSNGISSDPTVFLDRLAVIFRHTNPIVENGQTHPCQKVIQEIWPVLSETLNKHRADNRIVERCCRCLRFAVRCVGKGSAALLQPLVTQMVNVYHVHQHSCFLYLGSILVDEYGMEEGCRQGLLDMLQALCIPTFQLLEQQNGLQNHPDTVDDLFRLATRFIQRSPVTLLRSQVVIPILQWAIASTTLDHRDANCSVMRFLRDLIHTGVANDHEEDFELRKELIGQVMNQLGQQLVSQLLHTCCFCLPPYTLPDVAEVLWEIMQVDRPTFCRWLENSLKGLPKETTVGAVTVTHKQLTDFHKQVTSAEECKQVCWALRDFTRLFR

SEQ ID NO: 1115 - DNA, 1268 bp, Homo sapiens
ggcacgagggtggtcttgcgagtggagtgtccgctgtgcccgggcctgcaccatgagcgtcccggccttcatcgacatcagtgaagaagatcaggctgctgagcttcgtgcttatctgaaatctaaaggagctgagatttcagaagagaactcggaaggtggacttcatgttgatttagctcaaattattgaagcctgtgatgtgtgtctgaaggaggatgataaagatgttgaaagtgtgatgaacagtgtggtatccctactcttgatcctggaaccagacaagcaagaagctttgattgaaagcctatgtgaaaagctggtcaaatttcgcgaaggtgaacgcccgtctctgagactgcagttgttaagcaaccttttccacgggatggataagaatactcctgtaagatacacagtgtattgcagccttattaaagtggcagcatcttgtggggccatccagtacatcccaactgagctggatcaagttagaaaatggatttctgactggaatctcaccactgaaaaaaagcacacccttttaagactactttatgaggcacttgtggattgtaagaagagtgatgctgcttcaaaagtcatggtggaattgctcggaagttacacagaggacaatgcttcccaggctcgagttgatgcccacaggtgtattgtacgagcattgaaagatccaaatgcatttctttttgaccaccttcttactttaaaaccagtcaagtttttggaaggcgagcttattcatgatcttttaaccatttttgtgagtgctaaattggcatcatatgtcaagttttatcagaataataaagacttcattgattcacttggcctgttacatgaacagaatatggcaaaaatgagactacttacttttatgggaatggcagtagaaaataaggaaatttcttttgacacaatgcagcaagaacttcagattggagctgatgatgttgaagcatttgttattgacgccgtaagaactaaaatggtctactgcaaaattgatcagacccagagaaaagtagttgtcagtcatagcacacatcggacatttggaaaacagcagtggcaacaactgtatgacacacttaatgcctggaaacaaaatctgaacaaagtgaaaaacagccttttgagtctttctgatacctgagtttttatgcttataatttttgttctttgaaaaaaaagccctaaatcatagtaaaacattataaactaaaaaaaaaaaaaaaaaaaaaaaa

SEQ ID NO: 1116 - protein, 374 aa, Homo sapiens
MSVPAFIDISEEDQAAELRAYLKSKGAEISEENSEGGLHVDLAQIIEACDVCLKEDDKDVESVVNSVVSLLLILEPDKQEALIESLCEKLVKFREGERPSLRLQLLSNLFHGMDKNTPVRYTVYCSLIEVVASCGAIQYIPTELDQVRKWISDWNLTTEKKHTLLRLLYEALADCKKSDAASKVMVELLGSYTEDNASQARVDAHRCIVEPLKDPNAFLFDHLLTLKPVKFLEGELIHDLLTIFVSAKLASYVKFYQNNKDFIDSLGLLHEQNMAKMRLLTFMGMAIENKEISFDTMQQELQIGADDVEAFVIDAVRTKMVYCKIDQTQRKVVVSHSTHRTFGKQRWQQLYDTLNAWKQNLNKVKNSLLSLSDT

SEQ ID NO: 1117 - DNA, 7311 bp, Homo sapiens
gagattttaaaaagagctcagcacctttaaaaagtgaggatctagggaaaccttcacgatctaaaacagacagagatgataaatattttagctattcaaaacttgaaagagatactcggtatgtatcttcccgatgtagatcagaaagagagcgacggcggagcagatctcactctaggtctgagagaggctctagaactaatttatcctattccaggtcagaacgatctcattattatgactctgatcgtcgctaccataggagctccccttatcgagagaggacgcgctattctcggccatacacagataacagagcacgagagagttctgactcagaagaagagtataagaagacatactcaaggcgtacctcatctcattcctcttcttacagagacctaaggacatcatcctattctaaatctgatcgggactgtaaaactgagacctcttacttagagatggaaagaagaggcaagtattcttcaaaactagaaagagaatctaaaaggacttcagaaaatgaagcaattaaaagatgttgttctccccctaatgaactgggattccgacgagggtcatcatattctaagcatgacagtagtgcttcccgttataaatctaccctttcaaaacctatacccaagtctgataaatttaaaaattctttctgttgtacagaattaaatgaagaaatcaaacagtctcattcttttagtttacagacaccttgttcaaaaggtagtgaattaagaatgattaataaaaatcctgaaagagaaaaggctgggtctccagctccatcaaatcgattaaatgattcacctactttaaaaaagctagatgaattgcctatttttaagtccgaatttataacacatgatagccatgatagtattaaggaattagactctttatctaaagtgaagaatgatcaattaagaagtttttgtcccatagaattaaatataaatggatctcctggggcagaatctgatttggcaacattttgcacttctaaaactgatgctgttttaatgacttctgatgatagtgtgactggatcggaattatcccctttggtcaaagcatgcatgctttcatcaaatggatttcagaatattagtaggtgcaaagaaaaagacttggatgatacctgcatgctgcataagaagtcagaaagcccatttagagaaacagaacctctggtgtcaccacaccaagataaactcatgtctatgccagttatgactgtggattattccaaaacagtagttaaagaaccagttgatacgagggtttcttgctgcaaaaccaaagattcagacatatactgtactttgaacgatagcaacccttctttgtgtaactctgaagctgaaaatattgagccttcagttatgaagatttcttcaaatagctttatgaatgtgcatttggaatcaaaaccagttatatgtgatagtagaaatttgacagatcactcaaaatttgcatgtgaagaatataagcagagcatcggtagcactagttcagcttctgttaatcattttgatgatttatatcaacctattgggagttcaggtattgcttcatctcttcagagtcttccaccaggaataaaggtggacagtctaactctcttgaaatgcggagagaacacatctccagttctggatgcagtgctaaagagtaaaaaaagttcagagtttttaaagcatgcagggaaagaaacaatagtagaagtaggtagtgaccttcctgattcaggaaagggatttgcttccagggagaacaggcgtaataatgggttatctgggaaatgtttgcaagaggctcaagaagaagggaattccatattgcctgaaagaagaggaagaccagaaatctctttagatgaaagaggagaaggaggacatgtgcatacttctgatgactcagaagttgtattttcttcttgtgatttgaatttaaccatggaagacagtgatggtgtaacttatgcattaaagtgtgacagtagtggtcatgccccagaaattgtgtctacagttcatgaagattattctggctcttctgaaagttcaaatgatgaaagtgattcagaagatacagattcggatgatagcagtattccaagaaaccgtctccagtctgttgtggttgtgccaaagaattctactttgcccatggaagaaacaagtccttgttcttctcggagcagtcaaagttatagacactattctgaccattgggaagatgagagattggagtcaaggagacatttgtatgaggaaaaatttgaaagtatagcaagtaaagcctgtcctcaaactgataagtttttccttcataaaggaacagagaagaatccggaaatttcttttacacagtccagtagaaaacaaatagataatcgcctgcctgaactttctcatcctcagagtgatggggttgatagtacaagtcatacagatgtgaaatctgaccctctgggtcacccaaattcagaggaaaccgtgaaagccaaaataccttctaggcagcaagaagagctgccaatttattcttctgattttgaagatgtcccaaataagtcttggcaacagaccactttccaaaacaggccagatagtagactgggaaaaacagaattgagtttttcttcctcttgtgagataccacatgtggatggcttgcactcatcagaagagctcagaaacttaggttgggacttctctcaagaaaagccttctaccacgtatcagcaacctgacagtagctatggagcttgtggtggacacaagtatcagcaaaatgcagaacagtatggtgggacacgtgattactggcaaggcaatggttactgggatccaagatcaggtagacctcctggaactggggttgtgtatgatcgaactcaaggacaagtaccagattccctaacagatgatcgtgaagaagaggagaattgggatcaacaggatggatcccatttttcagaccagtccgataaatttcttctatcccttcagaaagacaaggggtcagtgcaagcacctgaaataagcagcaattccattaaggacactttagctgtgaatgaaaagaaagatttttcaaaaaacttagaaaaaaatgatatcaaagatagagggcctcttaaaaaaaggaggcaggaaatagagagtgattctgaaagtgatggtgagcttcaggacagaaagaaagttagagtggaggtagagcagggagagacatcagtgcccccaggttcagcactggttgggccctcctgtgtcatggatgacttcagggacccacagcgatggaaggaatgtgccaagcaagggaaaatgccatgttactttgatcttattgaagaaaatgtttatttaacagaaagaaagaagaataaatctcatcgagatattaagcgaatgcagtgtgagtgtacacctctttctaaagatgaaagagctcaaggtgaaatagcatgtggggaagattgtcttaatcgtcttctcatgattgaatgttcttctcggtgtccaaatggggattattgttccaatagacggtttcagagaaaacagcatgcagatgtggaagtcatactcacagaaaagaaaggctggggcttgagagctgccaaagaccttccttcgaacacctttgtcctagaatattgtggagaggtactcgatcataaagagtttaaagctcgagtgaaggagtatgcacgaaacaaaaacatccattactatttcatggccctgaagaatgatgagataatagatgccactcaaaaaggaaattgctctcgtttcatgaatcacagctgtgaaccaaattgtgaaacccaaaaatggactgtgaacggacaactgagggttgggttttttaccaccaaactggttccttcaggctcagagttaacgtttgactatcagttccagagatatggaaaagaagcccagaaatgtttctgcggatcagccaattgccggggttacctgggaggagaaaacagagtcagcatcagagcagcaggagggaaaatgaagaaggaacgatctcgtaagaaggattcagtggatggagagctagaagctctgatggaaaatggtgagggtctctctgataaaaaccaggtgctcagcttatcccggctaatggttagaattgaaactttggagcagaaacttacctgtctggaactcatacagaacacacactcacagtcctgcctgaagtcctttctggaacgtcatgggctgtctttgttgtggatctggatggcagagctaggtgacggccgggaaagtaaccagaagcttcaggaagagattataaagactttggaacacttgcccattcctactaaaaatatgttggaggaaagcaaagtacttccaattattcaacgctggtctcagactaagactgctgtccctccgttgagtgaaggagatgggtattctagtgagaatacatcgcgtgctcatacaccactcaacacacctgatccttccaccaagctgagcacagaagctgacacagacactcccaagaaactaatgtttcgcagactgaaaattataagtgaaaatagcatggacagtgcaatctctgatgcaaccagtgagctagaaggcaaggatggcaaagaggatcttgatcaattagaaaatgtccctgtagaggaagaggaagaattgcagtcacaacagctactcccacaacagctgcctgaatgcaaagttgatagtgaaaccaacatagaagctagtaagctacctacatctgaaccagaagctgacgctgaaatagagcccaaagagagcaacggcacaaaactagaagaacctattaatgaagaaacaccatcccaagatgaagaggagggtgtgtctgatgtggagagtgaaaggagccaagaacagccagataaaacagtggatataagtgatttggccaccaaactcctggacagttggaaagacctaaaggaggtatatcgaattccaaagaaaagtcaaactgaaaaggaaaacacaacaactgaacgaggaagggatgctgttggcttcagagatcaaacacctgccccgaagactcctaataggtcaagagagagagacccagacaagcaaactcaaaataaagagaaaaggaaacgaagaagctccctctcaccaccctcttctgcctatgagcggggaacaaaaaggccagatgacagatatgatacaccaacttctaaaaagaaagtacgaattaaagaccgcaataaactttctacagaggaacgccggaagttgtttgagcaagaggtggctcaacgggaggctcagaaacaacagcaacagatgcagaacctgggaatgacatcaccactgccctatgactctcttggttataatgccccgcatcatccctttgctggttacccaccaggttatcccatgcaggcctatgtggatcccagcaaccctaatgctggaaaggtgctcctgcccacacccagcatggacccagtgtgttctcctgctccttatgatcatgctcagcccttggtgggacattctacagaacccctttctgcccctccaccagtaccagtggtgccacatgtggcagctcctgtggaagtttccagttcccagtatgtggcccagagtgatggtgtagtacaccaagactccagcgttgctgtcttgccagtgccggcccccggcccagttcagggacagaattatagtgtttgggattcaaaccaacagtctgtcagtgtacagcagcagtactctcctgcacagtctcaagcaaccatatattatcaaggacagacatgtccaacagtctatggtgtgacatcaccttattcacagacaactccaccaattgtacagagttatgcccagccaagtcttcagtatatccaggggcaacagattttcacagctcatccacaaggagtggtggtacagccagccgcagcagtgactacaatagttgcaccagggcagcctcagcccttgcagccatctgaaatggttgtgacaaataatctcttggatctgccgcccccctctcctcccaaaccaaaaaccattgtcttacctcccaactggaagacagctcgagatccagaagggaagatttattactaccatgtgatcacaaggcagactcagtgggatcctcctacttgggaaagcccaggagatgatgccagccttgagcatgaagctgagatggacctgggaactccaacatatgatgaaaaccccatgaaggcctcgaaaaagcccaagacagcagaagcagacacctccagtgaactagcaaagaaaagcaaagaagtattcagaaaagagatgtcccagttcatcgtccagtgcctgaacccttaccggaaacctgactgcaaagtgggaagaattaccacaactgaagactttaaacatctggctcgcaagctgactcacggtgttatgaataaggagctgaagtactgtaagaatcctgaggacctggagtgcaatgagaatgtgaaacacaaaaccaaggagtacattaagaagtacatgcagaagtttggggctgtttacaaacccaaagaggacactgaattagagtgactgttgggccagggtgggaggatgggtggtcaggtaagacagactctagggagaggaaatcctgtgggcctttctgtcccacccctgtcagcactgtgctactgatgatacatcaccctggggaattcaaccctgcagatgtcaactgaaggccacaaaaatgaactccatctacaagtgattacctagttgtgagctgttggcatgtggttagaagccatcagaggtgcaagggcttagaaaagaccctggccagacctgactccactcttaaacctgggtcttctccttggcggtgctgtcagcgcacagacccatgcgcatccccacccacaaccctttaccctgatgatctgtattatattttaatgtatatgtgaatatattgaaaataatttgttttttcctggtttttgtttggttttcgttttgcttttagcctctacatgctaggatcacaggaagactttgtaaggacagtttaagttctcctgcaaggtttaatttgttatcatgtaaatattccaaagcaggctgccttgtggttttggccagccttgtgctatgttgataagattgatttactgcttaaaatcactttactttatccaatttttactgaactttttatgtaaaaaaataaaatcaattaaagaacttg

SEQ ID NO: 1118 - protein, 2061 aa, Homo sapiens
MERRGKYSSKLERESKRTSENEAIKRCCSPPNELGFRRGSSYSKHDSSASRYKSTLSKPIPKSDKFKNSFCCTELNEEIKQSHSFSLQTPCSKGSELRMINKNPEREKAGSPAPSNRLNDSPTLKKLDELPIFKSEFITHDSHDSIKELDSLSKVKNDQLRSFCPIELNINGSPGAESDLATFCTSKTDAVLMTSDDSVTGSELSPLVKACMLSSNGFQNISRCKEKDLDDTCMLHKKSESPFRETEPLVSPHQDKLMSMPVMTVDYSKTVVKEPVDTRVSCCKTKDSDIYCTLNDSNPSLCNSEAENIEPSVMKISSNSFMNVHLESKPVICDSRNLTDHSKFACEEYKQSIGSTSSASVNHFDDLYQPIGSSGIASSLQSLPPGIKVDSLTLLKCGENTSPVLDAVLKSKKSSEFLKHAGKETIVEVGSDLPDSGKGFASRENRRNNGLSGKCLQEAQEEGNSILPERRGRPEISLDERGEGGHVHTSDDSEVVFSSCDLNLTMEDSDGVTYALKCDSSGHAPEIVSTVHEDYSGSSESSNDESDSEDTDSDDSSIPRNRLQSVVVVPKNSTLPMEETSPCSSRSSQSYRHYSDHWEDERLESRRHLYEEKFESIASKACPQTDKFFLHKGTEKNPEISFTQSSRKQIDNRLPELSHPQSDGVDSTSHTDVKSDPLGHPNSEETVKAKIPSRQQEELPIYSSDFEDVPNKSWQQTTFQNRPDSRLGKTELSFSSSCEIPHVDGLHSSEELRNLGWDFSQEKPSTTYQQPDSSYGACGGHKYQQNAEQYGGTRDYWQGNGYWDPRSGRPPGTGVVYDRTQGQVPDSLTDDREEEENWDQQDGSHFSDQSDKFLLSLQKDKGSVQAPEISSNSIKDTLAVNEKKDFSKNLEKNDIKDRGPLKKRRQEIESDSESDGELQDRKKVRVEVEQGETSVPPGSALVGPSCVMDDFRDPQRWKECAKQGKMPCYFDLIEENVYLTERKKNKSHRDIKRMQCECTPLSKDERAQGEIACGEDCLNRLLMIECSSRCPNGDYCSNRRFQRKQHADVEVILTEKKGWGLRAAKDLPSNTFVLEYCGEVLDHKEFKARVKEYARNKNIHYYFMALKNDEIIDATQKGNCSRFMNHSCEPNCETQKWTVNGQLRVGFFTTKLVPSGSELTFDYQFQRYGKEAQKCFCGSANCRGYLGGENRVSIRAAGGKMKKERSRKKDSVDGELEALMENGEGLSDKNQVLSLSRLMVRIETLEQKLTCLELIQNTHSQSCLKSFLERHGLSLLWIWMAELGDGRESNQKLQEEIIKTLEHLPIPTKNMLEESKVLPIIQRWSQTKTAVPPLSEGDGYSSENTSRAHTPLNTPDPSTKLSTEADTDTPKKLMFRRLKIISENSMDSAISDATSELEGKDGKEDLDQLENVPVEEEEELQSQQLLPQQLPECKVDSETNIEASKLPTSEPEADAEIEPKESNGTKLEEPINEETPSQDEEEGVSDVESERSQEQPDKTVDISDLATKLLDSWKDLKEVYRIPKKSQTEKENTTTERGRDAVGFRDQTPAPKTPNRSRERDPDKQTQNKEKRKRRSSLSPPSSAYERGTKRPDDRYDTPTSKKKVRIKDRNKLSTEERRKLFEQEVAQREAQKQQQQMQNLGMTSPLPYDSLGYNAPHHPFAGYPPGYPMQAYVDPSNPNAGKVLLPTPSMDPVCSPAPYDHAQPLVGHSTEPLSAPPPVPVVPHVAAPVEVSSSQYVAQSDGVVHQDSSVAVLPVPAPGPVQGQNYSVWDSNQQSVSVQQQYSPAQSQATIYYQGQTCPTVYGVTSPYSQTTPPIVQSYAQPSLQYIQGQQIFTAHPQGVVVQPAAAVTTIVAPGQPQPLQPSEMVVTNNLLDLPPPSPPKPKTIVLPPNWKTARDPEGKIYYYHVITRQTQWDPPTWESPGDDASLEHEAEMDLGTPTYDENPMKASKKPKTAEADTSSELAKKSKEVFRKEMSQFIVQCLNPYRKPDCKVGRITTTEDFKHLARKLTHGVMNKELKYCKNPEDLECNENVKHKTKEYIKKYMQKFGAVYKPKEDTELE

SEQ ID NO: 1119 - DNA, 674 bp, Homo sapiens
ccccttggttccgcccgcgcgtcacgtgaccccagcgcctacttgggctgaggagccgccgcgtcccctcgccgagtcccctcgccagattccctccgtcgccgccaagatgatgtgcggggcgccctccgccacgcagccggccaccgccgagacccagcacatcgccgaccaggtgaggtcccagcttgaagagaaagaaaacaagaagttccctgtgtttaaggccgtgtcattcaagagccaggtggtcgcggggacaaactacttcatcaaggtgcacgtcggcgacgaggacttcgtacacctgcgagtgttccaatctctccctcatgaaaacaagcccttgaccttatctaactaccagaccaacaaagccaagcatgatgagctgacctatttctgatcctgactttggacaaggcccttcagccagaagactgacaaagtcatcctccgtctaccagagcgtgcacttgtgatcctaaaataagcttcatctccgggctgtgccccttggggtggaaggggcaggattctgcagctgcttttgcatttctcttcctaaatttcattgtgttgatttctttccttcccaataggtgatcttaattactttcagaatattttcaaaatagatatatttttaaaatccttaaaaaaaaaaaaaaaaa

SEQ ID NO: 1120 - protein, 98 aa, Homo sapiens
MMCGAPSATQPATAETQHIADQVRSQLEEKENKKFPVFKAVSFKSQVVAGTNYFIKVHVGDEDFVHLRVFQSLPHENKPLTLSNYQTNKAKHDELTYF

SEQ ID NO: 1121 - DNA, 3990 bp, Homo sapiens
ggacgtccggcttcggagcgggagtgttcgttgtgccagcgactaaaaagagaattaaatatgggtgatgttgagaaaggcaagaagatttttattatgaagtgttcccagtgccacaccgttgaaaagggaggcaagcacaagactgggccaaatctccatggtctctttgggcggaagacaggtcaggcccctggatactcttacacagccgccaataagaacaaaggcatcatctggggagaggatacactgatggagtatttggagaatcccaagaagtacatccctggaacaaaaatgatctttgtcggcattaagaagaaggaagaaagggcagacttaatagcttatctcaaaaaagctactaatgagtaataattggccactgccttatttattacaaaacagaaatgtctcatgacttttttatgtgtaccatcctttaatagatctcatacaccagaattcagatcatgaatgactgacagaatattttgttgggcagtcctgatttaaaactaagactggcttgtggttaaatgaatatgttcagtttttgaattttaatagtaactccaattcagtaaatggtatcactgtttaccccttttaaagatatgattagacttcgttagtaatgttcaacttttcacaaagatggtgagtgccatcttaaaacttactggagattggttttatatttagatttatataactggttatgtgaatatatttaaatactggggaaattgcttcactgtcttagaaccaagcaagattcacctgtgttttgtgttcatgttcatttgcctcttaaaggcaagggttgaagataaataaggttgcaatgtctatagttttggccttaactatgccaatctaattataattccctgtatttaaaatggtttcttttacttattgaaaggcattttagtgtggtttatgtgtaatattaaagattattcaacacctctcacatcttacagatctataaggtcacatgcttttaaaatagtagcaagttaaacttcactcttgaattctttacaatctaagtcaaactaagttataatttaggattgtctttaaacagccattcagaaacaaaactgtagaactgtgtatttgattgggaatggtgcttttgccaacttaaaaggattaaagtaacggagatatacacaaattttaaaattatgtgtgatcacaagactaaagataattaaaaagaaaaccacagatcatgactttttgactgtgcttgatttcatgactgatgcacaaattttaatgattaaaaagtgcaggagccctaaatgtcagtgcagcagccctaaatgtcagtgcagcagtgttaaccagtcatggtgctagattgtttacttggttttctaggactgcctcaactagaataacacttcactaattgactcttagtttctttgctcagattgagaactgcagcatttatgccagacatggacagaggaatgcctgtggtcatagttttgtgatgtgtaacagtgtataattacatactgaattatttcatgcatagtctgtgccatacacatttagagtagtccttggagattttatggagatggtgagcacaaggtaagtcataaagaataatgagaaaataaatctatgctggtgcagctgagaactgtatctttgtgggacagtgagaagactgagaagatgtgaatccatggtctcaaaggtgatagggacgattagataggtgttttaaggcctgaaagcaatttataacatatgagtcttatttttatttatagaaatgtggaaagcttgctgtaattcatatttgaagtcctagtctgagttctggtggggaatttaaaaatgcatcctggaaatcctttaaagatttcagactttgaaaggccttgtagcagaggacttggtgactgtataaagttagtggtattcagggacagtgtagcaagtagcttacaaggggacaattctggactaatgagaaagacctgaagtgaaggctagagagttgattttttttttttttggcatcctggaaatgatacaggaaacatattaagatagatacagaaatgtgttcaaccttccatcttggctagttgtggcgtttagtttgttttttgagacatggtcacgctgtgtcgccaaggctggagtgcagtggtgcgatctcggctggctgcagcctctatttcccaggctcaagcgattctctcacttcagcttcccaagtagctgggactgcgggtgttcgccaccatgcccagctaatttttttgtagagatggagttttgccatgtggtcccaggctggtctcaaactcctgagctcaagcaatccgtccacttgccttggctccccaaagtgctgggattgcaggcgtgagccaccaggccctgcctggttttcaaattcagaaatcttattatttaacccagaagtaatcagcccagtagtaacttaggtttaattttttttcaggtttaaaatttttctcatttattttttctgagacggagtttcgcccttttcgcccaggctgagtacagtggtgcaatctcactgcaacctccgccttccagttgcaagtgattctcctgcctcagcctcctgagtagctgggattgcaggcacccgccaccacgcctggctaatttttgtatttttagtggagatggtgtttcaccatgttggccagactggtcttggactcctgacctcgtgatccacccaccttggcctcccaaagttctaggattacaggtgtgagccaccacgtccggccaatttttctcatttctatgcctcctatattaaggtctgtgttggcacagatgagtaactgccatgttctaggtcagttatacccaagcacttctggtggtttaaaatgtgattctgtaacttttttatttttatttttttgagataatttcactcttgttgcccaggctggagtgcaatggcgtgatcgctgctcaccgcaacctccgccttccaggttcaagcgattctcctgactcagcctctcaagtagctgggattacaagcatgcgccaccatgcccagcttattttgtgtttttagtagagacagggtttctccatgctggacaggctggtcttgaactcccgacgtcgggtgatctgcctgcctcggcctcccaaagtgctgggattacaggcgtgagccaccacgcctggccaattatgtaattttttaaaaaggacatttctatcagggatatataccttcagaaataaggaaataggggaaaaaaagagcactataaaccacatgttttcatttctagtgcttcgctgtaagtggctaggttggtagaatcaaaaacaagggccagatgtatttaaggggtattcagatgccacctacatgcttattttgtctagaacagtgctgtctaatagaactttctgtgacgatggatattttgtagacttttgctgtccagtgtggtagccactaaccacatgtggctgttaagcccttgaaatatagctagtgtgactagaaagtattttattttaaatttacataggcacaagtggctagtggctactgtattgacattctgggtctaggactagaaccagtggtctgtaacaaaagtactttctctttactctattaaatctagaattagccgggcatggtcgctcatgcctgtggtcccagcactttgggaggccaaggcaggcagatcacttgaggtcgggcgtttgagaccagcctggtcaacatggcgaaaccctgtctctacaaaaaacataaaagttagccaggtgtggtggtgggcacctgtagtctcagctacttgggaggctgaggcacaagaatcacttgaacttgggaggtggaggttgcagtgagccaggattgtgccactgcactcaagcctgggtgacgagtgaaactgtctccaaaaaaaaaaaaaaaaa

SEQ ID NO: 1122 - protein, 105 aa, Homo sapiens
MGDVEKGKKIFIMKCSQCHTVEKGGKHKTGPNLHGLFGRKTGQAPGYSYTAANKNKGIIWGEDTLMEYLENPKKYIPGTKMIFVGIKKKEERADLIAYLKKATNE

SEQ ID NO: 1123 - DNA, 1236 bp, Homo sapiens
gctgggcgcgggcggcggcggcccggaggagaacgggcggagggcgcgggccgaccgggcgcaccgaccatggcctccaaatgccccaagtgcgacaagaccgtgtacttcgccgagaaggtgagctccctggggaaggactggcacaagttctgcctcaagtgcgagcgctgcagcaagacgctgacgcccgggggccacgccgagcatgacgggaagccgttctgccacaagccgtgctacgccaccctgttcggacccaaaggcgtgaacatcgggggcgcgggctcctacatctacgagaagcccctggcggaggggccgcaggtcaccggccccatcgaggtccccgcggcccgagcagaggagcggaaggcgagcggccccccgaaggggcccagcagagcctccagtgtcaccactttcaccggggagcccaacacgtgcccgcgctgcagcaagaaggtgtacttcgctgagaaggtgacgtctctgggcaaggattggcaccggccctgcctgcgctgcgagcgctgcgggaagacactgacccccggcgggcacgcggagcacgacggccagccctactgccacaagccctgctatggaatcctcttcggacccaagggagtgaacaccggtgcggtgggcagctacatctatgaccgggaccccgaaggcaaggtccagccctaggctacagcggctctcatgatgtgggctcacctgcgccccagaccctgcaggggcccccctgcttggctctgctgggagagtgctcagccgcccagtcctgcctgcaagcccagggcgagtattggaggaggggcagccacgggcagagcaccatgcccatccccgagtctctggtgtgtctgccccctctggcatcctctgggcgtcccatgatcccttctgtgtctgcgtgtccgaatccccgtgtgaccctgtcccagcattttcccgccgaccctgcgtgtccccgtggcgctgtccgctctccctctcctgctgcccacccacctgccagtgttatttatgctcccttcgtgggtgatggccacgccctcaccatgtccctggcagagggcttccctccgggatcccctgcctggtgcccacactgcctcgcaagcgctcgccaccctcacgtggctcacctgctgttgagccttgtgctgtcaataaacggtttgaggattgcagaaaaaaaaaaaaaaaaaaaaaaaaaaaaaa

SEQ ID NO: 1124 - protein, 208 aa, Homo sapiens
MASKCPKCDKTVYFAEKVSSLGKDWHKFCLKCERCSKTLTPGGHAEHDGKPFCHKPCYATLFGPKGVNIGGAGSYIYEKPLAEGPQVTGPIEVPAARAEERKASGPPKGPSRASSVTTFTGEPNTCPRCSKKVYFAEKVTSLGKDWHRPCLRCERCGKTLTPGGHAEHDGQPYCHKPCYGILFGPKGVNTGAVGSYIYDRDPEGKVQP

SEQ ID NO: 1125 - DNA, 6758 bp, Homo sapiens
agcatggcatctgaagaagcctctctcagggcattggaaagtctgatgacagaattttttcacgattgtacaaccaatgaaagaaaacgtgagatagaggagcttcttaataactttgcccagcaaataggagcctggagattctgcctgtactttctctccagcactaggaatgactatgtaatgatgtacagtttaacagtttttgagaatctgatcaataaaatgtggcttggggtcccatctcaggataagatggaaatccgtagctgtctgcccaaactccttttggctcaccataaaaccttaccttactttatccggaacaagctctgcaaagttattgttgatattggacgtcaggattggcccatgttctaccacgacttttttactaacattttacagttgatccagtcccctgtgacaaccccccttgggctgatcatgttgaagacaacttcagaagagctggcttgtccccgtgaggacctcagtgtggctcggaaggaggagttgcggaagctgctactggaccaggtgcagacagtgcttgggctactgacaggtatcttggagactgtctgggacaaacacagtgttactgctgccactccaccaccatccccgacctcaggagaaagtggtgacttactgagtaacctgttgcagagtcccagttcagccaaactgttgaatcagccaattcccatccttgatgtggagagtgagtatatctgttccctggctttggagtgcctggcccatctcttcagttggattcctctgtctgccagcatcaccccatccctccttaccaccatcttccactttgcacgatttggctgtgacatccgggccagaaagatggcgtcagttaacggcagcagccagaactgtgtctcgggtcaggagcgcggccggctgggggtcctggccatgtcctgcatcaatgaactcatgtccaagaactgtgtgcctatggaatttgaggagtatttactgcgtatgttccagcagactttctacctcctgcagaaaatcaccaaggataacaatgcccacacagtgaagagcaggctagaagagctcgatgagagctatatcgagaagtttactgactttcttcggctctttgtgagtgttcacctaagaagaatcgagtcttactcccagttccctgtggtggagtttttgacacttttgttcaagtacacatttcatcagcctactcatgaaggttacttctcttgtttggatatctggacgctgtttttggactatctgacaagtaaaattaaaagtcgtcttggagacaaggaagcagttctcaacaggtacgaagatgccctggtgctcctgctcacagaggtgttgaatcgaatccagttcagatacaaccaagcccagctggaggagttggatgatgagactctggatgacgatcagcagacggagtggcagcggtacttacggcagagcttggaggtggtggccaaagtgatggagctcctgcccacgcacgccttctccacactgttccctgttcttcaggacaatttagaagtttatttgggattacaacagtttatagtcacttcagggtcaggacacaggttgaacatcacggcggagaacgactgccggcggctgcactgctccctgagagacttgagctccctgctgcaggccgtgggccgcctggccgagtactttatcggggatgtgtttgctgcacggttcaatgatgccctcacagtcgtggaaaggttggtcaaagtcactctgtacggatctcagataaaattgtacaacattgaaactgctgtgccatcagtattgaaacctgacctcattgatgtgcatgctcagtccctggctgcgctgcaggcttactctcactggttagcacagtattgcagtgaagttcaccggcagaacacgcagcagttcgtgacactcatctctactaccatggatgcaatcacacctctaatcagcaccaaggtccaagacaagctgctgctatctgcgtgccacttactggtctcactggccaccaccgtgcggcccgtctttctgatcagcatccctgcagtgcagaaagtattcaacagaatcactgatgcctctgccctgcgacttgtcgataaggcccaggtgttggtgtgccgagccctctctaacatcttgctgcttccgtggccaaaccttccagagaatgagcagcagtggcccgtgcgctccatcaaccatgccagcctcatctctgcactctcccgggactatcgcaacctgaagcccagtgctgttgccccacagagaaagatgccactggatgacaccaaactgattatccaccagacactcagcgtcttagaagatattgtggagaatatctcgggggagtccaccaagtctcgacagatttgctaccagtcgctgcaggaatctgttcaggtctccctggccctctttccagcttttatccatcagtcagatgtgactgatgagatgctgagcttcttcctcactctgtttcgaggccttagagtacagatgggtgtgcctttcactgagcaaatcatacagactttcctcaacatgtttaccagagagcagttagccgagagcatcctccacgagggcagcacaggctgccgggtggtggagaagtttctgaagatcctgcaggtggtggtccaggagccaggccaggtgttcaagcccttcctccccagcatcatcgccctgtgcatggagcaagtgtatcccatcattgccgagcgtccctcccctgatgtgaaggccgagctgtttgagctccttttccggacgctccatcacaactggaggtacttcttcaagtccaccgtgctggccagtgtccagagggggatcgctgaggagcagatggagaatgagccccagttcagtgccatcatgcaggctttcggacagtcctttctccagcccgacatccacctttttaaacaaaatctcttctacttggagactctcaacaccaagcagaagctgtaccacaagaagatcttccggactgccatgctgttccagtttgtgaacgtgctgctccaggtcctggtccacaagtcccatgatcttctgcaggaggagattggcatcgccatctacaacatggcctcagtcgactttgatggcttctttgccgccttcctcccagagttcctgaccagctgtgatggtgtggatgccaaccagaaaagtgtgctggggcggaatttcaagatggatcgggtgaggagagaaagaggccgggctaagaggagggcagagtgggcacgcaagcctggcacctgtgcagcaaggagggggcacattgaggcctctgggcgtggtctgtgcccaccctgcagcttggcggcagctcacgagatgcctgctgacctggtgctgtagcctgattgaggggcacagccttttccccagtcttggtgtctgtagcacgtatgttcttagtctcagccatggaggtcccgagttcctggctctgcagcccctccatttgtcttggcatctttgttcatacccaggaccctgccgttctccctcctgggtgatgagccccggtggggccagcattggagtgtgcccaggcttgcattcaggctgagatggttggtgcttgggagctgcacttctgggtccccagggttagaggtgggacccaggttccccggctgtcttgggctctttccagaccagccccagctcagcttgggctgagttgctgccaggtcctgggaggagccctcctagtactcaccctcttgtcccactgctgccacctgtgcagggactgtcaggtgggctgtccccacccgtgcagcacctcggtgggagctgggtgctgctggctcttggtgtccatgaggccatcttgttggagcctgacagtgcctgggacctccttccccatggggctcacctgttctcttcttcctgtgtcaggtgaccaggcctctctcttgcctgataggaacttctgggaacttttccttgtaccgttttatacttgatgaaattaggaaaagaaatcgctttctccctggtcctcttggggttcttgacctgagtcctctgtgaagcagcttgtccacggctccaccgtagtgctcagatgcacacattgctctcactggtgcaaacctggccgcctgctttcctcatttgccacgtgtggcagggaagcttttgcttagactcatcctgttctcctttgtcttggggtcttccttttcttgggacttgttctctcctaagcctcttccagttcacttcagcccctggatatgttttttcctttttctagaggccagatcctaatacttaatgatcagcttctaacgacatcaatatcagtcaactttttgatttaaagctgtggtttcaaaatctagttataggccaggcgcggtgtctcacacctgtaatctcagcactttgggaggccaaggcgggcggatcacttgaggttagggggtttgagaccagcctggccaacatggcgaaaccctgtctctactaaaaataaaaaaaattagtcaggtgtggtggcacacgcctgtaatcccagctgcttgggaggctgaggcacaagaatctcttgaacccgggaggcagaggttgcagtgagcggaggttgtgccactgcactccagcctgggcggcagagtgggactttgtctcaaaaaaaaaaatctagttatatcagaagcacctggggtacttattaaaaatggagaaacagacttctgtgttctacccaggaaattctggtttggcatttgggagccactgatttaaaagacatcccttagttggttttttgagggtaaaataaaagaatcaccaccttccattcagtcacgcactgtgtgtttgaagccagctgcttctcaagccccgggccaggaactggggcaccagtcccagccttcaccaagtctttcatggtagacaggccaatacagcaccctctgtggaccacatagtgccaagcatgtgacatgtcttggctcgagtaagccttctaacaagcctctgaagtgtgggtcctgttactcccccatttcacagatggtgggggctcagaaggtgagcagttcacagaacttggaagtggtagagctgcgaagcaggaggcagacctgggtgttctggccccagagcctgcacacactccccagaagcagattgctcaggacagaggcgctgagctggctgctggggccaggaaataggaggcatctgtgcagactttgggaagaggcaggctttgaatggagttctggaagaggaatagtggttgggcaggaaaatgaacttggtcctgctcatggctctgctggggcttgctgggcctgtttgagtcctcaccgggacctacactgaaaaaaaaagcagggtctcaccgtgtgcatgatggcggaggtcagggcctcacttctggcccagggccttccatggcccacgctgcgcccagtgggacaggccttgggactgtgtttgctgctgctcgggtggctctcgaggggcaggggcggcctggagccccgtgggtaaaggttctgcagacattgctcggtgtgcgcgtcacctcaaggggccatggtgaagaagagggctgtcaccacagccatgtctgcgtttgaggggccggactcaggagcaagtgtgctggtctcttcagtgtgagctggggccagcttcttcatggtgcagcgctttggtctttctgtccttagactagtggttctggtagggcttggtggcagccttgtggtgaggactcagtgagttgatgtctgtatgttgattgcagcagtgtctggcacccgagaggccctagggacgtattcctcttgttctttttctcccacagcgcctggcacagagtctctgtgacacgcagtgcaacagtgaatagaagttttgagttttagaaagtgctcccctatcttcagtgcacactctgggatggaagtagctgttggggtctggtgggtgggtgacctggtgtgttgttggctgcagctatgcccctgccttccaggacctgccctcattcacccagaatgtgcacaggctggtcaacgacctgcgctactacagactctgcaacgacagcctgccccctggcactgtgaagctctaggcctgctactgcctggggacacggacttctgctgctgccacctgcgccagccctaccttccaccacagatgtctcccagatgggccttggtcacactccttggcttctcccaccgcaagcaacgctgcctgcctctgccgctcctccacatcttgccgctgcccagcagagctggcttctgggtccacctgagcactggacggtgctcccagggcgttggagcaggcggaggggtgtgtggccaggtactaggaggcaccaggaaatcccgcggggtggcccatgcagaccaggcgcacgtggctcatggggcagaattgccaaggacagctcacgacagtgccaccttctcaccattccagccaaggagagatgtgacgttggaactgctctggcacttctgtcaagcctcccccgccccaattgccttgagatctctgctctttgtcagagatttgcaaagactcacgtttttgttgttttctcatcattccattgtgatactaagaaactaagaagcttaatgaaaagaaataaaatgcctatgttgttgttctag

SEQ ID NO: 1126 - protein, 1146 aa, Homo sapiens
SMASEEASLRALESLMTEFFHDCTTNERKREIEELLNNFAQQIGAWRFCLYFLSSTRNDYVMMYSLTVFENLINKMWLGVPSQDKMEIRSCLPKLLLAHHKTLPYFIRNKLCKVIVDIGRQDWPMFYHDFFTNILQLIQSPVTTPLGLIMLKTTSEELACPREDLSVARKEELRKLLLDQVQTVLGLLTGILETVWDKHSVTAATPPPSPTSGESGDLLSNLLQSPSSAKLLNQPIPILDVESEYICSLALECLAHLFSWIPLSASITPSLLTTIFHFARFGCDIRARKMASVNGSSQNCVSGQERGRLGVLAMSCINELMSKNCVPMEFEEYLLRMFQQTFYLLQKITKDNNAHTVKSRLEELDESYIEKFTDFLRLFVSVHLRRIESYSQFPVVEFLTLLFKYTFHQPTHEGYFSCLDIWTLFLDYLTSKIKSRLGDKEAVLNRYEDALVLLLTEVLNRIQFRYNQAQLEELDDETLDDDQQTEWQRYLRQSLEVVAKVMELLPTHAFSTLFPVLQDNLEVYLGLQQFIVTSGSGHRLNITAENDCRRLHCSLRDLSSLLQAVGRLAEYFIGDVFAARFNDALTVVERLVKVTLYGSQIKLYNIETAVPSVLKPDLIDVHAQSLAALQAYSHWLAQYCSEVHRQNTQQFVTLISTTMDAITPLISTKVQDKLLLSACHLLVSLATTVRPVFLISIPAVQKVFNRITDASALRLVDKAQVLVCRALSNILLLPWPNLPENEQQWPVRSINHASLISALSRDYRNLKPSAVAPQRKMPLDDTKLIIHQTLSVLEDIVENISGESTKSRQICYQSLQESVQVSLALFPAFIHQSDVTDEMLSFFLTLFRGLRVQMGVPFTEQIIQTFLNMFTREQLAESILHEGSTGCRVVEKFLKILQVVVQEPGQVFKPFLPSIIALCMEQVYPIIAERPSPDVKAELFELLFRTLHHNWRYFFKSTVLASVQRGIAEEQMENEPQFSAIMQAFGQSFLQPDIHLFKQNLFYLETLNTKQKLYHKKIFRTAMLFQFVNVLLQVLVHKSHDLLQEEIGIAIYNMASVDFDGFFAAFLPEFLTSCDGVDANQKSVLGRNFKMDRVRRERGRAKRRAEWARKPGTCAARRGHIEASGRGLCPPCSLAAAHEMPADLVL

SEQ ID NO: 1127 - DNA, 2207 bp, Homo sapiens
actgacggccggccggcttcccggaactggaaggttacattgattacccacctagtacaacatcttacgggaagagcatagtatttcctagaggaatatgaacataacaggaaggtatcattggctctgaattaaatttgaacttgtcccctgaatagctacaggttttggaagctgaatcaatgttatcagatgagttagaatccaaaccagagctcctggtacagtttgttcagaatacgtccatcccattgggacaggggcttgtagaatcagaagctaaagatattacttgcttgtccctccttcccgtgactgaagcctcagaatgcagtcggctaatgttaccagatgatactacaaatcattctaactcctccaaggaggtcccttcctcagctgttttgagaagccttcgggtgaatgtgggtccagacggagaggagacgagagctcagactgtacagaaatccccggagtttttgtccacttcagagtcttctagcttgttgcaagatctacagccaagtgatagcacttcttttattcttcttaacctaacaagagcaggtctgggctcttcagctgagcacttagtgtttgtacaggatgaggcagaagattcagggaatgatttcctctccagtgagagcacagacagtagcattccatggttcctccgggttcaggagttggcccatgacagtttgattgctgctactcgtgcacaactggcaaagaatgcaaaaaccagcagcaatggagaaaatgtccaccttggttctggtgatgggcagtcaaaagattctgggccccttcctcaagtggaaaagaagctcaagtgtacagttgaaggttgtgaccggacatttgtatggccagctcactttaaataccacctcaagactcatcgaaatgaccgctccttcatctgtcctgcagaaggttgtgggaaaagcttctatgtgctgcagaggctgaaggtgcacatgaggacccacaatggagagaagccctttatgtgccatgagtctggctgtggtaagcagtttactacagctggaaacctgaagaaccaccggcgcatccacacaggagagaaacctttcctttgtgaagcccaaggatgtggccgttcctttgctgagtattctagcctccgaaaacatctggtggttcactcaggagagaagcctcatcagtgccaagtctgtgggaagaccttctctcagagtggaagcaggaatgtgcatatgagaaagcatcacctgcagctgggagcagctgggagtcaagagcaggagcaaactgctgagccactaatgggcagtagtttgcttgaagaggcttcagtacccagtaaaaacctggtgtctatgaattcccagcccagccttggtggagagtccttgaacctaccaaataccaattctatcctgggagttgatgatgaggtgcttgctgaaggatccccacgttccctgtcttcagtgcctgatgtgacacatcacctggtgaccatgcagtcagggaggcaatcatatgaagtttctgtcttaactgcagtaaatccacaagagttactaaaccaaggagatttaactgaaagacggacatgagcgtgggtgctgactcctggaagagcaactctatctgatctcaaaatgcgtatactgggaacaggatgccttagcccacaacagaaccagaatgaatctttgaaggcacaagactctgcttttgccactcttcctctttcctggtatagaagatggatgtaggagagcttcttttctaactaccatctgatcagacaaggaatgaagcaatgactgtgggctgggaaactgtacctacctctcttcccactgcaaatttctgggatagaccaaaagtgaatttgattatgtgttggctgaagttcttcattctgactgttgaggggaggttttcctttgaagagttttcatcccagactcagctgtcttttcacatggatgaaataattcctgctaccaacaacagagcttcaccaggaagttgagttttcaagatgccttgttgctttgaagaagggagtgatgtcaattctcttgttacattctccctttagcaacctgagtaagagactctctgccactgggctgcaaaaaaataaattacttgaatctccccttgaaaaaaaaaaaaaaaaaaaaaaaaaaaaa

SEQ ID NO: 1128 - protein, 478 aa, Homo sapiens
MLSDELESKPELLVQFVQNTSIPLGQGLVESEAKDITCLSLLPVTEASECSRLMLPDDTTNHSNSSKEVPSSAVLRSLRVNVGPDGEETRAQTVQKSPEFLSTSESSSLLQDLQPSDSTSFILLNLTRAGLGSSAEHLVFVQDEAEDSGNDFLSSESTDSSIPWFLRVQELAHDSLIAATRAQLAKNAKTSSNGENVHLGSGDGQSKDSGPLPQVEKKLKCTVEGCDRTFVWPAHFKYHLKTHRNDRSFICPAEGCGKSFYVLQRLKVHMRTHNGEKPFMCHESGCGKQFTTAGNLKNHRRIHTGEKPFLCEAQGCGRSFAEYSSLRKHLVVHSGEKPHQCQVCGKTFSQSGSRNVHMRKHHLQLGAAGSQEQEQTAEPLMGSSLLEEASVPSKNLVSMNSQPSLGGESLNLPNTNSILGVDDEVLAEGSPRSLSSVPDVTHHLVTMQSGRQSYEVSVLTAVNPQELLNQGDLTERRT

SEQ ID NO: 1129 - DNA, 2277 bp, Homo sapiens
acgccctatacaacttggcttcacatacttttacactaactttatatgatttttaaaaactggtctgatcggacttctcgtcctgggacactgtttactggagtctggccggctctccgtgctcctcttggtacctcattttggggagaaccttaaacccactcgagcagataatctccgccttgaccggtgccaccaaagaagggttggaaccatgtggacttttctgggcattgccactttcacctatttttataagaagttcggggacttcatcactttggccaacagggaggtcctgttgtgcgtgctggtgttcctctcgctgggcctggtgctctcctaccgctgtcgccaccgaaacgggggtctcctcgggcgccagcggagcggctcccagttcgccctcttctcggatattctctcaggcctgcctttcattggcttcttctgggccaaatccccccctgaatcagaaaataaggagcagctcggggccaggaggcgcagaaaaggaaccaatatttcagaaacaagcttaataggaacagctgcctgtacatcaacatcttctcagaatgacccagaagttatcatcgtgggagctggcgtgcttggctctgctttggtagctgtgctttccagagatggaagaaaggtgacagtcattgagagagacttaaaagagcctgacagaatagttggagaattcctgcagccgggtggttatcatgttctcaaagaccttggtcttggagatacagtggaaggtcttgatgcccaggttgtaaatggttacatgattcatgatcaggaaagcaaatcagaggttcagattccttaccctctgtcagaaaacaatcaagtgcagagtggaagagctttccatcacggaagattcatcatgagtctccggaaagcagctatggcagagcccaatgcaaagtttattgaaggtgttgtgttacagttattagaggaagatgatgttgtgatgggagttcagtacaaggataaagagactggagatatcaaggaactccatgctccactgactgttgttgcagatgggcttttctccaagttcaggaaaagcctggtctccaataaagtttctgtatcatctcattttgttggctttcttatgaagaatgcaccacagtttaaagcaaatcatgctgaacttattttagctaacccgagtccagttctcatctaccggatttcatccagtgaaactcgagtacttgttgacattagaggagaaatgccaaggaatttaagagaatacatggttgaaaaaatttacccacaaatacctgatcacctgaaagaaccattcttagaagccactgacaattctcatctgaggtccatgctagcaagcttccttcctccttcatcagtgaagaaacgaggtgttcttcttttgggagacgcatataatatgaggcatccacttactggtggaggaatgactgttgcttttaaagatataaaactatggagaaaactgctaaagggtatccctgacctttatgatgatgcagctattttcgaggccaacaaatcattttactgggcaagaaaaacatctcattcctttgtcgtgaatatccttgctcaggctctttatgaattattttctgccacagatgattccctgcatcaactaagaaaagcctgttttctttatttcaaacttggtggcgaatgtgttgcgggtcctgttgggctgctttctgtattgtctcctaaccctctagctttaattggacacttctttgctgttgcaatctatgccgtgtatttttgctttaagtcagaaccttggattacaaaacctcgagcccttctcagtagtagtgctgtattgtacaaagcgtgttctgtaatatttcctctaatttactcagaaatgaagtatatggttcattaagcttaaaggggaaccatttgtgaatgaatatttggaacttaccaagtcctaagagacttttggaagaggatatatatagcatagtaccataccacttataaagtggaaactcttggaccaagatttggattaatttgtttttgaagttttttgtatataaatatgtaaatacatgctttaatttgcaatttaaaatgaaggggttaaataagttagacatttgaaagaaatgattgttaccataaattagtgctaatgctgaggagaactacagtttttcttttgaatttagtatttgagatgagttgttgggacatgcaaataaaatgaagaatgac

SEQ ID NO: 1130 - protein, 574 aa, Homo sapiens
MWTFLGIATFTYFYKKFGDFITLANREVLLCVLVFLSLGLVLSYRCRHRNGGLLGRQRSGSQFALFSDILSGLPFIGFFWAKSPPESENKEQLGARRRRKGTNISETSLIGTAACTSTSSQNDPEVIIVGAGVLGSALVAVLSRDGRKVTVIERDLKEPDRIVGEFLQPGGYHVLKDLGLGDTVEGLDAQVVNGYMIHDQESKSEVQIPYPLSENNQVQSGRAFHHGRFIMSLRKAAMAEPNAKFIEGVVLQLLEEDDVVMGVQYKDKETGDIKELHAPLTVVADGLFSKFRKSLVSNKVSVSSHFVGFLMKNAPQFKANHAELILANPSPVLIYRISSSETRVLVDIRGEMPRNLREYMVEKIYPQIPDHLKEPFLEATDNSHLRSMLASFLPPSSVKKRGVLLLGDAYNMRHPLTGGGMTVAFKDIKLWRKLLKGIPDLYDDAAIFEANKSFYWARKTSHSFVVNILAQALYELFSATDDSLHQLRKACFLYFKLGGECVAGPVGLLSVLSPNPLALIGHFFAVAIYAVYFCFKSEPWITKPRALLSSSAVLYKACSVIFPLIYSEMKYMVH

SEQ ID NO: 1131 - DNA, 2250 bp, Homo sapiens
gaggccgcggcggggaaaatggcggacgggaaggcgggagacgagaagcctgaaaagtcgcagcgagctggagccgccggaggacctgaagaagaagcagaaaaacctgtgaaaactaagactgtttcttccagtaatggaggggaaagttccagtcgcagcgctgagaagcgatcagctgaagaagaagctgccgacctcccaacaaagcctacaaagatctccaagtttggatttgccataggtagtcagacgacaaagaaagcatcagccatatccatcaaacttggatcaagtaagcctaaagaaactgttccaactcttgctccaaaaactctttcagtagcagcagcttttaatgaagatgaagatagtgaaccagaggaaatgcctccagaagcaaagatgaggatgaagaatattggaagggatacaccaacatcagctggaccaaactccttcaataaaggaaagcatgggttttctgataaccagaagctgtgggagcgaaatataaaatctcatcttggaaatgtccatgaccaagacaattaaatgatgttttgaaattggggtgtggggtgggtgtaaagttaaaaggaacagtttccttttttaaagaatggtataagactatctttggagccgctttttttttctttttcatttttttaaaagattgagtggtacactaataaatgagagtttgaaattagaggtaatttatgttttatatacagatttcaagacatttgctaattttgtagtttcatgtgattagtttccaaaggttacagataataaagaaatcagaaatggtacctttttaagaattgcatatttttttagacacaactattagcacattaagagggaagcaaagttactgtctatttaaaactgcaagcagttaactctcttaactcccttattacctaaacttgtctggctcccaggaacagccttatagagagagggagtattgtattgggaagaaaatgttactgaactattgactgaaagtaaatttagataaaatacagcttttttccttatgggcatttgttttgtttcaagtcatcataaactaggtattgcattgctatccgtggatacagacgcttagctcttaaaagattttttttttatgtaaactgttgaatatttgaaatagtccacttcaccttaatgggtcttgtctatcttcattagtcttcaaagaaaaaccatttgctaccaaagtaaatcagtattttgaatgtgcttctcttgttttttgtttattagctagttcctgtaagcatttccaccagaacttgaggcaaatcgtaaggaagctgtttcttttaaaacacaaaccaccaccaaaaatttaaatgtacatattgcttaagtatttggctgtttttattttttaaaaggtataaacaccaaaaaaaaaattaacattgtatgaagatggaaaataagaagatgcactttctgtaactttgtctaaggatttaaattactaacttatgaactccaatttgaattgaacttaactatcggctttcttactggtaaaattatatggtttattttaaatgcgtacatattgaccaatggcctctgaaaaagcacattttagatactgaaattgaaggaaagaaaatgcatcttcaaacattttttggaatctcaccacatatactttgttagatttgtgtattgtagggtgtttgttttgtatttttgtattgtatatgaactttttttaaatgtgacagttaaacacatctttaaaagcatagtcacagacaaaagcatacagtataaaaatttccttgaaaactcctacaatattatatttggaggcagcttcagactgttttattggtggtagctgcttgctgaggtcttttagttggtaataactccagagaagcagcctgtgtatattcctaacactttgttcactagcatttaagtttagaataagcccaagtaagacaatggaaatgtatatagaactcttagttcttacatgatttaattatatcgatacatgaatttaacttactttaatgtaggcaaactatcaattttttgtccattttcctgtttgttaaaataacatacctctcctacgtattattttcttgacccaaatgaaatattaacctaaggtcaagctgggagagagaaatgactgagatgaatgtctttactaaagtaccaataaatttgtcaaactcaaaaaaaaaaaaa

SEQ ID NO: 1132 - protein, 178 aa, Homo sapiens
MADGKAGDEKPEKSQRAGAAGGPEEEAEKPVKTKTVSSSNGGESSSRSAEKRSAEEEAADLPTKPTKISKFGFAIGSQTTKKASAISIKLGSSKPKETVPTLAPKTLSVAAAFNEDEDSEPEEMPPEAKMRMKNIGRDTPTSAGPNSFNKGKHGFSDNQKLWERNIKSHLGNVHDQDN

SEQ ID NO: 1133 - DNA, 4758 bp, Homo sapiens
cgcggagaagcttgggtacctgagccgcggtcccgggtgacaccctcagtgacgccaggcgcgttccttcctcttcctctctcctctccggccccgccttcccttccctccgcccacctccctgaagcggagccgccgtcgccaccagcgccgtcatgtcggcccccgccgggtcctctcacccggccgccagcgcccggatcccgcccaagttcggcggatcggccgtctcaggagccgcagcgcccgcgggcccgggtgcgggcccggcgccgcaccagcagaacggtccagcccagaatcaaatgcaggttccatctggatatggattgcatcatcaaaactatattgctccctcaggacattactctcaaggacctgggaaaatgacctcattgccattggatacccagtgtggtgattactactctgctctctatacagtaccaacacaaaatgtgactcctaacacagtgaaccagcaaccaggagcacagcagttgtacagcaggggtcctcctgcccctcatattgtgggatccactctaggatctttccaaggtgctgcatcgtcagcatcccatttgcatacgagtgcctcccaaccatactcctcttttgtgaatcactacaatagtccagccatgtactctgccagctcttctgttgcgtctcagggatttccctctacttgtggtcattatgctatgtcaactgtttctaatgccgcgtatcctagtgtttcatatccctctctgcctgctggtgatacatatgggcaaatgtttacctcacagaatgctccgactgttaggccagttaaagataattcattctctggtcaaaatacagctatcagccatccatcgccacttccacctctaccatcacaacagcaccaccagcagcaaagtctttcaggatacagtactctaacgtggtcatctccaggccttccatcgactcaagacaatctcatccgaaaccacacaggatccctggctgtagcgaacaacaacccaaccattactgttgcagattctttatcctgtcctgttatgcaaaatgttcagcctcccaagtccagcccagtggtatccactgttttatcaggatcctcaggatcctcatcaacaagaacacctcccactgcaaatcacccagttgagcctgtgacctcagttacacagccatcagagctattacaacaaaaaggcgtgcagtatggtgaatatgttaataaccaagctagctccgcaccaactcccttgtcatcaacttccgatgatgaggaagaggaggaggaggatgaggaagcaggtgttgacagctcttctaccacaagcagtgcttctccaatgcccaacagttatgatgccctggaaggaggcagttacccagatatgctttcttcatcagcaagcagtcctgctcctgatcccgcccctgaacctgatcctgcttctgctccagctccagcttcagctccagctcctgtcgtccctcagccttcaaaaatggctaagcctttggctatggctatccaacacttcagcctggttatcagaatgctacagcaccacttatttctggagtacagccccagtaacccggtatattctggattccagcagtatcctcaacagtatcctggtgtgaaccagctatcctccagtataggaggattgagtcttcagagttctccacaaccagaaagcctgagacctgtaaaccttactcaggagaggaatattttacctatgactcctgtttgggctcctgtacctaacttgaatgcagacctcaaaaaattaaactgtagcccagattcatttcggtgtactttgacaaatattccacagacacaggctttactgaataaagctaagcttcctttaggattgttgttacatcccttcagagacctaacgcaattaccagtgataacatcaaataccattgtgaggtgccgatcctgtcgaacgtatattaacccctttgtatccttcattgatcaacgtagatggaaatgcaatttgtgctatagagtaaacgatgttcctgaagaatttatgtataacccccttacccgatcttatggagagcctcataaacgaccagaagttcagaattcaactgtggagttcattgcttcttcagattacatgctgcgtcctcctcaacctgcagtttacttgtttgttttagatgtgtctcataatgcagtggaagctggatatttgacaattttgtgccagtcactcctagaaaatctagacaagcttcctggagattcacgaacaagaataggattcatgacctttgatagcactattcatttctacaatttacaagaaggattatcacagcctcaaatgttgattgtgtctgatatagatgatgtttttctacctacaccggatagtttacttgtgaatctatatgaaagtaaagagcttataaaagacttactgaatgcattaccaaacatgttcaccaatacaagagaaacacacagtgcccttggtcctgcacttcaggctgcctttaaattaatgtctccaacaggtggccgtgtgtctgtatttcagacacagttaccttccttgggtgcaggacttctgcaatccagagaagatcctaatcagagatcaagtacaaaggtggtacaacatcttggccctgcaactgatttttataagaaacttgcattagattgctcgggacagcaaactgcagtggatttgttccttttaagttcacagtattctgatcttgcttctctagcttgcatgtccaagtattctgcagggtgcatctattattatccatcattccactatactcacaatccttcacaagcagaaaagttacaaaaagacctaaaacggtatctcacaagaaaaattgggtttgaagctgttatgagaataaggtgtactaaaggtctttcaatgcacacttttcacggtaacttctttgtccgttctactgatttgttatcccttgccaacatcaatcctgatgctggatttgcggtgcagttgtcaattgaagaaagtttaacagatacttccttagtatgttttcaaacagccctattatatacatcaagcaaaggtgagcggagaattagagtacatacactttgtttgccagtggtaagttcactagcagatgtatatgcgggagtggatgtacaagctgccatctgccttctggcaaacatggctgtggatcggtccgtttcatcaagtctgtcagatgcaagagatgccttagtgaatgctgtagtggactcattgtctgcatatggctcaactgtctcaaatttacagcactctgcattgatggcgcccagctccctcaagttgtttcctctctatgttttggcccttctcaaacagaaagcatttagaacgggtacaagcacacggctggatgatcgtgtatatgccatgtgtcagataaagtctcagccacttgttcatctaatgaaaatgattcatcccaacttatacaggatagacagattgacagatgagggtgcagtacatgttaatgacaggattgtaccacagccacctcttcaaaaattgtctgcagagaagctgacaagagaaggtgctttccttatggactgtggctctgttttttacatttgggttgggaaaggctgtgacaataacttcatagaggatgtgcttggatatactaattttgcatcaataccacagaaaatgacacatcttccagagctagatacactttcatcagaaagagccagatccttcataacttggcttagagacagcagaccattaagtccaatccttcacatagtaaaagatgagagtcctgccaaagcagaattttttcagcatttgattgaagaccggacagaggctgcattttcttactatgaatttttgcttcatgttcagcagcagatttgtaagtgaagtagaataaaattgaataagaaaaagatctataacctaggtaaagcataatctgtcagagaagcgcgtgagaaatttgaaatgaaggcatttgttaatacaagatgcaacgcacagcactctgtctgaggctttggtaaaaagtaaaggggaagaaagaacttgacagatctttttcaactcaaattaatggtaacgatgatgctgtttcaccaagtatattttgaattggtttctacacatttccagtagtatggcagtacagtgctctgttcattgcaagctggcaaatttatgtagctatgtggaatgatatgtcataatgtaaaattagataaattcttttttcttataattaatataacatttctggacttgaactctggcaagagatgccaaaaggcattggtaccgtgttatttgtttatatgaattactttttaacaaggaatgtttcttattcattaaatgaattcaacattttctctgtaaaaacaatagagtttcagtacatgaactatagaaaaaaatctatatataatgtacataaatgttacatttgtaaagaaaatgtaaaaatgtaactatagcatatgaattgcttaaactgtgctgcattgttggatgacaactctttttgtcacagttagagaatgaggttgactaatgcatattatgaattgagtccacaaaggaacacaaaactctttgtaattctgttaaatcttttatgtagatttatttatgatcagcctactaattaaaactatttcgcttgacaaaaaaaaaaaaaaaa

SEQ ID NO: 1134 - protein, 1268 aa, Homo sapiens
MSAPAGSSHPAASARIPPKFGGSAVSGAAAPAGPGAGPAPHQQNGPAQNQMQVPSGYGLHHQNYIAPSGHYSQGPGKMTSLPLDTQCGDYYSALYTVPTQNVTPNTVNQQPGAQQLYSRGPPAPHIVGSTLGSFQGAASSASHLHTSASQPYSSFVNHYNSPAMYSASSSVASQGFPSTCGHYAMSTVSNAAYPSVSYPSLPAGDTYGQMFTSQNAPTVRPVKDNSFSGQNTAISHPSPLPPLPSQQHHQQQSLSGYSTLTWSSPGLPSTQDNLIRNHTGSLAVANNNPTITVADSLSCPVMQNVQPPKSSPVVSTVLSGSSGSSSTRTPPTANHPVEPVTSVTQPSELLQQKGVQYGEYVNNQASSAPTPLSSTSDDEEEEEEDEEAGVDSSSTTSSASPMPNSYDALEGGSYPDMLSSSASSPAPDPAPEPDPASAPAPASAPAPVVPQPSKMAKPLAMAIQHFSLVIRMLQHHLFLEYSPSNPVYSGFQQYPQQYPGVNQLSSSIGGLSLQSSPQPESLRPVNLTQERNILPMTPVWAPVPNLNADLKKLNCSPDSFRCTLTNIPQTQALLNKAKLPLGLLLHPFRDLTQLPVITSNTIVRCRSCRTYINPFVSFIDQRRWKCNLCYRVNDVPEEFMYNPLTRSYGEPHKRPEVQNSTVEFIASSDYMLRPPQPAVYLFVLDVSHNAVEAGYLTILCQSLLENLDKLPGDSRTRIGFMTFDSTIHFYNLQEGLSQPQMLIVSDIDDVFLPTPDSLLVNLYESKELIKDLLNALPNMFTNTRETHSALGPALQAAFKLMSPTGGRVSVFQTQLPSLGAGLLQSREDPNQRSSTKVVQHLGPATDFYKKLALDCSGQQTAVDLFLLSSQYSDLASLACMSKYSAGCIYYYPSFHYTHNPSQAEKLQKDLKRYLTRKIGFEAVMRIRCTKGLSMHTFHGNFFVRSTDLLSLANINPDAGFAVQLSIEESLTDTSLVCFQTALLYTSSKGERRIRVHTLCLPVVSSLADVYAGVDVQAAICLLANMAVDRSVSSSLSDARDALVNAVVDSLSAYGSTVSNLQHSALMAPSSLKLFPLYVLALLKQKAFRTGTSTRLDDRVYAMCQIKSQPLVHLMKMIHPNLYRIDRLTDEGAVHVNDRIVPQPPLQKLSAEKLTREGAFLMDCGSVFYIWVGKGCDNNFIEDVLGYTNFASIPQKMTHLPELDTLSSERARSFITWLRDSRPLSPILHIVKDESPAKAEFFQHLIEDRTEAAFSYYEFLLHVQQQICK

SEQ ID NO: 1135 - DNA, 5618 bp, Homo sapiens
gttggctgatagttcaccttcaaatcttcaaattattataaaagaactgctttctatgcatcaccagcctgaccctgctcttaccaaggagtttgattaccttcccccagtggatagcaggtccagttcagggtttgtggggctgagaaatggtggtgcaacttgttatatgaatgcagtcttccagcagctgtatatgcaacctgggctccctgagtcattactttcagtggatgatgacacagacaatccagatgatagcgtgttttaccaagtgcagtctctctttggacatttaatggaaagcaagctgcagtactatgtacctgagaatttttggaagattttcaagatgtggaataaagaactttatgtgagagaacagcaggatgcatatgaattctttactagtctcattgatcagatggatgaatacctcaagaaaatggggagagaccaaatttttaagaatacatttcagggcatctactctgatcagaagatctgtaaagactgtcctcacagatatgagcgtgaagaagctttcatggctctcaatctaggagtgacttcttgtcagagtttggaaatttctttggaccaatttgttagaggagaagttctagaaggaagtaatgcgtactactgtgaaaagtgtaaagaaaagagaataacagtgaaaaggacctgtattaaatctttacctagcgtcttggtaattcacctaatgagatttgggtttgactgggaaagcggacgctccattaaatatgatgaacaaataaggtttccctggatgctaaacatggagccttacacagtttcaggaatggctcgccaagattcttcttctgaagttggggaaaatgggcgaagtgtggatcagggcggtggaggatccccacgaaaaaaggttgccctcacagaaaactatgaacttgtcggtgtcatcgtacacagtgggcaggcacacgcaggccactactattccttcattaaggacaggcgagggtgtggaaaaggaaagtggtataaatttaatgacacagttatagaagaatttgacctaaatgacgagaccctggagtatgaatgctttggaggagaatatagaccaaaagtttatgatcaaacaaacccatacactgatgtgcgccgaagatactggaatgcctatatgcttttctaccaaagggtgtctgatcagaactccccagtattaccaaagaaaagtcgagtcagcgttgtacggcaggaagctgaggatctctctctgtcagctccatcttcaccagaaatttcacctcagtcatcccctcggccccataggccgaacaatgaccggctgtctattcttaccaagctggttaaaaaaggcgagaagaaaggactgtttgtggagaaaatgcctgctcgaatataccagatggtgagagatgagaacctcaagtttatgaagaatagagatgtatacagtagtgattatttcagttttgttttgtctttagcttcattgaatgctactaaattaaagcatccatattatccttgcatggcaaaggtgagcttacagcttgctattcaattcctttttcaaacttatctacggacaaagaagaaactcagggttgatactgaagaatggattgctaccattgaagcattgctttcaaaaagttttgatgcttgtcagtggttagttgaatattttattagttctgaaggacgagaattgataaagattttcttactggagtgcaatgtgagagaagtacgagttgctgtggccaccattctggagaaaaccctagacagtgccttgttttatcaggataagttaaaaagccttcatcagttactggaggtactacttgctctgttggacaaagacgtcccagaaaattgtaaaaactgtgctcagtactttttcctgttcaacacttttgtacaaaagcaaggaattagggctggagatcttcttctgaggcattcagctctgcggcacatgatcagcttcctcctaggggccagtcggcaaaacaatcagatacgtcgatggagttcagcacaagcacgagaatttgggaatcttcacaatacagtggcgttacttgttttgcattcagatgtctcatcccaaaggaatgttgctcctggcatatttaagcaacgaccacccattagcattgctccctcaagccctctgttgcccctccatgaggaggtagaagccttgttgttcatgtctgaagggaaaccttacctgttagaggtaatgtttgctttgcgggagctgacaggctcgctcttggcactcattgagatggtagtgtactgctgtttctgtaatgagcatttttccttcacaatgctgcatttcattaagaaccaactagaaacggctccacctcatgagttaaagaatacgttccaactacttcatgaaatattggttattgaagatcctatacaagcagagcgagttaaatttgtgtttgagacagaaaatggattactagctttgatgcaccacagtaatcatgtggacagtagtcgctgctaccagtgtgtcaaatttcttgtcactcttgctcaaaagtgtcctgcagctaaggagtacttcaaggagaattcccaccactggagctgggctgtgcagtggctacagaagaagatgtcagaacattactggacaccacagagtaatgtctctaatgaaacatcaactggaaaaacctttcagcgaaccatttcagctcaggacacgttagcgtatgccacagctttgttgaatgaaaaagagcaatcaggaagcagtaatgggtcggagagtagtcctgccaatgagaacggagacaggcatctacagcagggttcagaatctcccatgatgattggtgagttgagaagtgaccttgatgatgttgatccctagaggaacatgcccagcctgagaggagtcaagacacaatactggatgctcagcaccttcttggaatcagaatctcgaaccctttggaagagcctggagattggactgggaaagctgctgtgacttgggcggatcgtgtatttctcaaggaaagcatttttaagccactagaaggtttgggagctgtttggcagtgggagaactccggcatgtggatcagctgtcccgggagcgtggtctatatgtggattcacatttctgtggagattttcggaaatagagccagtggcagacttttttgttacacgaacatacaagagtgagcataaagctgttgctttctctacgatgctacaaaagaaattcctttggtttttatattttaagaaaaagcaagctgcttttagatatgtgggggcaaatttttaatcttgcagtaatattaaacaggaatatccaatttaaaatgatgtaaagatgtaataaaattccttttcattgtaaaatagtaattaagtcaatttacacagacctttgtatttaatatgtctccctatttgtatagaatttcagatgggtctagatgagaaccctatgcataagcttggatcttgatgaaaggttaccaggatcaggatcaaaaattgggaaatactaagctcttgaagatatttttctgatataattagattgaaaagagcaattttgaaaatgctgtgttctccagaagtacagggtgcattatttgacatcaattacttaaagaagttatgagttgttccccaaacagattttaaaaacagcaaaataaaagcactttaagatataattttactgagtttaacttcacagaattatctttttaatgcttggagacatattgaataaactgtagtcttaaatcatgtgatctgcaatcgtttgcttttgcttaaaacataattactgaaacccttggtattggttgtatatgaagttaactatttgagttggtacacactgcttgtgagtttcatagttattgtaatgcagagaaggaatttgagaatttgtttctcctcaacatgactaattaacactgaaaagtcagtcaaggtttaagatttattttcccagaaataaatataaagcaattgaataaccatccatttagtcgtatttccaaagtatagcaccattcactcatttataccagctcccttttatggtgtgggggagaggtttacacccacatatttcatatatattttgtacattttgtattttgaattgctcacattttcggccctgttttgcctttagttacaggtcctgccttattttcatctcaccatgcacagaactagggagccttaggaagtgccaggttttcactgtcagatttgccaagtcacagaggcgcagccagccctgaagtgcctgtctggctgctgtggcattgtgtgggcatgtggccaggcagatggcatctcattactgtgctctcgccatggcccagtcttttcattctctggcagtgagggtttctgtgctgtcagacttcattgttattctgtgacttgctggaggttggcagtggcctttgtcaaacacactgagaagatggaagggccagcacttaagagcagaactgtacccttagagaaacggacagaggcgagtggcaaacttcagacggttccaatggtcttgcagtttgaaatgtgatgttctaccattggttttgagtacgtgaatacttcctgtcctactgtttcccctaccctattctcaccttctctccgcccacatcctcaccaagagattgtgtgggacatgaccttgaaatgctggcgatgatccacactgggatatcatcgctggcgactgcactctcaggagcccaaaatcaggagtgaaattgccacttctagtccccttatttcctatggaaacaacgccttccgcacccctagcacctgccgtcctcactgtaaaggttcatcaggatcgtccaccgtgtatattatacgcttcagatcatgttgcttatattgttgctgcaatgaccatcgttttcactttgctggtaaccacttgattgctgacagctacagtcaatgaacctgctgatgactttttttaatgtagtacaacagtgacagttatgacaggcttaccttggaagagttgtcatttttactgccaattttttggatgaagatgtttttataaacctttcaaaatggtctgcaaacagagcaggaattgcacaattaactcaataatgctgtgtgttctcaagaagctcccttagtgaggccgatcttaagatggccgattctgcccgttgaaggcatcctgggaaagaaaacaagcatcccagcgggcatctcaccacgacttctcctggagtcctcacacggtcactgacaactacagtcagttttaggaactagagtgccgtatcatcagacttaccctgtcctgccccaccttccctgctaacatcgaggtgtgtgcagttaccttctgagcttggaacaagcagactggaattttcctctgctacctcttgtgtataaaatcttgtttataaaatttcaaaaggaagtagatacactagggaagaaccttaattctaaatttggttcatgtgtggcaaagttcttagcttctaagagtataaaataaatttttcaaaaac

SEQ ID NO: 1136 - protein, 977 aa, Homo sapiens
LADSSPSNLQIIIKELLSMHHQPDPALTKEFDYLPPVDSRSSSGFVGLRNGGATCYMNAVFQQLYMQPGLPESLLSVDDDTDNPDDSVFYQVQSLFGHLMESKLQYYVPENFWKIFKMWNKELYVREQQDAYEFFTSLIDQMDEYLKKMGRDQIFKNTFQGIYSDQKICKDCPHRYEREEAFMALNLGVTSCQSLEISLDQFVRGEVLEGSNAYYCEKCKEKRITVKRTCIKSLPSVLVIHLMRFGFDWESGRSIKYDEQIRFPWMLNMEPYTVSGMARQDSSSEVGENGRSVDQGGGGSPRKKVALTENYELVGVIVHSGQAHAGHYYSFIKDRRGCGKGKWYKFNDTVIEEFDLNDETLEYECFGGEYRPKVYDQTNPYTDVRRRYWNAYMLFYQRVSDQNSPVLPKKSRVSVVRQEAEDLSLSAPSSPEISPQSSPRPHRPNNDRLSILTKLVKKGEKKGLFVEKMPARIYQMVRDENLKFMKNRDVYSSDYFSFVLSLASLNATKLKHPYYPCMAKVSLQLAIQFLFQTYLRTKKKLRVDTEEWIATIEALLSKSFDACQWLVEYFISSEGRELIKIFLLECNVREVRVAVATILEKTLDSALFYQDKLKSLHQLLEVLLALLDKDVPENCKNCAQYFFLFNTFVQKQGIRAGDLLLRHSALRHMISFLLGASRQNNQIRRWSSAQAREFGNLHNTVALLVLHSDVSSQRNVAPGIFKQRPPISIAPSSPLLPLHEEVEALLFMSEGKPYLLEVMFALRELTGSLLALIEMVVYCCFCNEHFSFTMLHFIKNQLETAPPHELKNTFQLLHEILVIEDPIQAERVKFVFETENGLLALMHHSNHVDSSRCYQCVKFLVTLAQKCPAAKEYFKENSHHWSWAVQWLQKKMSEHYWTPQSNVSNETSTGKTFQRTISAQDTLAYATALLNEKEQSGSSNGSESSPANENGDRHLQQGSESPMMIGELRSDLDDVDP

SEQ ID NO: 1137 - DNA, 2536 bp, Homo sapiens
ggggggaggggggcgtgtttctgggcctgccccagacactgcccttggctgccagcctaccctgcctgcactcctccaccatcacaatctcacccaaactcctgctcactcaagcaaaagcagcctctggccttccctccaccgctttgctccatctggcttaccactctccagggcctcctggggagcctgtcctgtgttcactttgtttcaggctggtctgtgccccgtgagccacatggcctagggtgatgccaggttgtcccgtcactggggtcccatctgtaaattctttgcgcccttcccggctgctgcctggggccctttcctgctctcccgtccgctgtgggtggtccccagcactcctctgtgggttttaccggaaaggtggccccagctgttgacttccagtcactgtcccagacggcacaaggttttctgtaggaaagctgccattgccccggccccttttcttcctttgtcccgttgtcgaggttttttcaaatagcgtgttgttcagtatgcaaatcaattattttaagaatcgcttttgtaaatatctttgtgaatattttagtatcgtctttgataatattcaacattttcatgacctggttatagcctttgctggtgtttttaaaatacctggactcaatgacaaagaccgagtcttctttttttttaaacaaaaacaaaaaaagcaaccagggctatttgtacagttgaaggggtgaacagaatgggcggctgtgctgggagttggaagaccgggcagcccgctatttagagccatccctcagtcagctggcagggacaagccaacgccaggtagcatgtggccacccttgcccagtgtctgtggcctggcaagtggccacgccctgtgtcagaccatctgggaattaagctccagacagacttacagatgccttccttaggagttcttgcttcttgcgttgatactttgccccagaaaggcctgggattcattctggttcttatcagggtgtgtccacactctgctcacaggtggatccacggctttccagtgcggagagtcgagatgctccctgcagcccaggccccgggcacctcctgcaaccatctctgggctcagcacctgaggcgggtttcctgggtcccctctccagcaagcctccaccagcaagctcggcccagagcttcccttccggctggctctgaaccgtgcgtggtgcctacagcctgcagtctggagacaagctcttccggagtgctctgggagccaggccagggtgtgagggaggtgcagaggcatccggggcgggagcaagccccaggttgtgacaggtgcaggtagacaacgcccataaacagagatggtcctgaactctggagagatccttccctgatcctttcggacgactacttggagccataagtaacctcagcaaaaacgaggcctctgcaagccacttttccatgccaagcatccacccggcccacaggcatgtttctgccgccactccgcaagatggacagggagccagcaggcaggcgggaagggccaagtacaggcaatcacccccatcttcttggtttgaagctttatccatgtatcatgttccgtgtagccattttattttttaagaaactgctaatactttctccctaatggaagccctgatcccccagagagctacaggtctgctcccgacgggcctcgggcctgacccgtccacacagggccgtgtcaacagcagcgactcaagggacgtgtgtacatatgtaaatgagaaatagagacgtgtcaacagatgcattcatttctcttggaatgtgtattgtttttattttgcgaaacaaaacaaaacaaaaaaaaaagcttggaactccatcacgtggaaaaactagatcctgttggttatagcatttgtgagttctccacgtctgtctctctcgctcatgtaatatactctgaccctgagtggaaaggggtttttgttctgtttttattttacctacatgtactatttagcttcagtgtactagtcctgccacctgtgtatttttagggtgctatggaaataatgaaaagaaacggggatttcagaagaaaattgtaaccaaattcatactttgtataatttttgatatcatgatcacaggtgattcacacgtacacacataaacacacccaccagtgcagcctgaagtaactcccacagaaaccatcatcgtctttgtacatcgtatgtacaatgcaatcatttcatactttaaactggtcaaaaaactaattgtgatttctagtcttgcaaagctgtatgtagttagatgatgtgacaacctctaatatttatctaataaatatgtattcagatgaaacctgtatattaggtgttcatgtggttattttgtatttaaagatcaaattatttgactattgctagacatttctatactctgttgtaacactgaggtatctcatttgcccatgttaatttttttctaaataaattgacaaaaacaaaaaaaaaaaaaaaaagggcggccg

SEQ ID NO: 1138 - DNA, 1477 bp, Homo sapiens
atgaaccacaagagcaagaagcgcatccgcgaggccaagcggagtgcgcggccggagctcaaggactcgctggattggacccggcacaactactacgagagcttctcgctgagcccggcggccgtggcggataacgtggaaagggcagatgctttacagctgtctgtggaagaatttgtggagcggtatgaaagaccttacaagcccgtggttttgttgaatgcgcaagagggctggtctgcgcaggagaaatggactctggagcgcctaaaaaggaaatatcggaaccagaagttcaagtgtggtgaggataacgatggctactcagtgaagatgaagatgaaatactacatcgagtacatggagagcactcgagatgatagtcccctttacatctttgacagcagctatggtgaacaccctaaaagaaggaaacttttggaagactacaaggtgccaaagtttttcactgatgaccttttccagtatgctggggagaagcgcaggcccccttacaggtggtttgtgatggggccaccacgctccggaactgggattcacatcgaccctctgggaaccagtgcctggaatgccttagttcagggccacaagcgctggtgcctgtttcctaccagcactcccagggaactcatcaaagtgacccgagacgaaggagggaaccagcaagacgaagctattacctggtttaatgttatttatccccggacacagcttccaacctggccacctgaattcaaacccctggaaatcttacaaaaaccaggagagactgtctttgtaccaggaggctggtggcatgttgtcctcaatctcgacactactatcgccatcacccaaaattttgccagcagcaccaacttccctgtggtatggcacaagacggtaagagggagaccaaagttatcaaggaaatggtataggattttgaagcaagagcaccccgagttggcagtcctcgcagactcggttgaccttcaggagtccacagggatagcttccgacagctccagcgactcttccagctcctccagctccagttcgtcagactccgactcagagaggattagggacacttgtggaggccgggctcacccctgagcagataaagagactctccctgaggtgctttcagcgtaagcttttggcagccacccaactcagttctcgcatcttctgctcctaccttctcctctgtcttctttgaatttggatattccttccctggtccaagctcctatcttcggtcaaatgctgtttttactgcttcctaaggatagattatcaagaaatttaacagctcggccagctcagtgaaacactgaagctaatgggatgttgggtaagaaggttctgtgctgtctcattgaaaaccgagccagtcaaccacaaggctggcagggtgtgatccttgtaacgtcttgtgtctgttacctcacggatgtcggtaaggagtttc

SEQ ID NO: 1139 - protein, 372 aa, Homo sapiens
MNHKSKKRIREAKRSARPELKDSLDWTRHNYYESFSLSPAAVADNVERADALQLSVEEFVERYERPYKPVVLLNAQEGWSAQEKWTLERLKRKYRNQKFKCGEDNDGYSVKMKMKYYIEYMESTRDDSPLYIFDSSYGEHPKRRKLLEDYKVPKFFTDDLFQYAGEKRRPPYRWFVMGPPRSGTGIHIDPLGTSAWNALVQGHKRWCLFPTSTPRELIKVTRDEGGNQQDEAITWFNVIYPRTQLPTWPPEFKPLEILQKPGETVFVPGGWWHVVLNLDTTIAITQNFASSTNFPVVWHKTVRGRPKLSRKWYRILKQEHPELAVLADSVDLQESTGIASDSSSDSSSSSSSSSSDSDSERIRDTCGGRAHP

SEQ ID NO: 1140 - DNA, 3339 bp, Homo sapiens
atgaggagggacgagcgagacgccaaagccatgcggtccctgcagccgccggatggggccggctcgccccccgagagtctgaggaacggctacgtgaagagctgcgtgagccccttgcggcaggaccctccgcgcggcttcttcttccacctctgccgcttctgcaacgtggagctgcggccgccgccggcctctccccagcagccgcggcgctgctcccccttctgccgggcgcgcctctcgctgggcgccctggctgtctttgtcctcgccctgctgctgggcgcggaacccgagagctgggctgccggggccgcctggctgcggacgctgctgagcgtgtgttcgcacagcttgagccccctcttcagcatcgcctgtgccttcttcttcctcacctgcttcctcacccggaccaagcggggacccggcccgggccggagctgcggctcctggtggctgctggcgctgcccgcctgctgttacctgggggacttcttggtgtggcagtggtggtcttggccttggggggatggcgacgcagggtccgcggccccgcacacgcccccggaggcggcagcgggcaggttgctgctggtgctgagctgcgtagggctgctgctgacgctcgcgcacccgctgcggctccggcactgcgttctggtgctgctcctggccagcttcgtctggtgggtctccttcaccagcctcgggtcgctgccctccgccctcaggccgctgctctccggcctggtggggggcgctggctgcctgctggccctggggttggatcacttctttcaaatcagggaagcgcctcttcatcctcgactgtccagtgccgccgaagaaaaagtgcctgtgatccgaccccggaggaggtccagctgcgtgtcgttaggagaaactgcagccagttactatggcagttgcaaaatattcaggagaccgtcgttgccttgtatttccagagaacagatgattctttgggattgggacttaaaacaatggtataagcctcattatcaaaattctggaggtggaaatggagttgatctttcagtgctaaatgaggctcgcaatatggtgtcagatcttctgactgatccaagccttccaccacaagtcatttcctctctacggagtattagtagcttaatgggtgctttctcaggttcctgtaggccaaagattaatcctctcacaccatttcctggattttacccctgttctgaaatagaggacccagctgagaaaggggatagaaaacttaacaagggactaaataggaatagtttgccaactccacagctgaggagaagctcaggaacttcaggattgctacctgttgaacagtcttcaaggtgggatcgtaataatggcaaaaggcctcaccaagaatttggcatttcaagtcaaggatgctatctaaatgggccttttaattcaaatctactgactatcccgaagcaaaggtcatcttctgtatcactgactcaccatgtaggtctcagaagagctggtgttttgtccagtctgagtcctgtgaattcttccaaccatggaccagtgtctactggctctctaactaatcgatcacccatagaatttcctgatactgctgattttcttaataagccaagcgttatcttgcagagatctctgggcaatgcacctaatactccagatttttatcagcaacttagaaattctgatagcaatctgtgtaacagctgtggacatcaaatgctgaaatatgtttcaacatctgaatcagatggtacagattgctgcagtggaaaatcaggtgaagaagaaaacattttctcgaaagaatcattcaaacttatggaaactcaacaagaagaggaaacagagaagaaagacagcagaaaattatttcaggaaggtgataagtggctaacagaagaggcacagagtgaacagcaaacaaatattgaacaggaagtatcactggacctgattttagtagaagagtatgactcattaatagaaaagatgagcaactggaattttccaatttttgaacttgtagaaaagatgggagagaaatcaggaaggattctcagtcaggttatgtataccttatttcaagacactggtttattggaaatatttaaaattcccactcaacaatttatgaactattttcgtgcattagaaaatggctatcgagacattccttatcacaatcgtatacatgccacagatgtgctacatgcagtttggtatctgacaacgcggccagttcctggcttacagcagatccacaatggttgtggaacaggaaatgaaacagattctgatggtagaattaaccatgggcgaattgcttatatttcttcgaagagctgctctaatcctgatgagagttatggctgcctgtcttcaaacattcctgcattagaattgatggctctatacgtggcagctgccatgcatgattatgatcacccagggaggacaaatgcatttctagtggctacaaatgcccctcaggcagttttatacaatgacagatctgttctggaaaatcatcatgctgcgtcagcttggaatctatatctttctcgcccagaatacaacttccttcttcatcttgatcatgtggaattcaagcgctttcgttttttagtcattgaagcaatccttgctacggatcttaaaaagcattttgattttctcgcagaattcaatgccaaggcaaatgatgtaaatagtaatggcatagaatggagtaatgaaaatgatcgcctcttggtatgccaggtgtgcatcaaactggcagatataaatggcccagcaaaagttcgagacttgcatttgaaatggacagaaggcattgtcaatgaattttatgagcagggagatgaagaagcaaatcttggtctgcccatcagtccattcatggatcgttcttctcctcaactagcaaaactccaagaatcttttatcacccacatagtgggtcccctgtgtaactcctatgatgctgctggtttgctaccaggtcagtggttagaagcagaagaggataatgatactgaaagtggtgatgatgaagacggtgaagaattagatacagaagatgaagaaatggaaaacaatctaaatccaaaaccaccaagaaggaaaagcagacggcgaatattttgtcagctaatgcaccacctcactgaaaaccacaagatatggaaggaaatcgtagaggaagaagaaaaatgtaaagctgatgggaataaactgcaggtggagaattcctccttacctcaagcagatgagattcaggtaattgaagaggcagatgaagaggaatag

SEQ ID NO: 1141 - protein, 1112 aa, Homo sapiens [sequence omitted]

SEQ ID NO: 1142 - DNA, 3339 bp, Homo sapiens
atgaggagggacgagcgagacgccaaagccatgcggtccctgcagccgccggatggggccggctcgccccccgagagtctgaggaacggctacgtgaagagctgcgtgagccccttgcggcaggaccctccgcgcggcttcttcttccacctctgccgcttctgcaacgtggagctgcggccgccgccggcctctccccagcagccgcggcgctgctcccccttctgccgggcgcgcctctcgctgggcgacctggctgcctttgtcctcgccctgctgctgggagcggaacccgagagctgggctgccggggccgcctggctgcggacgctgctgagcgtgtgttcgcacagcttgagccccctcttcagcatcgcctgtgccttcttcttcctcacctgcttcctcacccggaccaagcggggacccggcccgggccggagctgcggctcctggtggctgctggcgctgcccgcctgctgttacctgggggacttcttggtgtggcagtggtggtcttggccttggggggatggcgacgcagggtccgcggccccgcacacgcccccggaggcggcagcgggcaggttgctgctggtgctgagctgcgtagggctgctgctgacgctcgcgcacccgctgcggctccggcactgcgttctggtgctgctcctggccagcttcgtctggtgggtctccttcaccagcctcgggtcgctgccctccgccctcaggccgctgctctccggcctggtggggggcgctggctgcctgctggccctggggttggatcacttctttcaaatcagggaagcgcctcttcatcctcgactgtccagtgccgccgaagaaaaagtgcctgtgatccgaccccggaggaggtccagctgcgtgtcgttaggagaaactgcagccagttactatggcagttgcaaaatattcaggagaccgtcgttgccttgtatttccagagaacagatgattctttgggattgggacttaaaacaatggtataagcctcattatcaaaattctggaggtggaaatggagttgatctttcagtgctaaatgaggctcgcaatatggtgtcagatcttctgactgatccaagccttccaccacaagtcatttcctctctacggagtattagtagcttaatgggtgctttctcaggttcctgtaggccaaagattaatcctctcacaccatttcctggattttacccctgttctgaaatagaggacccagctgagaaaggggatagaaaacttaacaagggactaaataggaatagtttgccaactccacagctgaggagaagctcaggaacttcaggattgctacctgttgaacagtcttcaaggtgggatcgtaataatggcaaaaggcctcaccaagaatttggcatttcaagtcaaggatgctatctaaatgggccttttaattcaaatctactgactatcccgaagcaaaggtcatcttctgtatcactgactcaccatgtaggtctcagaagagctggtgttttgtccagtctgagtcctgtgaattcttccaaccatggaccagtgtctactggctctctaactaatcgatcacccatagaatttcctgatactgctgattttcttaataagccaagcgttatcttgcagagatctctgggcaatgcacctaatactccagatttttatcagcaacttagaaattctgatagcaatctgtgtaacagctgtggacatcaaatgctgaaatatgtttcaacatctgaatcagatggtacagattgctgcagtggaaaatcaggtgaagaagaaaacattttctcgaaagaatcattcaaacttatggaaactcaacaagaagaggaaacagagaagaaagacagcagaaaattatttcaggaaggtgataagtggctaacagaagaggcacagagtgaacagcaaacaaatattgaacaggaagtatcactggacctgattttagtagaagagtatgactcattaatagaaaagatgagcaactggaattttccaatttttgaacttgtagaaaagatgggagagaaatcaggaaggattctcagtcaggttatgtataccttatttcaagacactggtttattggaaatatttaaaattcccactcaacaatttatgaactattttcgtgcattagaaaatggctatcgagacattccttatcacaatcgtatacatgccacagatgtgctacatgcagtttggtatctgacaacacggccagttcctggcttacagcagatccacaatggttgtggaacaggaaatgaaacagattctgatggtagaattaaccatgggcgaattgcttatatttcttcgaagagctgctctaatcctgatgagagttatggctgcctgtcttcaaacattcctgcattagaattgatggctctatacgtggcagctgccatgcatgattatgatcacccagggaggacaaatgcatttctagtggctacaaatgcccctcaggcagttttatacaatgacagatctgttctggaaaatcatcatgctgcgtcagcttggaatctatatctttctcgcccagaatacaacttccttcttcatcttgatcatgtggaattcaagcgctttcgttttttagtcattgaagcaatccttgctacggatcttaaaaagcattttgattttctcgcagaattcaatgccaaggcaaatgatgtaaatagtaatggcatagaatggagtaatgaaaatgatcgcctcttggtatgccaggtgtgcatcaaactggcagatataaatggcccagcaaaagttcgagacttgcatttgaaatggacagaaggcattgtcaatgaattttatgagcagggagatgaagaagcaaatcttggtctgcccatcagtccattcatggatcgttcttctcctcaactagcaaaactccaagaatcttttatcacccacatagtgggtcccctgtgtaactcctatgatgctgctggtttgctaccaggtcagtggttagaagcagaagaggataatgatactgaaagtggtgatgatgaagacggtgaagaattagatacagaagatgaagaaatggaaaacaatctaaatccaaaaccaccaagaaggaaaagcagacggcgaatattttgtcagctaatgcaccacctcactgaaaaccacaagatatggaaggaaatcgtagaggaagaagaaaaatgtaaagctgatgggaataaactgcaggtggagaattcctccttacctcaagcagatgagattcaggtaattgaagaggcagatgaagaggaatag

SEQ ID NO: 1143 - protein, 1112 aa, Homo sapiens
MRRDERDAKAMRSLQPPDGAGSPPESLRNGYVKSCVSPLRQDPPRGFFFHLCRFCNVELRPPPASPQQPRRCSPFCRARLSLGDLAAFVLALLLGAEPESWAAGAAWLRTLLSVCSHSLSPLFSIACAFFFLTCFLTRTKRGPGPGRSCGSWWLLALPACCYLGDFLVWQWWSWPWGDGDAGSAAPHTPPEAAAGRLLLVLSCVGLLLTLAHPLRLRHCVLVLLLASFVWWVSFTSLGSLPSALRPLLSGLVGGAGCLLALGLDHFFQIREAPLHPRLSSAAEEKVPVIRPRRRSSCVSLGETAASYYGSCKIFRRPSLPCISREQMILWDWDLKQWYKPHYQNSGGGNGVDLSVLNEARNMVSDLLTDPSLPPQVISSLRSISSLMGAFSGSCRPKINPLTPFPGFYPCSEIEDPAEKGDRKLNKGLNRNSLPTPQLRRSSGTSGLLPVEQSSRWDRNNGKRPHQEFGISSQGCYLNGPFNSNLLTIPKQRSSSVSLTHHVGLRRAGVLSSLSPVNSSNHGPVSTGSLTNRSPIEFPDTADFLNKPSVILQRSLGNAPNTPDFYQQLRNSDSNLCNSCGHQMLKYVSTSESDGTDCCSGKSGEEENIFSKESFKLMETQQEEETEKKDSRKLFQEGDKWLTEEAQSEQQTNIEQEVSLDLILVEEYDSLIEKMSNWNFPIFELVEKMGEKSGRILSQVMYTLFQDTGLLEIFKIPTQQFMNYFRALENGYRDIPYHNRIHATDVLHAVWYLTTRPVPGLQQIHNGCGTGNETDSDGRINHGRIAYISSKSCSNPDESYGCLSSNIPALELMALYVAAAMHDYDHPGRTNAFLVATNAPQAVLYNDRSVLENHHAASAWNLYLSRPEYNFLLHLDHVEFKRFRFLVIEAILATDLKKHFDFLAEFNAKANDVNSNGIEWSNENDRLLVCQVCIKLADINGPAKVRDLHLKWTEGIVNEFYEQGDEEANLGLPISPFMDRSSPQLAKLQESFITHIVGPLCNSYDAAGLLPGQWLEAEEDNDTESGDDEDGEELDTEDEEMENNLNPKPPRRKSRRRIFCQLMHHLTENHKIWKEIVEEEEKCKADGNKLQVENSSLPQADEIQVIEEADEEE

SEQ ID NO: 1144 - DNA, 2725 bp, Homo sapiens
gcatgccccatcagccttcagcttgagcccggcggcccccgcccccgccccctgccaccctgcactgccccggctcccccgcggcccccacgctgcagtgcggccgggccccctccccgcaggggccgcccccgccgcccacccctagcgcccgtggtggtggtggtggtggtggtggtggtggcccgggccgcagggccatgaaactacaggccgtgatggagacgctgttgcagcggcagcagcgggcgcgccaggagctggaggcccggcagcagctgccccccgatccccctgctgcaccccccggccgggcccgggctgcccccgacgaggacagagagcccgagagtgcccggatgcagcgggctcagatggccgcactggcagccatgcgggctgcagctgcgggcctgggacacccagccagccccggcggctctgaggatgggcccccaggctcggaggaggaggacgcggcccgggaggggacaccgggctcacccgggcgaggcagagaagggccaggagaggagcactttgaggacatggcctccgacgaggacatgaagcccaaatgggaggaggaggagatggaggaagacctcggggaggatgaggaggaggaggaggaggattacgaggatgaggaggaggaggaggacgaggaggggctgggccccccaggccctgccagcttgggcaccacggcactgttcccccgaaaggcccagccaccccaggccttccgcggcgatggcgttcccagggtgctggggggccaggagcggccggggcctggccctgcccaccccggaggggccgcccacgtagccccgcagctgcagccgcctgaccacggcgactggacttacgaggagcagtttaagcagctctacgaactcgacggggaccccaagaggaaggaattcctggatgacttgttcagcttcatgcagaagcgagggacacctgtgaaccgcatccccatcatggccaaacaggtccttgacctgttcatgctgtacgtgctggtgacggagaagggcggcctcgtggaggtcatcaacaagaagctgtggcgtgagatcaccaagggcctcaacctgcccacgtccatcaccagtgcagccttcaccctgcggacccaatacatgaagtacctgtacccctacgagtgtgagaagcggggcctcagtaaccccaatgagctccaggcagccatagacagcaaccgacgggagggccggcgccagagctttggtggctccctctttgcctactcgccaggcggggcacacggcatgctctcctcacccaagctacccgtgtcctccctgggcctggccgcaagcaccaatggcagctccatcacccccgcccctaagatcaagaaagaggaggactcagccatccccatcacagtccctggccgcctgcctgtgtccctggcgggccaccctgtggtggcagcccaggcagcagctgtgcaagcagcagccgcccaagcagctgtggccgcacaggcagctgccctggaacagctgcgggagaagctggagtctgcagagcctccggagaagaagatggccctggtggccgatgagcagcaacggctgatgcaacgtgcactccagcagaacttcctggccatggcggcccagctgcccatgagcattcggatcaacagccaagcctccgaaagccgccaggactctgctgtgaacctgacgggcaccaacggcagcaacagcatcagcatgtcggtggagatcaacggcatcatgtacacaggagttctgtttgctcagccgccggcccccacgccaacctctgctcccaacaaaggaggcggcggcggcggcggcagcagcagcaacgcaggcggccggggaggaaacaccggaaccagcggcggccaggctgggccagcggggctgtccacaccctccacatctacctcaaataactcgttgccttaaccgcatcactccccacccgccacccaccctggagcccgccggcctgggcagggggtccaggtgggccacacaggggccaggatggcggaagatacgggtggggagggaagatatccagaaaggagccacagctgacgccaaaaagaaaagaaaaaagatatatatatatatatatatatatatacgtatatatataaagaagaatttaataaaacaggggaaaaccaaggaacacttgaatttctcaggttttggacattcagagagatgaattgtgagaacagcaaagaaatccatcagaaaaacagaaagaggcagacgtttcccagggcgttcaggcagccctgatggaccgaaggctctggtgtctggtttggccccacagcagtgtgggccgatcctgtttacctcatacatccctgcactgtgtgttttcatttttgtctgctttagttctcttttattttctattcaccacacactcaccactcccagcttctcgtgtccagtgaaacccctgaaccaagatcactgaatttttgtttttttcttgttgctttgggaaatttttttttctctgtagggtttttaagaggtttcgggggttttgttgtgtaaatattctattttattcttggggggatcaaaccttaggaaaaggatatctatatatctatatagctatatatttgtgttccttcagggaaactggtcttgaaaaagcaagaaaaaaaagcaaaaaa

SEQ ID NO: 1145 - protein, 593 aa, Homo sapiens
MKLQAVMETLLQRQQRARQELEARQQLPPDPPAAPPGRARAAPDEDREPESARMQRAQMAALAAMRAAAAGLGHPASPGGSEDGPPGSEEEDAAREGTPGSPGRGREGPGEEHFEDMASDEDMKPKWEEEEMEEDLGEDEEEEEEDYEDEEEEEDEEGLGPPGPASLGTTALFPRKAQPPQAFRGDGVPRVLGGQERPGPGPAHPGGAAHVAPQLQPPDHGDWTYEEQFKQLYELDGDPKRKEFLDDLFSFMQKRGTPVNRIPIMAKQVLDLFMLYVLVTEKGGLVEVINKKLWREITKGLNLPTSITSAAFTLRTQYMKYLYPYECEKRGLSNPNELQAAIDSNRREGRRQSFGGSLFAYSPGGAHGMLSSPKLPVSSLGLAASTNGSSITPAPKIKKEEDSAIPITVPGRLPVSLAGHPVVAAQAAAVQAAAAQAAVAAQAAALEQLREKLESAEPPEKKMALVADEQQRLMQRALQQNFLAMAAQLPMSIRINSQASESRQDSAVNLTGTNGSNSISMSVEINGIMYTGVLFAQPPAPTPTSAPNKGGGGGGGSSSNAGGRGGNTGTSGGQAGPAGLSTPSTSTSNNSLP

SEQ ID NO: 1146 - DNA, 1932 bp, Homo sapiens
atgcaggccccacgggagctcgcggtgggcatcgacctgggcaccacctactcgtgcgtgggcgtgtttcagcagggccgcgtggagatcctggccaacgaccagggcaaccgcaccacgcccagctacgtggccttcaccgacaccgagcggctggtcggggacgcggccaagagccaggcggccctgaacccccacaacaccgtgttcgatgccaagcggctgatcgggcgcaagttcgcggacaccacggtgcagtcggacatgaagcactggcccttccgggtggtgagcgagggcggcaagcccaaggtgccggtatcgtaccgcggggaggacaagacgttctaccccgaggagatctcgtccatggtgctgagcaagatgaaggagacggccgaggcgtacctgggccagcccgtgaagcacgcagtgatcaccgtgcccgcctatttcaatgactcgcagcgccaggccaccaaggacgcgggggccatcgcggggctcaacgtgttgcggatcatcaatgagcccacggcagctgccatcgcctatgggctggaccggcggggcgcgggagagcgcaacgtgctcatttttgacctgggtgggggcaccttcgatgtgtcggttctctccattgacgctggtgtctttgaggtgaaagccactgctggagatacccacctgggaggagaggacttcgacaaccggctcgtgaaccacttcatggaagaattccggcggaagcatgggaaggacctgagcgggaacaagcgtgccctcggcaggctgcgcacagcctgtgagcgcgccaagcgcaccctgtcctccagcacccaggccaccctggagatagactccctgttcgagggcgtggacttctacacgtccatcactcgtgcccgctttgaggaactgtgctcagacctcttccgcagcaccctggagccggtggagaaggccctgcgggatgccaagctggacaaggcccagattcatgacgtcgtcctggtggggggctccactcgcatccccaaggtgcagaagttgctgcaggacttcttcaacggcaaggagctgaacaagagcatcaaccctgatgaggctgtggcctatggggctgctgtgcaggcggccgtgttgatgggggacaaatgtgagaaagtgcaggatctcctgctgctggatgtggctcccctgtctctggggctggagacagcaggtggggtgatgaccacgctgatccagaggaacgccactatccccaccaagcagacccagactttcaccacctactcggacaaccagcctggggtcttcatccaggtgtatgagggtgagagggccatgaccaaggacaacaacctgctggggcgttttgaactcagtggcatccctcctgccccacgtggagtcccccagatagaggtgacctttgacattgatgctaatggcatcctgagcgtgacagccactgacaggagcacaggtaaggctaacaagatcaccatcaccaatgacaagggccggctgagcaaggaggaggtggagaggatggttcatgaagccgagcagtacaaggctgaggatgaggcccagagggacagagtggctgccaaaaactcgctggaggcccatgtcttccatgtgaaaggttctttgcaagaggaaagccttagggacaagattcccgaagaggacaggcgcaaaatgcaagacaagtgtcgggaagtccttgcctggctggagcacaaccagctggcagagaaggaggagtatgagcatcagaagagggagctggagcaaatctgtcgccccatcttctccaggctctatggggggcctggtgtccctgggggcagcagttgtggcactcaagcccgccagggggaccccagcaccggccccatcattgaggaggttgattga

SEQ ID NO: 1147 - protein, 643 aa, Homo sapiens
MQAPRELAVGIDLGTTYSCVGVFQQGRVEILANDQGNRTTPSYVAFTDTERLVGDAAKSQAALNPHNTVFDAKRLIGRKFADTTVQSDMKHWPFRVVSEGGKPKVPVSYRGEDKTFYPEEISSMVLSKMKETAEAYLGQPVKHAVITVPAYFNDSQRQATKDAGAIAGLNVLRIINEPTAAAIAYGLDRRGAGERNVLIFDLGGGTFDVSVLSIDAGVFEVKATAGDTHLGGEDFDNRLVNHFMEEFRRKHGKDLSGNKRALGRLRTACERAKRTLSSSTQATLEIDSLFEGVDFYTSITRARFEELCSDLFRSTLEPVEKALRDAKLDKAQIHDVVLVGGSTRIPKVQKLLQDFFNGKELNKSINPDEAVAYGAAVQAAVLMGDKCEKVQDLLLLDVAPLSLGLETAGGVMTTLIQRNATIPTKQTQTFTTYSDNQPGVFIQVYEGERAMTKDNNLLGRFELSGIPPAPRGVPQIEVTFDIDANGILSVTATDRSTGKANKITITNDKGRLSKEEVERMVHEAEQYKAEDEAQRDRVAAKNSLEAHVFHVKGSLQEESLRDKIPEEDRRKMQDKCREVLAWLEHNQLAEKEEYEHQKRELEQICRPIFSRLYGGPGVPGGSSCGTQARQGDPSTGPIIEEVD

SEQ ID NO: 1148 - DNA, 1554 bp, Homo sapiens
ggccattaccaatcgcgaaaccccgcagggggctcccggaccctgactctgcagccgaaccggcacggtttcctggggacccaggcttgcaaagtgacggtcattttctccttctttctccctcttgagtccttctgagatgatggctctgggcgcagcgggagctacccgggtctttgtcgcgatggtagcggcggctctcggcggccaccctctgctgggagtgagcgccaccttgaactcggttctcaattccaacgctatcaagaacctgcccccaccgctgggcggcgctgcggggcacccaggctctgcagtcagcgccgcgccgggaatcctgtacccgggcgggaataagtaccagaccattgacaactaccagccgtacccgtgcgcagaggacgaggagtgcggcactgatgagtactgcgctagtcccacccgcggaggggacgcgggcgtgcaaatctgtctcgcctgcaggaagcgccgaaaacgctgcatgcgtcacgctatgtgctgccccgggaattactgcaaaaatggaatatgtgtgtcttctgatcaaaatcatttccgaggagaaattgaggaaaccatcactgaaagctttggtaatgatcatagcaccttggatgggtattccagaagaaccaccttgtcttcaaaaatgtatcacaccaaaggacaagaaggttctgtttgtctccggtcatcagactgtgcctcaggattgtgttgtgctagacacttctggtccaagatctgtaaacctgtcctgaaagaaggtcaagtgtgtaccaagcataggagaaaaggctctcatggactagaaatattccagcgttgttactgtggagaaggtctgtcttgccggatacagaaagatcaccatcaagccagtaattcttctaggcttcacacttgtcagagacactaaaccagctatccaaatgcagtgaactccttttatataatagatgctatgaaaaccttttatgaccttcatcaactcaatcctaaggatatacaagttctgtggtttcagttaagcattccaataacaccttccaaaaacctggagtgtaagagctttgtttctttatggaactcccctgtgattgcagtaaattactgtattgtaaattctcagtgtggcacttacctgtaaatgcaatgaaacttttaattatttttctaaaggtgctgcactgcctatttttcctcttgttatgtaaatttttgtacacattgattgttatcttgactgacaaatattctatattgaactgaagtaaatcatttcagcttatagttcttaaaagcataaccctttaccccatttaattctagagtctagaacgcaaggatctcttggaatgacaaatgataggtacctaaaatgtaacatgaaaatactagcttattttctgaaatgtactatcttaatgcttaaattatatttccctttaggctgtgatagtttttgaaataaaatttaacatttaatatcatgaaaaaaaaaaaaaaaaaaaaaaaaaaaaaaaaaaaaaa

SEQ ID NO: 1149 - protein, 266 aa, Homo sapiens
MMALGAAGATRVFVAMVAAALGGHPLLGVSATLNSVLNSNAIKNLPPPLGGAAGHPGSAVSAAPGILYPGGNKYQTIDNYQPYPCAEDEECGTDEYCASPTRGGDAGVQICLACRKRRKRCMRHAMCCPGNYCKNGICVSSDQNHFRGEIEETITESFGNDHSTLDGYSRRTTLSSKMYHTKGQEGSVCLRSSDCASGLCCARHFWSKICKPVLKEGQVCTKHRRKGSHGLEIFQRCYCGEGLSCRIQKDHHQASNSSRLHTCQRH

SEQ ID NO: 1150 - DNA, 3686 bp, Homo sapiens
ctgggttgtgtcgccgcggtaggcgctgcgctctgagcgcagcgcaggccccgtaccgaccgcccgcccgccctctgtccgcgatggaggtgccggccgcgggtcgcgttcctgccgagggcgccccgacggcggctgtggccgaggtgcgctgcccggggcccgcgccgctgcgcctgctggagtggagggtggcggcgggcgcggccgtgcgcatcggctcggtgctggccgtgttcgaggccgccgcctccgcgcagtccgccggggcctctcagtcccgtgtagcctccgggggctgcgtgcgccccgcgcggccggaacgcaggctgaggtcggagcgcgcgggcgtggtgcgggagctgtgcgcgcagccgggccaggtggtcgccccaggagcggttctggtgaggttggaaggatgcagccacccggttgtcatgaaaggcctgtgtgctgaatgtggccaagacctcacccagttgcagagtaagaacgggaagcagcaggtgccgctgtccacggcgaccgtgtccatggtgcacagcgtgccggagttgatggtgagctccgagcaagctgaacagctgggaagagaagaccagcagcgactgcaccgaaaccggaagctggtgctcatggtggacttggaccagacgttgattcacacaaccgagcagcactgtcagcagatgtcgaataaaggcatctttcacttccagctgggccggggtgagcccatgctgcacacgcgcctgcgtccacactgcaaggacttcctggagaagatcgccaagctgtacgagctgcacgtcttcaccttcggcagccggctgtacgcacacaccatcgcaggctttttagaccccgagaagaagcttttttctcaccgaatattatcaagggatgaatgtattgacccattttctaaaacgggaaaccttagaaatctctttccttgtggagactccatggtttgcattattgatgatcgaaaagatgtctggaagtttgcccccaatctgataactgtgaagaaatatgtatacttccagggcacgggtgatatgaatgcgccccctgggtcccgagaatctcagacgagaaagaaagtaaatcattctcgaggcactgaggtctcagagccatctccgcccgtgagagaccctgagggggtaacgcaggcccctggagtggagcccagcaatggcctggagaagcctgcacgggagctgaacggcagcgaggccgccaccccgcgggactcaccccgccccgggaagccagacgagagggacatctggccccctgcccaggcccccaccagcagccaagagctggcaggcgctcctgagccccagggatcctgtgcgcagggtggccgggtggcaccgggacagcggcctgcccagggtgccacgggcactgacctggactttgacttatccagcgacagcgagagcagcagtgagtccgagggcacgaagtcctcctcctccgcctctgatggcgaaagcgaggggaaaagaggccggcagaagccgaaggctgccccagagggagccggggcgctggcacagggcagttccctggagccggggcggcctgcagcaccgagtctccccggagaggccgagcctggcgcgcatgccccggacaaggagcctgagctgggtgggcaggaggagggcgagcgggatggcctctgcggcctgggcaacggctgtgccgacaggaaggaggcggagaccgagtcacagaacagcgagctgtcgggggtcactgcgggtgagtccctggaccagagcatggaggaggaggaggaggaggacacggatgaggatgaccacctcatctacctggaggagatcctggtccgtgtacacactgactactatgccaagtatgaccgctacctcaacaaggagatcgaggaggcgccggacatccgcaagatcgtgccggagctcaagagcaaggtgctggcagacgtggccataattttcagtgggctacacccgacaaacttcccgatagagaagacgcgggagcattaccacgccacggcgctgggagcgaagatcctcactcggctggtgctgagccccgacgcccctgacagggccacgcacctgatcgccgcgcgagctggcacagagaaggtgctgcaggcacaggagtgcggacacctgcacgtggtcaaccctgactggctgtggagctgcctggagcgctgggacaaggtggaggagcagctcttcccgctcagggacgatcacaccaaggcacagagggagaacagccctgcggcctttcccgaccgggagggtgtgccccccaccgccttgttccacccgatgccggttcttcccaaggcccagcctggccccgaggttcggatctacgactccaacacggggaagctcatcaggacgggcgcccgggggcccccagcaccctccagctccctacccatccgccaggagccctcttccttcagagcggttccgccaccccagccgcagatgtttggtgaagagctgcctgacgctcaggacggagagcagcctggcccttctagaagaaagcgacagcccagtatgtctgagacaatgccgctgtacactctttgtaaggaggatttagagagtatggacaaagaggtggacgacatccttggagaaggcagcgacgacagcgacagcgagaagaggaggcctgaggagcaggaggaggagccccagccccggaagccagggacccgcaggggagcggacgctcgggcacctgcgtccagcgagaggagcgcggcagggggccgggggcccagaggccacaagaggaagctgaatgaagaggacgccgccagcgagtccagcagggagtccagcaacgaggacgagggcagcagctccgaggccgacgagatggccaaggcgctggaggcggagctcaacgacctcatgtgagcgcgggcagcgggcagggactgaagcctgaccgacctccagcagcactcggacgtccccggaccagccctcagtctcggtccacgctgctttcttcccaaaggacatgtatatttgcagagctccacatacagaaacacattattttgcagaaataggtgtttttaagaagttttactacaggaatgtctacttttgtaagtgacaggtgttaaaggcccaggtgtgctgtgccaaagagctcagcagaggctcacgtggcccaggctggtgcgccccgctgtctcggtaaggggcgggttggtgtgtttccccttgtgtaccagagcacattccttaggggacggctttgggggtcccacgagacatggactaggagtttaagcaggacagtgtgcgtgcacgagctccgagcccagcacagacatgcctggaacccccgccgcctgctgctccctcctagggaacccatttccggggaacgccgtgactgtcgggcagcctggagcttcctgcagcctcctacgcagggtccacgccacgtggcctgggctgccatcctgccgtcctcccactggcatcctggcaagggggcgttgcttttcctgggcggccttttatgtcttggagacacctgatgtaaagtttctgtaaatctatttcatatctgacccaccaaacagatttctctttaataaaaatcctttttgtaagttc

SEQ ID NO: 1151 - protein, 961 aa, Homo sapiens
MEVPAAGRVPAEGAPTAAVAEVRCPGPAPLRLLEWRVAAGAAVRIGSVLAVFEAAASAQSAGASQSRVASGGCVRPARPERRLRSERAGVVRELCAQPGQVVAPGAVLVRLEGCSHPVVMKGLCAECGQDLTQLQSKNGKQQVPLSTATVSMVHSVPELMVSSEQAEQLGREDQQRLHRNRKLVLMVDLDQTLIHTTEQHCQQMSNKGIFHFQLGRGEPMLHTRLRPHCKDFLEKIAKLYELHVFTFGSRLYAHTIAGFLDPEKKLFSHRILSRDECIDPFSKTGNLRNLFPCGDSMVCIIDDRKDVWKFAPNLITVKKYVYFQGTGDMNAPPGSRESQTRKKVNHSRGTEVSEPSPPVRDPEGVTQAPGVEPSNGLEKPARELNGSEAATPRDSPRPGKPDERDIWPPAQAPTSSQELAGAPEPQGSCAQGGRVAPGQRPAQGATGTDLDFDLSSDSESSSESEGTKSSSSASDGESEGKRGRQKPKAAPEGAGALAQGSSLEPGRPAAPSLPGEAEPGAHAPDKEPELGGQEEGERDGLCGLGNGCADRKEAETESQNSELSGVTAGESLDQSMEEEEEEDTDEDDHLIYLEEILVRVHTDYYAKYDRYLNKEIEEAPDIRKIVPELKSKVLADVAIIFSGLHPTNFPIEKTREHYHATALGAKILTRLVLSPDAPDRATHLIAARAGTEKVLQAQECGHLHVVNPDWLWSCLERWDKVEEQLFPLRDDHTKAQRENSPAAFPDREGVPPTALFHPMPVLPKAQPGPEVRIYDSNTGKLIRTGARGPPAPSSSLPIRQEPSSFRAVPPPQPQMFGEELPDAQDGEQPGPSRRKRQPSMSETMPLYTLCKEDLESMDKEVDDILGEGSDDSDSEKRRPEEQEEEPQPRKPGTRRGADARAPASSERSAAGGRGPRGHKRKLNEEDAASESSRESSNEDEGSSSEADEMAKALEAELNDLM

SEQ ID NO: 1152 - DNA, 3523 bp, Homo sapiens
ctgggttgtgtcgccgcggtaggcgctgcgctctgagcgcagcgcaggccccgtaccgaccgcccgcccgccctctgtccgcgatggaggtgccggccgcgggtcgcgttcctgccgagggcgccccgacggcggctgtggccgaggtgcgctgcccggggcccgcgccgctgcgcctgctggagtggagggtggcggcgggcgcggccgtgcgcatcggctcggtgctggccgtgttcgaggccgccgcctccgcgcagtccgccggggcctctcagtcccgtgtagcctccgggggctgcgtgcgccccgcgcggccggaacgcaggctgaggtcggagcgcgcgggcgtggtgcgggagctgtgcgcgcagccgggccaggtggtcgccccaggagcggttctggtgaggttggaaggatgcagccacccggttgtcatgaaaggcctgtgtgctgaatgtggccaagacctcacccagttgcagagtaagaacgggaagcagcaggtgccgctgtccacggcgaccgtgtccatggtgcacagcgtgccggagttgatggtgagctccgagcaagctgaacagctgggaagagaagaccagcagcgactgcaccgaaaccggaagctggtgctcatggtggacttggaccagacgttgattcacacaaccgagcagcactgtcagcagatgtcgaataaaggcatctttcacttccagctgggccggggtgagcccatgctgcacacgcgcctgcgtccacactgcaaggacttcctggagaagatcgccaagctgtacgagctgcacgtcttcaccttcggcagccggctgtacgcacacaccatcgcaggctttttagaccccgagaagaagcttttttctcaccgaatattatcaagggatgaatgtattgacccattttctaaaacgggaaaccttagaaatctctttccttgtggagactccatggtttgcattattgatgatcgaaaagatgtctggaagtttgcccccaatctgataactgtgaagaaatatgtatacttccagggcacgggtgatatgaatgcgccccctgggtcccgagaatctcagacgagaaagaaagtaaatcattctcgaggcactgaggtctcagagccatctccgcccgtgagagaccctgagggggtaacgcaggcccctggagtggagcccagcaatggcctggagaagcctgcacgggagctgaacggcagcgaggccgccaccccgcgggactcaccccgccccgggaagccagacgagagggacatctggccccctgcccaggcccccaccagcagccaagagctggcaggcgctcctgagccccagggatcctgtgcgcagggtggccgggtggcaccgggacagcggcctgcccagggtgccacgggcactgacctggactttgacttatccagcgacagcgagagcagcagtgagtccgagggcacgaagtcctcctcctccgcctctgatggcgaaagcgaggggaaaagaggccggcagaagccgaaggctgccccagagggagccggggcgctggcacagggcagttccctggagccggggcggcctgcagcaccgagtctccccggagaggccgagcctggcgcgcatgccccggacaaggagcctgagctgggtgggcaggaggagggcgagcgggatggcctctgcggcctgggcaacggctgtgccgacaggaaggaggcggagaccgagtcacagaacagcgagctgtcgggggtcactgcgggtgagtccctggaccagagcatggaggaggaggaggaggaggacacggatgaggatgaccacctcatctacctggaggagatcctggtccgtgtacacactgactactatgccaagtatgaccgctacctcaacaaggagatcgaggaggcgccggacatccgcaagatcgtgccggagctcaagagcaaggtgctggcagacgtggccataattttcagtgggctacacccgacaaacttcccgatagagaagacgcgggagcattaccacgccacggcgctgggagcgaagatcctcactcggctggtgctgagccccgacgcccctgacagggccacgcacctgatcgccgcgcgagctggcacagagaaggtgctgcaggcacaggagtgcggacacctgcacgtggtcaaccctgactggctgtggagctgcctggagcgctgggacaaggtggaggagcagctcttcccgctcagggacgatcacaccaaggcacagagggagaacagccctgcggcctttcccgaccgggagggtgtgccccccaccgccttgttccacccgatgccggttcttcccaaggcccagcctggccccgaggttcggatctacgactccaacacggggaagctcatcaggacgggcgcccgggggcccccagcaccctccagctccctacccatccgccaggagccctcttccttcagatggacgacatccttggagaaggcagcgacgacagcgacagcgagaagaggaggcctgaggagcaggaggaggagccccagccccggaagccagggacccgcaggggagcggacgctcgggcacctgcgtccagcgagaggagcgcggcagggggccgggggcccagaggccacaagaggaagctgaatgaagaggacgccgccagcgagtccagcagggagtccagcaacgaggacgagggcagcagctccgaggccgacgagatggccaaggcgctggaggcggagctcaacgacctcatgtgagcgcgggcagcgggcagggactgaagcctgaccgacctccagcagcactcggacgtccccggaccagccctcagtctcggtccacgctgctttcttcccaaaggacatgtatatttgcagagctccacatacagaaacacattattttgcagaaataggtgtttttaagaagttttactacaggaatgtctacttttgtaagtgacaggtgttaaaggcccaggtgtgctgtgccaaagagctcagcagaggctcacgtggcccaggctggtgcgccccgctgtctcggtaaggggcgggttggtgtgtttccccttgtgtaccagagcacattccttaggggacggctttgggggtcccacgagacatggactaggagtttaagcaggacagtgtgcgtgcacgagctccgagcccagcacagacatgcctggaacccccgccgcctgctgctccctcctagggaacccatttccggggaacgccgtgactgtcgggcagcctggagcttcctgcagcctcctacgcagggtccacgccacgtggcctgggctgccatcctgccgtcctcccactggcatcctggcaagggggcgttgcttttcctgggcggccttttatgtcttggagacacctgatgtaaagtttctgtaaatctatttcatatctgacccaccaaacagatttctctttaataaaaatcctttttgtaagttc

SEQ ID NO: 1153 - protein, 867 aa, Homo sapiens
MEVPAAGRVPAEGAPTAAVAEVRCPGPAPLRLLEWRVAAGAAVRIGSVLAVFEAAASAQSAGASQSRVASGGCVRPARPERRLRSERAGVVRELCAQPGQVVAPGAVLVRLEGCSHPVVMKGLCAECGQDLTQLQSKNGKQQVPLSTATVSMVHSVPELMVSSEQAEQLGREDQQRLHRNRKLVLMVDLDQTLIHTTEQHCQQMSNKGIFHFQLGRGEPMLHTRLRPHCKDFLEKIAKLYELHVFTFGSRLYAHTIAGFLDPEKKLFSHRILSRDECIDPFSKTGNLRNLFPCGDSMVCIIDDRKDVWKFAPNLITVKKYVYFQGTGDMNAPPGSRESQTRKKVNHSRGTEVSEPSPPVRDPEGVTQAPGVEPSNGLEKPARELNGSEAATPRDSPRPGKPDERDIWPPAQAPTSSQELAGAPEPQGSCAQGGRVAPGQRPAQGATGTDLDFDLSSDSESSSESEGTKSSSSASDGESEGKRGRQKPKAAPEGAGALAQGSSLEPGRPAAPSLPGEAEPGAHAPDKEPELGGQEEGERDGLCGLGNGCADRKEAETESQNSELSGVTAGESLDQSMEEEEEEDTDEDDHLIYLEEILVRVHTDYYAKYDRYLNKEIEEAPDIRKIVPELKSKVLADVAIIFSGLHPTNFPIEKTREHYHATALGAKILTRLVLSPDAPDRATHLIAARAGTEKVLQAQECGHLHVVNPDWLWSCLERWDKVEEQLFPLRDDHTKAQRENSPAAFPDREGVPPTALFHPMPVLPKAQPGPEVRIYDSNTGKLIRTGARGPPAPSSSLPIRQEPSSFRWTTSLEKAATTATARRGGLRSRRRSPSPGSQGPAGERTLGHLRPARGARQGAGGPEATRGS

SEQ ID NO: 1154 - DNA, 2043 bp, Homo sapiens
atgagtcagcagcggccggcgaggaagttacccagtctcctcctggacccgacggaggagacggttcgccgtcggtgccgagaccccatcaacgtggagggcctgctgccatcaaaaataaggattaatttagaagataatgtacaatatgtgtccatgagaaaagctctaaaagtgaagagacctcgttttgatgtatcgctggtttatttaactcgaaaatttatggatcttgtcagatctgctcccgggggtattcttgacttaaacaaggttgcaacgaaactgggagtccgaaagcggagagtgtatgacatcaccaatgtcttagatggaatcgacctcgttgaaaagaaatccaagaaccatattagatggataggatctgatcttagcaattttggagcagttccccaacaaaagaagctacaggaggaactttctgacttatcagcaatggaagatgctttggatgagttaattaaggattgtgctcagcagctgtttgagttaacagatgacaaagaaaatgaaagactagcatatgtgacctatcaagacattcatagcattcaggccttccatgaacagatcgtcattgcagttaaagctccagcagaaaccagattggatgttccagctcccagagaagactctatcacagtgcacataaggagcaccaacggacctatcgatgtctatttgtgtgaagtggagcagggtcagaccagtaacaaaaggtctgaaggtgtcgggacctcttcatctgagagcactcatccagaaggccctgaggaagaagaaaatcctcagcaaagtgaagaattgcttgaagtaagcaactgatggcatttgagaatttatgtatcactgagttttttgggaatatcttcgtggagaattacgcatcaaatttgattctcagagcaataaattatccatgaagtgctctcgttctcagtagcggcatcatggccagtagtgtctttgaggagttcaccacttagattactgagtaattgtggtttccacatttgaaaacaactccttttataattattcactgctttttgtcagtgaaatagacatcttgcctcctcaagtagcttcatcacagagtgtcatgaagacagacagtcaggctgaaatggacagttctttgtggactctacccttcccttcaaggagtatgtcatatatcacaaaagaaattgccttacactggttcacgtttgcagttacctgttgtacattgcatagatgtacacacgaatttaaatgtgatgtctttgtatatatctgtataatgttgagattacttacgaaatatgtctgagtgacacttttcacccttgtacagccaaaataatgtatatatggaaagtgacagacaaattctctaatctctttggtatctataacttattagaatcctctggatgagggttagaagagactttttccaaacttctacatgtagaagtatcataaatgtgctacacatttatgtttgtggatttaattaaagtattttaatatggttttcagtgctaaaattggagtcagatacttcttggttttaagctgtctacctaattgctgtctcccagcagactggtggcatgcccagtggctttgggggcaaggatagaaatgccatcaggaaatagctgaattcattgtgaaacatgaattcagtcatggtgataattggaaactcctttcaggtttttgcaagtagattttgtaatgtttgtgtatgcagccttgctgttgagtcagtccaaggggttttacttaggacaagttgtaccttgccctctctccagctctgctcccacattttcacatacctagctgtttctacctcattgggtaactcatttaccactctgtgcctcagtttactctgtagtttaccattagactgtgagctccttgagggactttgtcataatcactgttacatcccagtgcctcacaccatgcctggcccttaagaagtgctcaataaatgtctgaacaaataaaaaaaaaaaaaaa

SEQ ID NO: 1155 - protein, 281 aa, Homo sapiens
MSQQRPARKLPSLLLDPTEETVRRRCRDPINVEGLLPSKIRINLEDNVQYVSMRKALKVKRPRFDVSLVYLTRKFMDLVRSAPGGILDLNKVATKLGVRKRRVYDITNVLDGIDLVEKKSKNHIRWIGSDLSNFGAVPQQKKLQEELSDLSAMEDALDELIKDCAQQLFELTDDKENERLAYVTYQDIHSIQAFHEQIVIAVKAPAETRLDVPAPREDSITVHIRSTNGPIDVYLCEVEQGQTSNKRSEGVGTSSSESTHPEGPEEEENPQQSEELLEVSN

SEQ ID NO: 1156 - DNA, 4908 bp, Homo sapiens
ggataacctcgcagggtgggccggagggcgggcgccgccgctgcctgtgctgcggcgatggcccagtgtgtacaatcagtgcaggagctaatcccggactccttcgtcccctgtgtcgctgcgctgtgcagcgacgaagccgagcggctcactcgtctcaatcacctcagcttcgcggagctgcttaagcccttctcccgcctcacttccgaggttcacatgagagatcctaataatcaacttcacgtaattaaaaatttgaagatagcagtaagcaacattgtcacccagccacctcagcctggagccatccggaagcttttgaatgatgttgtttctggcagtcagcctgcagaaggattagtagctaatgtgattacagcaggagattatgaccttaacatcagtgccactactccatggtttgagtcttacagagaaacctttcttcagtcgatgccagcatcggatcatgaatttctgaaccactatttagcatgtatgttggtagcgtcatctagtgaagctgaacctgtggaacagttttcaaagttgtcacaagaacagcatcgaattcagcacaacagtgattattcctaccccaagtggtttataccaaatacacttaaatactatgtacttttacatgatgtaagtgcaggagatgaacagagagctgaatcaatttatgaagaaatgaaacagaaatatggaactcagggttgctatttacttaaaattaattctcgaacatctaatcgagcatcagatgaacagataccagatccttggagtcagtatctccagaaaaatagtattcaaaaccaggaatcatatgaagatggcccttgtactataacttcaaataagaattctgataataacttgctttcattggatggattagataacgaagtcaaagatggcttaccaaataactttagagctcacccacttcagttggagcaatccagtgacccttctaacagtattgatggcccagatcatctaagatctgcttcatcgttacatgaaacaaagaaaggaaatactggaataattcatggtgcatgtttaacacttactgatcatgatagaattcgacagtttatacaagagttcacatttcggggccttttgccacatatagagaaaacaattaggcaattaaacgatcagctaatatcaagaaaaggtttgagtcgatctctattttctgcaactaaaaaatggtttagtggcagtaaagttccagaaaagagcattaatgacctgaaaaatacatctggcttgctgtatcctccggaagcaccagaacttcaaatcaggaaaatggctgacttatgttttttggtgcagcattatgatttggcttacagttgctatcatactgcaaagaaagattttcttaatgatcaagcaatgctttatgcagctggtgccttggaaatggcagcagtgtctgcttttcttcaaccaggagcacctaggccatatcctgctcattacatggatacagcaattcagacatacagagatatctgcaagaatatggtgttggctgaaagatgtgtgttgcttagtgctgaacttttaaaaagccaaagcaaatattcagaggctgcagctctcctaatacggttgaccagtgaggattctgatcttcgaagtgcacttcttttggaacaggcagcacattgctttataaacatgaaaagtcccatggttagaaaatatgcatttcatatgatattggcaggccatcgatttagtaaagcagggcagaaaaagcatgctttacgctgttattgtcaagccatgcaagtttacaaaggaaaaggctggtctcttgcagaggatcacattaatttcactattgggcgccagtcctatactcttagacagctggataatgctgtgtctgcttttaggcatattctaattaatgaaagtaaacaatctgctgctcaacagggggctttcctcagagaatatctttatgtttacaagaatgtaagtcagctgtcaccagatggtcctttgccacagcttcctttaccgtatattaacagttcagcaacacgggttttttttggccatgacagacgaccagcggatggtgaaaaacaagcagctactcatgtaagtcttgatcaagaatatgattctgaatcctctcagcagtggcgagaacttgaggaacaagttgtttctgtggttaacaaaggagtaattccatccaattttcatcccacacaatactgtttgaacagttactcagataattcaagatttccacttgcagttgtagaagaaccaattacagtggaagtggcttttagaaaccctttgaaagttctacttttgttgactgatttgtcattgctttggaagtttcatcctaaagatttcagtggaaaggataatgaagaagttaaacaactagttacaagtgaacctgaaatgattggagctgaagttatttcagagttcttaattaatggcgaagaatcaaaagtggcaagactaaagctctttccccatcacataggggagctgcatattctgggagttgtttataatcttggcactattcagggctctatgacagtagatggcattggtgctcttcccggatgtcacacaggaaaatattccttgagtatgtcagtccgagggaagcaggatttagaaattcaaggtcctcgacttaacaacacaaaagaagagaaaacatctgttaaatatggccctgatcgacgtttagatcccataatcacagaagaaatgccactgttggaggtgttctttatacattttcctacagggcttctctgtggagaaatccgaaaagcatatgtagaatttgtcaatgtcagcaaatgtccacttactggattgaaggttgtttctaaacgtccagagttctttactttcggtggtaatactgctgttctaacaccactaagtccctcagcttctgagaattgtagtgcttacaagactgttgtgacagatgctacctctgtgtgtacagcactcatatcatcagcttcttctgtagactttggcattggcacaggaagtcaaccagaggtgattcctgttccccttcctgacactgttcttctacccggagcctcagtgcagctgccaatgtggttacgtgggcctgatgaagaaggtgtccatgaaattaactttttgttttactatgaaagtgtcaaaaagcagccaaaaatacggcacagaatattaagacacactgcaattatttgtaccagtcggtctttaaatgtacgggccactgtctgcagaagtaattctcttgaaaatgaagaaggcagaggaggcaatatgctagtctttgtggatgtggaaaataccaatactagtgaagcaggcgttaaggaattccacatagtgcaagtatcaagtagtagcaaacactggaagttacagaaatctgtaaatctttctgaaaacaaagatgccaaacttgccagtagggagaagggaaagttttgctttaaggcaataagatgtgagaaagaagaagcggccacacagtcctctgaaaaatatacctttgcagatatcatctttggaaatgaacagataataagttcagcaagcccatgtgcagacttcttttatcgaagtttatcttctgaattgaaaaaaccacaagctcacttgcctgtgcatacagaaaaacagtcaacagaggatgctgtgagattgattcaaaaatgcagtgaggtagatttgaatattgtcatattatggaaggcatacgttgtggaagacagtaaacagcttattttggaaggtcaacatcatgttattcttcgcactataggaaaagaagccttttcatatcctcagaaacaggagccaccagaaatggaactattgaaatttttcaggccagaaaacattacagtttcctcaaggccatcagtagagcagctttctagtctcattaaaacgagtcttcactacccagaatcatttaatcatccatttcatcaaaaaagcctttgtttagtaccagtcactcttttactttccaattgttctaaggctgatgtagatgtcatagttgatcttcggcataaaacaacaagtccagaagcactggaaatccatggatcattcacatggcttggacaaacacagtataaacttcaacttaaaagccaggagattcacagtctgcagctgaaagcatgctttgttcatacaggtgtttataaccttggaactcctagggtatttgccaagttatcggaccaagttacagtgtttgaaacaagtcagcagaattccatgcctgccctgatcatcatcagtaatgtgtgacaacttggaaatttgtactgaaatccacaataatcagtttttgctggatgggttttacagcagtatttgatatacctaacttgttatggaggttgattgatatctgatccctgcaaaatactttgacttgtcattttgttgatgatgcaaagcacgttggactgagaatacttaacattctttttctgtatttctttaaaccctgagaataatttacatgctcataatacaggatatcagcatatttgtgcaccttattaagccccatcttaagaaaacacaaagtctaagtctgctgttacaacttgtcaatggtatacgaatattaggagatgattctgagaaaggaaaggccttgttggcagtactcctgttaagccattagtctctaaattccagctttactgtgaagttctatagagtgttaaatacaaattttcctgtcttgcttcacacagttccttaaaatcagttttgaactttggtcatagagtcttcatatttcagtatttggtggtccctatgacttatacataactttgt

SEQ ID NO: 1157 - protein, 1435 aa, Homo sapiens
MAQCVQSVQELIPDSFVPCVAALCSDEAERLTRLNHLSFAELLKPFSRLTSEVHMRDPNNQLHVIKNLKIAVSNIVTQPPQPGAIRKLLNDVVSGSQPAEGLVANVITAGDYDLNISATTPWFESYRETFLQSMPASDHEFLNHYLACMLVASSSEAEPVEQFSKLSQEQHRIQHNSDYSYPKWFIPNTLKYYVLLHDVSAGDEQRAESIYEEMKQKYGTQGCYLLKINSRTSNRASDEQIPDPWSQYLQKNSIQNQESYEDGPCTITSNKNSDNNLLSLDGLDNEVKDGLPNNFRAHPLQLEQSSDPSNSIDGPDHLRSASSLHETKKGNTGIIHGACLTLTDHDRIRQFIQEFTFRGLLPHIEKTIRQLNDQLISRKGLSRSLFSATKKWFSGSKVPEKSINDLKNTSGLLYPPEAPELQIRKMADLCFLVQHYDLAYSCYHTAKKDFLNDQAMLYAAGALEMAAVSAFLQPGAPRPYPAHYMDTAIQTYRDICKNMVLAERCVLLSAELLKSQSKYSEAAALLIRLTSEDSDLRSALLLEQAAHCFINMKSPMVRKYAFHMILAGHRFSKAGQKKHALRCYCQAMQVYKGKGWSLAEDHINFTIGRQSYTLRQLDNAVSAFRHILINESKQSAAQQGAFLREYLYVYKNVSQLSPDGPLPQLPLPYINSSATRVFFGHDRRPADGEKQAATHVSLDQEYDSESSQQWRELEEQVVSVVNKGVIPSNFHPTQYCLNSYSDNSRFPLAVVEEPITVEVAFRNPLKVLLLLTDLSLLWKFHPKDFSGKDNEEVKQLVTSEPEMIGAEVISEFLINGEESKVARLKLFPHHIGELHILGVVYNLGTIQGSMTVDGIGALPGCHTGKYSLSMSVRGKQDLEIQGPRLNNTKEEKTSVKYGPDRRLDPIITEEMPLLEVFFIHFPTGLLCGEIRKAYVEFVNVSKCPLTGLKVVSKRPEFFTFGGNTAVLTPLSPSASENCSAYKTVVTDATSVCTALISSASSVDFGIGTGSQPEVIPVPLPDTVLLPGASVQLPMWLRGPDEEGVHEINFLFYYESVKKQPKIRHRILRHTAIICTSRSLNVRATVCRSNSLENEEGRGGNMLVFVDVENTNTSEAGVKEFHIVQVSSSSKHWKLQKSVNLSENKDAKLASREKGKFCFKAIRCEKEEAATQSSEKYTFADIIFGNEQIISSASPCADFFYRSLSSELKKPQAHLPVHTEKQSTEDAVRLIQKCSEVDLNIVILWKAYVVEDSKQLILEGQHHVILRTIGKEAFSYPQKQEPPEMELLKFFRPENITVSSRPSVEQLSSLIKTSLHYPESFNHPFHQKSLCLVPVTLLLSNCSKADVDVIVDLRHKTTSPEALEIHGSFTWLGQTQYKLQLKSQEIHSLQLKACFVHTGVYNLGTPRVFAKLSDQVTVFETSQQNSMPALIIISNV

SEQ ID NO: 1158 - DNA, 662 bp, Homo sapiens
gggggggggagcacaaagttgggagtgacaccagagcctcctgcaagatgcttctgattctgctgtcagtggccctgctggccttcagctcagctcaggatttaaatgaagatgtcagccaggaagatgttcccctcgtaatatcagatggaggagactctgagcagttcatagatgaggagcgtcagggaccacctttgggaggacagcaatctcaaccctctgctggtgatgggaaccaggatgatggccctcagcagggaccaccccaacaaggaggccagcagcaacaaggtccaccacctcctcagggaaagccacaaggaccaccccaacagggaggccatccccctcctcctcaaggaaggccacaaggaccaccccaacagggaggccatccccgtcctcctcgaggaaggccacaaggaccaccccaacagggaggccatcagcaaggtcctcccccacctcctcctggaaagccccagggaccacctccccaagggggccgcccacaaggacctccacaggggcagtctcctcagtaatccaggattcaatgacaggaagtgaataagaagataacagtgtttcaaatgccgtgaaacatggcatcatgctctaacttcagtataccaataaaacaatcagcttgcaatttc

SEQ ID NO: 1159 - protein, 166 aa, Homo sapiens
MLLILLSVALLAFSSAQDLNEDVSQEDVPLVISDGGDSEQFIDEERQGPPLGGQQSQPSAGDGNQDDGPQQGPPQQGGQQQQGPPPPQGKPQGPPQQGGHPPPPQGRPQGPPQQGGHPRPPRGRPQGPPQQGGHQQGPPPPPPGKPQGPPPQGGRPQGPPQGQSPQ

SEQ ID NO: 1160 - DNA, 546 bp, Homo sapiens
gcgcgagtcgtagtgtcgctgtttgcgggtctccgcggcgggaccggggcgcagcggggtcgctgaggcgagggtgtcatgtcagacaacgaggacaattttgatggcgacgactttgatgatgtggaggaggatgaagggctagatgacttggagaatgccgaagaggaaggccaggagaatgtcgagatcctcccctctggggagcgaccgcaggccaaccagaagcgaatcaccacaccatacatgaccaagtacgagcgagcccgcgtgctgggcacccgagcgctccagattgcgatgtgtgcccctgtgatggtggagctggagggggagacagatcctctgctcattgccatgaaggaactcaaggcccgaaagatccccatcatcattcgccgttacctgccagatgggagctatgaagactggggggtggacgagctcatcatcaccgactgagctggagtcatcttcctgcccttgccccatgcccaattttcattctcactttatatgtgtaaataataaaatattcaactttcc

SEQ ID NO: 1161 - protein, 127 aa, Homo sapiens
MSDNEDNFDGDDFDDVEEDEGLDDLENAEEEGQENVEILPSGERPQANQKRITTPYMTKYERARVLGTRALQIAMCAPVMVELEGETDPLLIAMKELKARKIPIIIRRYLPDGSYEDWGVDELIITD

SEQ ID NO: 1162 - DNA, 2272 bp, Homo sapiens
aatgcacagcggtattgatgagtagatccttggattcagaggttggctgaaacgcaccatgcctgcttccatcttttgctctgtaaagttgtgaattgctcatgcctatagggaggaaggatggcacatgggattccttctcaaggcaaagttaccataacggtggatgagtacagctcaaaccccacccaggcattcacgcactacaacatcaaccagagcagattccagcctccacatgtacatatggtcgaccccatcccatatgacactccaaaaccagcgggccacacgcggtttgtctgcatctcagacacacactccagaacagatggtatccagatgccttatggggacatccttctccacacaggcgatttcaccgagctgggactgccctcagaggttaagaagtttaatgactggttaggaaacctgccatatgaatataaaatagtgattgctgggaatcatgaactgacatttgataaggaattcatggcagaccttgttaaacaggactactaccgtttcccctctgtgtccaaattgaaaccagaggactttgacaatgttcagtccctcctgacaaacagtatttacttacaagattcggaggtaacagtgaagggattcaggatatacggtgcaccttggaccccgtggtttaatggatggggctttaacctacccagaggtcagtctctgctggacaagtggaacctcatccctgagggcattgacatactcatgacacatggacctcctctaggttttcgagactgggttccaaaggagcttcaaagagtgggctgtgtggagctgttaaacacggttcagaggcgagtccggcccaagctccatgtgtttggtggaatccatgaaggttatggcatcatgaccgacggttacacaacgtacatcaatgcctcgacgtgtacagtcagctttcaaccgaccaaccctccaattatatttgaccttccaaacccacagggttcctgaagctctaaatgccctattggaatgtgagggaaggtctataaactgccatttttctaattataaacttacattctcttacttatttacaaaccctgtgagttctttttgtaaattgttggaacacaaatgatgctagaggttgtgcttcttattttattttattttaaatggggcatccatttgaaatcagaggaacattgtgaatttgtaaaatgacttctgttttctcaaaggccatgccattgtaaattgttagtgttcgccaaaggacagccaagctttcttttaaaaagtgataaaagtcttattttaatatgctttaagctgaaagaaaaaaaaataagaaacaggcagtgttttaaaaaccaacacagatttgcacaactgtttaagagtattgtttgaaatattttaattttcaatgttttgttgttgttgttttcttggtaatgcttcttttttgcagatgtggtcccaatttatagcaatcttctcaacagaagtaggcatggaaaagacttcttttcatactctcactataaagaaagctgcattgagaagaaaatggctgtcatttaaaggatggtttaactagtgagattcctattgtggttatacaaggtctcattgtttgtttgtttcttttaaattatttcagctttaaaaatacagaaatggaatctgtcaagagcaggtatttcatacggttaaaaaaatgaacatgcagactccttttcaatatgggtttatatatataagtattttttgtgtattatgactacgttaggagtttaatattgtcaaggacagtacaactgcaaagggatgctgtatagcagcacatcagaagtcggaaggaactgacacattctctcagagctcaaggtcttaaagagcttgagttaaatctaggtacagttacaggcatgtatagacttaaatggatgcaatggaagctaactaaaataaggcttagttgtcctttctatttaaataccccaagttgtcttcttacttcctctcccctctcccattttgcactgtgtgtcgatgcaatcttcgctagcacaaaatattgtcgctaatagtcatttctgttttcccattgtaaatgctgttgagctttattctattttatgttactttgttaatgaaatttaggaaagcagttgtttctttaaatttattgtgatattctatatctagcggcctttatatgcaaataaaattgcaagatttttaaaaaaaaaaaaaaaaaaaaaaaaaa

SEQ ID NO: 1163 - protein, 294 aa, Homo sapiens
MAHGIPSQGKVTITVDEYSSNPTQAFTHYNINQSRFQPPHVHMVDPIPYDTPKPAGHTRFVCISDTHSRTDGIQMPYGDILLHTGDFTELGLPSEVKKFNDWLGNLPYEYKIVIAGNHELTFDKEFMADLVKQDYYRFPSVSKLKPEDFDNVQSLLTNSIYLQDSEVTVKGFRIYGAPWTPWFNGWGFNLPRGQSLLDKWNLIPEGIDILMTHGPPLGFRDWVPKELQRVGCVELLNTVQRRVRPKLHVFGGIHEGYGIMTDGYTTYINASTCTVSFQPTNPPIIFDLPNPQGS

SEQ ID NO: 1164 - DNA, 2815 bp, Homo sapiens
caccggtctgcatctcccagcagaaggcgcagccatgaatccgttattcggccccaacctcttcctcctgcagcaggagcagcagggcctggccgggccactgggggactcactgggaggcgaccacttcgccgggggaggagacttgcccccggcgcctctctcgccggccggccctgctgcctactcgccgcccgggccgggcccggccccgcctgccgccatggccctccgcaatgacctgggctccaacatcaacgtgctcaagaccctgaacctccggttccgctgcttcctggccaaggtgcatgagctggagcgccggaaccggctgttggagaagcaactgcagcaagcgctggaggagggtaagcagggccggcggggcctgggtcgtcgcgaccaggcagtgcagaccggcttcgtcagccccatccggcccctggggctgcagctgggcgcccggccggccgctgtctgcagcccttcggcgcgcgtgctgggctcgcccgcgcgctccccggccggccccctcgcgccctccgcggccagcctctcgtcgtcctccacctccacctccaccacctattcctcgtcggcccgcttcatgcccggcaccatctggtcgttctcgcacgcccgccggctcgggccgggactggagcccactctggtgcaagggcctggcttgtcgtgggtgcacccggatggggtgggcgtccagatcgacaccatcacgcccgagatccgcgctctctacaacgtgctggccaaagtgaagcgggagcgggacgagtacaagcggagatgcttttacagggttaaatgataccacaagaggcagggcagcgggctcgacgagctctgttctggtgcgggcaggaggcgggagcccggatctgtgcgactgaaggtgggaagaggagtacacggtgcggatccagctgcaagaccgtgtaaatgagctccaggaggaagcccaggaggctgatgcctgccaggaggagctggcactgaaggtggaacagttgaaggctgagctggtggtcttcaaggggctcatgagtaacaacctgtcggagctggacaccaagatccaggagaaagccatgaaggtggatatggacatctgccgccgcatcgacatcaccgccaagctctgcgatgtggctcagcagcgcaactgcgaggacatgatccagatgttccaggtcccatccatgggggggcggaagcgggagcgcaaggctgccgtcgaggaggacacctccctgtcggagagtgaggggccccgccagcccgatggggatgaggaggagagcacagccctcagcatcaacgaggagatgcagcgcatgctcaaccagctgagggagtatgattttgaggacgactgtgacagcctgacttgggaggagactgaggagaccctgctgctttgggaggatttctcaggctatgccatggcagctgcagaggcccagggagagcagcaggaagatagcctggagaaggtgattaaagatacggagtccctgttcaaaacccgggagaaggagtatcaggagaccattgaccagatagagctggagttggccacggccaagaacgacatgaaccggcacctgcacgagtacatggagatgtgcagcatgaagcgcggcctggacgtgcagatggagacctgccgccggctcatcacccagtctggagaccgaaagtctcctgctttcactgcggtcccgcttagcgacccgccgccgccgccaagcgaggctgaggactccgatcgcgatgtctcatctgacagctccatgagatagagacctgcctcccccttgcacccgaggccctcgcagcagggagctcagcgaggcagagggtggggctgcacagaggggaacatcagctgcagctctgcaccaggccggtccctggggactggggcgctcctccctcaggctttctccctcagtcttggcttctccagggctctggggtgtctggagctaggcttggccctaccattctggggccatttccaccacagttggggctctcctgccttcacgcgtgggtgtctgctacttccccatctttaaaatgctgccagagcgattgcggcccctcaccttgtccacgtatcaggaatgtgaatgtgggacctttcctccatccctgttgtccggagccagctcactgtcttccacactggtgctaactggcccaggcactggagtggaatagaatgcagctggaggctacgcatggcctctgcagcacacgcagctggagagggcttctgtccctgtcagcggcagagggcgttggggctggccggggcaccttgtccctgctatggtccacatgctcacgctgtccacctgccaggtggagtgtatgtggctgtggccctccctcgtggaggtgccgtgctttaaagaggccttagtgcccgggatgggcacagtgttttgaagggaggtgggagctcttgctctcctggtcactgcagaatgacagagaaggtgaagctccatgcatgtgtgcgcgggtgtatgtgcgctcagggtctctgtttaagtatcagctaaagatgtgcttcctccgtgtctgtcatacactgagaccaacaggctacagtgtccctgattcttggaaaagcctggagaagctggggagatgcggttcacaatgcctcggtataggaggctgtgttgagctgacattcaaatggattctttaataataatgaaactggcgagtaaaaaaaaaaaaaaaaaaaaaaaaaaaaaaaaaaaaaaaaaaaaaaaaa

SEQ ID NO: 1165 - protein, 264 aa, Homo sapiens
MNPLFGPNLFLLQQEQQGLAGPLGDSLGGDHFAGGGDLPPAPLSPAGPAAYSPPGPGPAPPAAMALRNDLGSNINVLKTLNLRFRCFLAKVHELERRNRLLEKQLQQALEEGKQGRRGLGRRDQAVQTGFVSPIRPLGLQLGARPAAVCSPSARVLGSPARSPAGPLAPSAASLSSSSTSTSTTYSSSARFMPGTIWSFSHARRLGPGLEPTLVQGPGLSWVHPDGVGVQIDTITPEIRALYNVLAKVKRERDEYKRRCFYRVK

SEQ ID NO: 1166 - DNA, 2706 bp, Homo sapiens
caccggtctgcatctcccagcagaaggcgcagccatgaatccgttattcggccccaacctcttcctcctgcagcaggagcagcagggcctggccgggccactgggggactcactgggaggcgaccacttcgccgggggaggagacttgcccccggcgcctctctcgccggccggccctgctgcctactcgccgcccgggccgggcccggccccgcctgccgccatggccctccgcaatgacctgggctccaacatcaacgtgctcaagaccctgaacctccggttccgctgcttcctggccaaggtgcatgagctggagcgccggaaccggctgttggagaagcaactgcagcaagcgctggaggagggtaagcagggccggcggggcctgggtcgtcgcgaccaggcagtgcagaccggcttcgtcagccccatccggcccctggggctgcagctgggcgcccggccggccgctgtctgcagcccttcggcgcgcgtgctgggctcgcccgcgcgctccccggccggccccctcgcgccctccgcggccagcctctcgtcgtcctccacctccacctccaccacctattcctcgtcggcccgcttcatgcccggcaccatctggtcgttctcgcacgcccgccggctcgggccgggactggagcccactctggtgcaagggcctggcttgtcgtgggtgcacccggatggggtgggcgtccagatcgacaccatcacgcccgagatccgcgctctctacaacgtgctggccaaagtgaagcgggagcgggacgagtacaagcggaggtgggaagaggagtacacggtgcggatccagctgcaagaccgtgtaaatgagctccaggaggaagcccaggaggctgatgcctgccaggaggagctggcactgaaggtggaacagttgaaggctgagctggtggtcttcaaggggctcatgagtaacaacctgtcggagctggacaccaagatccaggagaaagccatgaaggtggatatggacatctgccgccgcatcgacatcaccgccaagctctgcgatgtggctcagcagcgcaactgcgaggacatgatccagatgttccaggtcccatccatgggggggcggaagcgggagcgcaaggctgccgtcgaggaggacacctccctgtcggagagtgaggggccccgccagcccgatggggatgaggaggagagcacagccctcagcatcaacgaggagatgcagcgcatgctcaaccagctgagggagtatgattttgaggacgactgtgacagcctgacttgggaggagactgaggagaccctgctgctttgggaggatttctcaggctatgccatggcagctgcagaggcccagggagagcaggaagatagcctggagaaggtgattaaagatacggagtccctgttcaaaacccgggagaaggagtatcaggagaccattgaccagatagagctggagttggccacggccaagaacgacatgaaccggcacctgcacgagtacatggagatgtgcagcatgaagcgcggcctggacgtgcagatggagacctgccgccggctcatcacccagtctggagaccgaaagtctcctgctttcactgcggtcccgcttagcgacccgccgccgccgccaagcgaggctgaggactccgatcgcgatgtctcatctgacagctccatgagatagagacctgcctcccccttgcacccgaggccctcgcagcagggagctcagcgaggcagagggtggggctgcacagaggggaacatcagctgcagctctgcaccaggccggtccctggggactggggcgctcctccctcaggctttctccctcagtcttggcttctccagggctctggggtgtctggagctaggcttggccctaccattctggggccatttccaccacagttggggctctcctgccttcacgcgtgggtgtctgctacttccccatctttaaaatgctgccagagcgattgcggcccctcaccttgtccacgtatcaggaatgtgaatgtgggacctttcctccatccctgttgtccggagccagctcactgtcttccacactggtgctaactggcccaggcactggagtggaatagaatgcagctggaggctacgcatggcctctgcagcacacgcagctggagagggcttctgtccctgtcagcggcagagggcgttggggctggccggggcaccttgtccctgctatggtccacatgctcacgctgtccacctgccaggtggagtgtatgtggctgtggccctccctcgtggaggtgccgtgctttaaagaggccttagtgcccgggatgggcacagtgttttgaagggaggtgggagctcttgctctcctggtcactgcagaatgacagagaaggtgaagctccatgcatgtgtgcgcgggtgtatgtgcgctcagggtctctgtttaagtatcagctaaagatgtgcttcctccgtgtctgtcatacactgagaccaacaggctacagtgtccctgattcttggaaaagcctggagaagctggggagatgcggttcacaatgcctcggtataggaggctgtgttgagctgacattcaaatggattctttaataataatgaaactggcgagtaaaaaaaaaaaaaaaaaaaaaaaaaaaaaaaaaaaaaaaaaaaaaaaaa

SEQ ID NO: 1167 - protein, 559 aa, Homo sapiens
MNPLFGPNLFLLQQEQQGLAGPLGDSLGGDHFAGGGDLPPAPLSPAGPAAYSPPGPGPAPPAAMALRNDLGSNINVLKTLNLRFRCFLAKVHELERRNRLLEKQLQQALEEGKQGRRGLGRRDQAVQTGFVSPIRPLGLQLGARPAAVCSPSARVLGSPARSPAGPLAPSAASLSSSSTSTSTTYSSSARFMPGTIWSFSHARRLGPGLEPTLVQGPGLSWVHPDGVGVQIDTITPEIRALYNVLAKVKRERDEYKRRWEEEYTVRIQLQDRVNELQEEAQEADACQEELALKVEQLKAELVVFKGLMSNNLSELDTKIQEKAMKVDMDICRRIDITAKLCDVAQQRNCEDMIQMFQVPSMGGRKRERKAAVEEDTSLSESEGPRQPDGDEEESTALSINEEMQRMLNQLREYDFEDDCDSLTWEETEETLLLWEDFSGYAMAAAEAQGEQEDSLEKVIKDTESLFKTREKEYQETIDQIELELATAKNDMNRHLHEYMEMCSMKRGLDVQMETCRRLITQSGDRKSPAFTAVPLSDPPPPPSEAEDSDRDVSSDSSMR

SEQ ID NO: 1168 - DNA, 1957 bp, Homo sapiens
ctctagatgttggctatggaaaaagactttttttagaaaaaaatttcctcttgagccatcatgcacatctgactgcagccccagcgagcccttccttccttgtctgactgctcttcttctcgatttcttcttgttctgccttctcggtttgcagccctgacccccgctgtgtgtctggcccttggtgactgtccgtgtttctgttcctgtcattgtaactgtgacttttctctctgtctgcccccccttcctactggttcatgcttctcccccattcccaccctctctgcccggcctcccgctcccgccctttctcctcatgcacccggcctcgtctctgtagtctctgcacttgtctcccattaaggtcccatccatgggggggcggaagcgggagcgcaaggctgccgtcgaggaggacacctccctgtcggagagtgaggggccccgccagcccgatggggatgaggaggagagcacagccctcagcatcaacgaggagatgcagcgcatgctcaaccagctgagggagtatgattttgaggacgactgtgacagcctgacttgggaggagactgaggagaccctgctgctttgggaggatttctcaggctatgccatggcagctgcagaggcccagggagagcaggaagatagcctggagaaggtgattaaagatacggagtccctgttcaaaacccgggagaaggagtatcaggagaccattgaccagatagagctggagttggccacggccaagaacgacatgaaccggcacctgcacgagtacatggagatgtgcagcatgaagcgcggcctggacgtgcagatggagacctgccgccggctcatcacccagtctggagaccgaaagtctcctgctttcactgcggtcccgcttagcgacccgccgccgccgccaagcgaggctgaggactccgatcgcgatgtctcatctgacagctccatgagatagagacctgcctcccccttgcacccgaggccctcgcagcagggagctcagcgaggcagagggtggggctgcacagaggggaacatcagctgcagctctgcaccaggccggtccctggggactggggcgctcctccctcaggctttctccctcagtcttggcttctccagggctctggggtgtctggagctaggcttggccctaccattctggggccatttccaccacagttggggctctcctgccttcacgcgtgggtgtctgctacttccccatctttaaaatgctgccagagcgattgcggcccctcaccttgtccacgtatcaggaatgtgaatgtgggacctttcctccatccctgttgtccggagccagctcactgtcttccacactggtgctaactggcccaggcactggagtggaatagaatgcagctggaggctacgcatggcctctgcagcacacgcagctggagagggcttctgtccctgtcagcggcagagggcgttggggctggccggggcaccttgtccctgctatggtccacatgctcacgctgtccacctgccaggtggagtgtatgtggctgtggccctccctcgtggaggtgccgtgctttaaagaggccttagtgcccgggatgggcacagtgttttgaagggaggtgggagctcttgctctcctggtcactgcagaatgacagagaaggtgaagctccatgcatgtgtgcgcgggtgtatgtgcgctcagggtctctgtttaagtatcagctaaagatgtgcttcctccgtgtctgtcatacactgagaccaacaggctacagtgtccctgattcttggaaaagcctggagaagctggggagatgcggttcacaatgcctcggtataggaggctgtgttgagctgacattcaaatggattctttaataataatgaaactggcgagtaaaaaaaaaaaaaaaaaaaaaaaaaaaaaaaaaaaaaa

SEQ ID NO: 1169 - protein, 199 aa, Homo sapiens
MGGRKRERKAAVEEDTSLSESEGPRQPDGDEEESTALSINEEMQRMLNQLREYDFEDDCDSLTWEETEETLLLWEDFSGYAMAAAEAQGEQEDSLEKVIKDTESLFKTREKEYQETIDQIELELATAKNDMNRHLHEYMEMCSMKRGLDVQMETCRRLITQSGDRKSPAFTAVPLSDPPPPPSEAEDSDRDVSSDSSMR

SEQ ID NO: 1170 - DNA, 2047 bp, Homo sapiens
gcgcgggtccccgggtctgacaggagcagcctgtgggcaccgcggcggtagttggaggcgggagagggtccgtagccgcgccgccctgccccgccatgggcctcctgtcggacccggttcgccggcgcgcgctcgcccgcctagtgctgcgcctcaacgcgccgttgtgcgtgctgagctacgtggcgggcatcgcctggttcttggcgctggttttcccgccgctgacccagcgcacttacatgtcggagaacgccatgggctccaccatggtggaggagcagtttgcgggcggagaccgtgcccgggcttttgcccgggacttcgccgcccaccgcaagaagtcgggggctctgccagtggcctggcttgaacggacgatgcggtcagtagggctggaggtctacacgcagagtttctcccggaaactgcccttcccagatgagacccacgagcgctatatggtgtcgggcaccaacgtgtacggcatcctgcgggccccgcgtgctgccagcaccgagtcgcttgtgctcaccgtgccctgtggctctgactctaccaacagccaggctgtggggctgctgctggcactggctgcccacttccgggggcagatttattgggccaaagatatcgtcttcctggtaacagaacatgaccttctgggcactgaggcttggcttgaagcctaccacgatgtcaatgtcactggcatgcagtcgtctcccctgcagggccgagctggggccattcaggcagccgtggccctggagctgagcagtgatgtggtcaccagcctcgatgtggccgtggaggggcttaacgggcagctgcccaaccttgacctgctcaatctcttccagaccttctgccagaaagggggcctgttgtgcacgcttcagggcaagctgcagcccgaggactggacatcattggatggaccgctgcagggcctgcagacactgctgctcatggttctgcggcaggcctccggccgcccccacggctcccatggcctcttcctgcgctaccgtgtggaggccctaaccctgcgtggcatcaatagcttccgccagtacaagtatgacctggtggcagtgggcaaggctttggagggcatgttccgcaagctcaaccacctcctggagcgcctgcaccagtccttcttcctctacttgctccccggcctctcccgcttcgtctccatcggcctctacatgcccgctgtcggcttcttgctcctggtccttggtctcaaggctctggaactgtggatgcagctgcatgaggctggaatgggccttgaggagcccgggggtgcccctggccccagtgtaccccttcccccatcacagggtgtggggctggcctcgctcgtggcacctctgctgatctcacaggccatgggactggccctctatgtcctgccagtgctgggccaacacgttgccacccagcacttcccagtggcagaggctgaggctgtggtgctgacactgctggcgatttatgcagctggcctggccctgccccacaatacccaccgggtggtaagcacacaggccccagacaggggctggatggcactgaagctggtagccctgatctacctagcactgcagctgggctgcatcgccctcaccaacttctcactgggcttcctgctggccaccaccatggtgcccactgctgcgcttgccaagcctcatgggccccggaccctttatgctgccctgctggtgctgaccagcccggcagccacgctccttggcagcctgttcctgtggcgggagctgcaggaggcgccactgtcactggccgagggctggcagctcttcctggcagcgctagcccagggtgtgctggagcaccacacctacggcgccctgctcttcccactgctgtccctgggcctctacccctgctggctgcttttctggaatgtgctcttctggaagtgagatctgcctgtccgggctgggacagagactccccaaggaccccattctgcctccttctggggaaataaatgagtgtctgtttcagc

SEQ ID NO: 1171 - protein, 621 aa, Homo sapiens
MGLLSDPVRRRALARLVLRLNAPLCVLSYVAGIAWFLALVFPPLTQRTYMSENAMGSTMVEEQFAGGDRARAFARDFAAHRKKSGALPVAWLERTMRSVGLEVYTQSFSRKLPFPDETHERYMVSGTNVYGILRAPRAASTESLVLTVPCGSDSTNSQAVGLLLALAAHFRGQIYWAKDIVFLVTEHDLLGTEAWLEAYHDVNVTGMQSSPLQGRAGAIQAAVALELSSDVVTSLDVAVEGLNGQLPNLDLLNLFQTFCQKGGLLCTLQGKLQPEDWTSLDGPLQGLQTLLLMVLRQASGRPHGSHGLFLRYRVEALTLRGINSFRQYKYDLVAVGKALEGMFRKLNHLLERLHQSFFLYLLPGLSRFVSIGLYMPAVGFLLLVLGLKALELWMQLHEAGMGLEEPGGAPGPSVPLPPSQGVGLASLVAPLLISQAMGLALYVLPVLGQHVATQHFPVAEAEAVVLTLLAIYAAGLALPHNTHRVVSTQAPDRGWMALKLVALIYLALQLGCIALTNFSLGFLLATTMVPTAALAKPHGPRTLYAALLVLTSPAATLLGSLFLWRELQEAPLSLAEGWQLFLAALAQGVLEHHTYGALLFPLLSLGLYPCWLLFWNVLFWK

SEQ ID NO: 1172 - DNA, 6765 bp, Homo sapiens
cgccacccccgggctcgggtggccccgcttcagtcccagggcagggatccttccatgaagactgaggcaggcggagctgctaagagcctgctgacatgacatcggccacagagtttgaaaatgtgggcaaccagccaccttacagcaggatcaatgcccgctgggacgccccagacgacgagctggataatgacaatagctcagccaggctctttgagaggtcccggataaaggccttggcagatgagcgggaagttgttcagaaaaagaccttcacgaaatgggtgaactcgcacctggctcgagtgtcctgccgcatcaccgatctctacaaggacctgcgggatgggcgcatgctcatcaagctgctggaggtgctctctggagagatgctgccaaagcccaccaaggggaagatgcgcatccactgcctggagaatgtggacaaggctctccagttcctcaaggagcagcgtgtacacctggagaacatgggctcccatgacattgtagatggcaaccaccgcctggtcctgggcctcatctggaccatcatcctccgcttccagattcaggacattgtggtccaaactcaggaaggtcgtgaaacacgctcagccaaggatgcgttgctgttgtggtgtcagatgaagacggcaggctaccctcatgttaatgtcaccaactttacctccagctggaaggatggcttggcctttaatgccctgatacacaagcaccggcccgacctgatcgactttgataagctgaaggactccaatgcccggcacaacctggagcacgcattcaatgtggctgagcgccagctgggcatcatcccgctcctcgaccccgaagatgtctttacggaaaaccctgatgagaaatccatcatcacctatgtggtggccttttaccactacttctccaagatgaaggtgctggcagtggagggcaagcgtgtcggcaaggttattgaccatgccattgagactgagaagatgattgaaaagtacagcgggctagcctcggacctgctcacctggatcgagcagaccatcactgtcctgaacagccgcaagtttgccaactcgctgacgggcgtccagcagcagctgcaggccttcagcacctaccgcaccgtggagaagccgcccaagtttcaagagaaggggaatctggaagttctactttttaccatccagtcccggatgagagccaacaatcagaaagtgtacacaccccacgatgggaaactagtgtctgacatcaacagggcctgggaaagcctggaggaagctgggtatcggcgggagctggccctgagaaatgagctcattcggcaggagaagctagagcaactagcccggcgctttgaccggaaggccgcaatgagagagacctggctcaatgaaaaccagcgcctcgtggcccaggataactttgggtatgacctggcagctgtggaggccgccaagaagaagcatgaggccatcgagaccgacacggctgcctacgaggagcgggtgagagccctggaggacctggctcaggagctggagaaagagaactaccatgaccagaagcgcatcacggcccgcaaggacaatatactgcgcctatggagctacctgcaggagctgctgcagtcccggcgccagaggctcgagaccaccctggcactgcagaagctcttccaggacatgctgcacagcatcgactggatggatgagatcaaggctcacctcttgtctgccgagtttgggaagcacttgttggaggttgaagacctgctacagaagcacaagttgatggaagctgacatcgccatccaaggggacaaagtgaaggccatcaccgcagccaccctgaagttcaccgaggggaaagggtaccagccttgtgacccccaggtcatccaggaccgcatgagccacttggagcagtgctttgaggagctgagcaacatggcagctggcgcaaggacccaactggagcagtccaaacgactctggaagttcttctgggagatggatgaggctgagagctggatcaaggagaaggagcagatctattcttccctggactatggcaaagacctgaccagtgtgctcatcttacagcgcaagcacaaggcctttgaggatgagctccgtgggctggatgctcacctggagcagatcttccaggaggctcatggcatggttgcgcgcaagcagtttgggcacccgcagatcgaggcccgcatcaaggaggtgtcggcacagtgggaccagctgaaggacctggctgccttctgcaagaagaacctccaggatgctgagaactttttccagttccagggcgatgcggatgacctgaaggcttggctgcaagacgcccaccggctgctctctggtgaagatgtggggcaggacgaaggggccacgcgggccctggggaaaaagcacaaggacttcctggaggagctggaggagagccgtggggtgatggagcacctggagcagcaggcccagggattccccgaagagtttcgggattccccagatgtgacccatcggctgcaggccctgcgggagctctaccaacaggtggtggcccaggcggacctgcgtcagcagaggctgcaggaagccctggacctgtacacggtgttcggggagacagacgcctgtgagctgtggatgggagagaaggagaagtggctggccgagatggaaatgccagacaccctggaggacctggaggtcgtgcagcacaggttcgacatcctggaccaggagatgaagaccttgatgactcagattgatggtgtgaacctcgctgccaacagcttggtagagagtggccacccacgcagcagggaggtgaagcagtaccaggaccatctgaacaccaggtggcaggcatttcagaccctggtgtcggagcggcgggaggctgtggactcagccctccgagtgcacacactatgcgtagattgcgaggagaccagcaagtggatcacggacaagacaaaggtagtggagtccacaaaagacctggggcgggacctggcaggtatcatcgccatccagaggaagttgtcagggctggagcgtgacgtggccgccatccaggcccgtgtggatgccctggagcgtgagtcccagcagctgatggactcgcaccctgagcagaaggagaatattggtcagcggcaaaaacacttggaggagctgtggcagggcctgcagcaatccctgcagggccaggaggacttgctgggggaagtcagccagctgcaggccttcctgcaggatctggatgacttccaggcctggctctccatcacccagaaagctgtggcctctgaggacatgcccgaatccctcccagaggctgagcagctcctgcagcagcatgcaggtatcaaggatgagattgacgggcaccaagacagctaccagcgtgttaaggagtctggggagaaagtgatccaaggccagacggacccagagtatctgcttctgggccagcggctggagggcctggatactggctgggatgccctgggcaggatgtgggagagccgcagccacaccctcgctcagtgccttggcttccaggagttccagaaagatgccaagcaggctgaagccatcctcagcaaccaggaatacactctggctcacttggagcccccagactccctggaagctgcagaggctgggatccggaagtttgaggatttcttggggtctatggagaacaaccgggataaggtcttgagtcctgtggactctggaaacaagctggtagctgagggaaacctatactcagacaagatcaaggagaaggtgcagctgattgaggacaggcacaggaagaacaacgagaaggcccaggaggcctctgtcctactgagagacaacctggagctacagaacttcctccagaactgccaggagctcactctctggatcaacgacaagctgctgacatctcaggatgtctcctatgatgaagcacgaaaccttcacaataaatggctaaagcaccaggcgtttgtggcagagctggcttcccatgaagggtggctagagaacatcgatgcggaaggaaagcagctgatggatgagaagccccagtttacagccctggtgtcccaaaagctggaagccctgcaccggctctgggacgagctgcaggccaccacaaaggagaagacccagcacctctcggctgccaggagctccgacctgcgcttgcagacccatgctgacctcaacaagtggatcagcgccatggaggaccagctgcggtcagacgacccgggcaaggacctgaccagtgtcaatcggatgttggctaagctgaagcgagtggaggaccaagtgaatgtgcggaaagaggagctgggggagctgtttgcccaggtgccttcaatgggagaggagggaggagatgcagacttgagcatcgagaagcggttcctggacctcctggaacccctaggaaggaggaagaagcagctggaatcatccagagccaagctgcagatcagccgggacttagaggatgagacgctttgggtggaggagaggctgcctctggcccagtcagccgactatggcactaatctgcaaactgtgcaactgttcatgaagaagaaccagacactgcagaatgagattctgggccatacgccgcgggttgaggatgtgctgcagagagggcagcagctggtggaggcggcggagatcgactgccaggaccttgaggagcgcctggggcacctgcagagctcctgggacaggctgcgggaggcagcggccgggaggctgcagcgactgagggacgccaatgaggcacagcagtactacctggatgcggacgaggctgaggcctggattggcgagcaggagctctatgtcatctccgatgagatccccaaggatgaagagggcgccatcgtgatgctgaagcgacatttgcggcagcagcgtgcggtggaggactacggccggaacatcaagcagctggccagccgggcccagggcctgctgtctgcaggccaccctgagggggaacagatcatcagacttcaggggcaagtggacaagcactacgcagggctgaaggacgtggcggaagagcgcaagcgcaagctggagaacatgtaccacctgttccagctcaagcgggagaccgacgacctggagcagtggatttcagaaaaggagctagtggcctcttccccggaaatggggcaagactttgaccacgtgactcttctgcgggacaagttccgggactttgcccgggagaccggggcgattgggcaggagcgggtggacaatgtgaatgccttcatcgagcgactcatcgacgcgggccacagcgaggcggccaccatcgccgagtggaaggacgggctgaacgagatgtgggcagacctcctggagctcattgacacgcgcatgcagctgctggccgcctcctatgacctgcaccgctacttctacacgggtgccgagatcctgggcctcatcgacgagaagcaccgcgagctgcccgaggacgtggggctggacgccagcacggccgagtccttccaccgggtgcacacagccttcgagcgggacgttcacctgctgggtgtccaggtgcagcagttccaggacgtggccacccgtctgcagacagcatatgctggggagaaggcagaggccatccagaacaaggagcaggaggtgtctgccgcgtggcaggcgctgctcgatgcctgtgccgggcgccggacccagctagtggacacggcggataaattccgcttcttcagcatggcccgtgacctcctctcctggatggagagcatcatccggcagatcgagacccaggagaggcccagggatgtctcctctgtggaactgctcatgaagtatcaccagggcatcaatgcagagattgaaacccggagcaagaacttcagtgcctgcctggagcttggcgagtccctgctgcagcggcagcaccaggcctcagaggagatccgcgagaaactgcagcaggtgatgtccaggaggaaagagatgaatgagaagtgggaagcccgctgggagcggctccgcatgttgctggaggtgtgccagttctcgagggatgcctctgtggctgaggcgtggctgattgcccaggagccctacctggccagcggggactttggacacacagtggacagtgtggagaagctcatcaagaggcatgaggcttttgagaagtccacggccagctgggcagagcgctttgctgccctggagaagcccaccacgcttgagctgaaagaacgccagattgcagagagacccgcagaggagactgggcctcaagaggaggaaggcgagacagcaggggaggctccagtttcccaccatgcggccaccgagagaacgtccccggtcagtctctggtctcgtttgtctagttcctgggagtcactgcagccagagccctctcacccctactagctcagcccaggtggaggcgagatgagctgcgcagccccgccctccatcctccccacatccctgcagccacctcccagcagagcaggctacgtcctcactgaggtgttcttcatgagagtactagcctcctccactcctccccacagcgcagaggaaacaggccagcccagtgacatgacgttattagttttgttttacctgaatgtaataaattttattgtataaatatatcaccatttacatgaggggaaacact

SEQ ID NO: 1173 - protein, 2137 aa, Homo sapiens
MTSATEFENVGNQPPYSRINARWDAPDDELDNDNSSARLFERSRIKALADEREVVQKKTFTKWVNSHLARVSCRITDLYKDLRDGRMLIKLLEVLSGEMLPKPTKGKMRIHCLENVDKALQFLKEQRVHLENMGSHDIVDGNHRLVLGLIWTIILRFQIQDIVVQTQEGRETRSAKDALLLWCQMKTAGYPHVNVTNFTSSWKDGLAFNALIHKHRPDLIDFDKLKDSNARHNLEHAFNVAERQLGIIPLLDPEDVFTENPDEKSIITYVVAFYHYFSKMKVLAVEGKRVGKVIDHAIETEKMIEKYSGLASDLLTWIEQTITVLNSRKFANSLTGVQQQLQAFSTYRTVEKPPKFQEKGNLEVLLFTIQSRMRANNQKVYTPHDGKLVSDINRAWESLEEAGYRRELALRNELIRQEKLEQLARRFDRKAAMRETWLNENQRLVAQDNFGYDLAAVEAAKKKHEAIETDTAAYEERVRALEDLAQELEKENYHDQKRITARKDNILRLWSYLQELLQSRRQRLETTLALQKLFQDMLHSIDWMDEIKAHLLSAEFGKHLLEVEDLLQKHKLMEADIAIQGDKVKAITAATLKFTEGKGYQPCDPQVIQDRMSHLEQCFEELSNMAAGARTQLEQSKRLWKFFWEMDEAESWIKEKEQIYSSLDYGKDLTSVLILQRKHKAFEDELRGLDAHLEQIFQEAHGMVARKQFGHPQIEARIKEVSAQWDQLKDLAAFCKKNLQDAENFFQFQGDADDLKAWLQDAHRLLSGEDVGQDEGATRALGKKHKDFLEELEESRGVMEHLEQQAQGFPEEFRDSPDVTHRLQALRELYQQVVAQADLRQQRLQEALDLYTVFGETDACELWMGEKEKWLAEMEMPDTLEDLEVVQHRFDILDQEMKTLMTQIDGVNLAANSLVESGHPRSREVKQYQDHLNTRWQAFQTLVSERREAVDSALRVHTLCVDCEETSKWITDKTKVVESTKDLGRDLAGIIAIQRKLSGLERDVAAIQARVDALERESQQLMDSHPEQKENIGQRQKHLEELWQGLQQSLQGQEDLLGEVSQLQAFLQDLDDFQAWLSITQKAVASEDMPESLPEAEQLLQQHAGIKDEIDGHQDSYQRVKESGEKVIQGQTDPEYLLLGQRLEGLDTGWDALGRMWESRSHTLAQCLGFQEFQKDAKQAEAILSNQEYTLAHLEPPDSLEAAEAGIRKFEDFLGSMENNRDKVLSPVDSGNKLVAEGNLYSDKIKEKVQLIEDRHRKNNEKAQEASVLLRDNLELQNFLQNCQELTLWINDKLLTSQDVSYDEARNLHNKWLKHQAFVAELASHEGWLENIDAEGKQLMDEKPQFTALVSQKLEALHRLWDELQATTKEKTQHLSAARSSDLRLQTHADLNKWISAMEDQLRSDDPGKDLTSVNRMLAKLKRVEDQVNVRKEELGELFAQVPSMGEEGGDADLSIEKRFLDLLEPLGRRKKQLESSRAKLQISRDLEDETLWVEERLPLAQSADYGTNLQTVQLFMKKNQTLQNEILGHTPRVEDVLQRGQQLVEAAEIDCQDLEERLGHLQSSWDRLREAAAGRLQRLRDANEAQQYYLDADEAEAWIGEQELYVISDEIPKDEEGAIVMLKRHLRQQRAVEDYGRNIKQLASRAQGLLSAGHPEGEQIIRLQGQVDKHYAGLKDVAEERKRKLENMYHLFQLKRETDDLEQWISEKELVASSPEMGQDFDHVTLLRDKFRDFARETGAIGQERVDNVNAFIERLIDAGHSEAATIAEWKDGLNEMWADLLELIDTRMQLLAASYDLHRYFYTGAEILGLIDEKHRELPEDVGLDASTAESFHRVHTAFERDVHLLGVQVQQFQDVATRLQTAYAGEKAEAIQNKEQEVSAAWQALLDACAGRRTQLVDTADKFRFFSMARDLLSWMESIIRQIETQERPRDVSSVELLMKYHQGINAEIETRSKNFSACLELGESLLQRQHQASEEIREKLQQVMSRRKEMNEKWEARWERLRMLLEVCQFSRDASVAEAWLIAQEPYLASGDFGHTVDSVEKLIKRHEAFEKSTASWAERFAALEKPTTLELKERQIAERPAEETGPQEEEGETAGEAPVSHHAATERTSPVSLWSRLSSSWESLQPEPSHPY

SEQ ID NO: 1174 - DNA, 3004 bp, Homo sapiens
agacctaaggaaacgtgtcgtctggaatgggcttgggggccacgcctgcacatctccgcgagacagagggataaagtgaagatggtgctgttattgttacctcgagtgccacatgcgatctctgagatatgtacacagtcattcttactatcgcactcagccattcttactacgctaaagaagaaataattattcgaggatatttgcctggcccagaagaaacttatgtaaatttcatgaactattatatccgttttcctcggagtgagagaaaactctttttagatatcatctgagaggtagttaatttggcaccatggggatacagggattgctacaatttatcaaagaagcttcagaacccatccatgtgaggaagtataaagggcaggtagtagctgtggatacatattgctggcttcacaaaggagctattgcttgtgctgaaaaactagccaaaggtgaacctactgataggtatgtaggattttgtatgaaatttgtaaatatgttactatctcatgggatcaagcctattctcgtatttgatggatgtactttaccttctaaaaaggaagtagagagatctagaagagaaagacgacaagccaatcttcttaagggaaagcaacttcttcgtgaggggaaagtctcggaagctcgagagtgtttcacccggtctatcaatatcacacatgccatggcccacaaagtaattaaagctgcccggtctcagggggtagattgcctcgtggctccctatgaagctgatgcgcagttggcctatcttaacaaagcgggaattgtgcaagccataattacagaggactcggatctcctagcttttggctgtaaaaaggtaattttaaagatggaccagtttggaaatggacttgaaattgatcaagctcggctaggaatgtgcagacagcttggggatgtattcacggaagagaagtttcgttacatgtgtattctttcaggttgtgactacctgtcatcactgcgtgggattggattagcaaaggcatgcaaagtcctaagactagccaataatccagatatagtaaaggttatcaagaaaattggacattatctcaagatgaatatcacggtaccagaggattacatcaacgggtttattcgggccaacaataccttcctctatcagctagtttttgatcccatcaaaaggaaacttattcctctgaacgcctatgaagatgatgttgatcctgaaacactaagctacgctgggcaatatgttgatgattccatagctcttcaaatagcacttggaaataaagatataaatacttttgaacagatcgatgactacaatccagacactgctatgcctgcccattcaagaagtcgtagttgggatgacaaaacatgtcaaaagtcagctaatgttagcagcatttggcataggaattactctcccagaccagagtcgggtactgtttcagatgccccacaattgaaggaaaatccaagtactgtgggagtggaacgagtgattagtactaaagggttaaatctcccaaggaaatcatccattgtgaaaagaccaagaagtgcagagctgtcagaagatgacctgttgagtcagtattctctttcatttacgaagaagaccaagaaaaatagctctgaaggcaataaatcattgagcttttctgaagtgtttgtgcctgacctggtaaatggacctactaacaaaaagagtgtaagcactccacctaggacgagaaataaatttgcaacatttttacaaaggaaaaatgaagaaagtggtgcagttgtggttccagggaccagaagcaggtttttttgcagttcagattctactgactgtgtatcaaacaaagtgagcatccagcctctggatgaaactgctgtcacagataaagagaacaatctgcatgaatcagagtatggagaccaagaaggcaagagactggttgacacagatgtagcacgtaattcaagtgatgacattccgaataatcatattccaggtgatcatattccagacaaggcaacagtgtttacagatgaagagtcctactcttttgagagcagcaaatttacaaggaccatttcaccacccactttgggaacactaagaagttgttttagttggtctggaggtcttggagatttttcaagaacgccgagcccctctccaagcacagcattgcagcagttccgaagaaagagcgattcccccacctctttgcctgagaataatatgtctgatgtgtcgcagttaaagagcgaggagtccagtgacgatgagtctcatcccttacgagaaggggcatgttcttcacagtcccaggaaagtggagaattctcactgcagagttcaaatgcatcaaagctttctcagtgctctagtaaggactctgattcagaggaatctgattgcaatattaagttacttgacagtcaaagtgaccagacctccaagctatgtttatctcatttctcaaaaaaagacacacctctaaggaacaaggttcctgggctatataagtccagttctgcagactctctttctacaaccaagatcaaacctctaggacctgccagagccagtgggctgagcaagaagccggcaagcatccagaagagaaagcatcataatgccgagaacaagccggggttacagatcaaactcaatgagctctggaaaaactttggatttaaaaaattctgaaaagcttcctccttgtaagaaacccctgtccccagtcagagataacatccaactaactccagaagcggaagaggatatatttaacaaacctgaatgtggccgtgttcaaagagcaatattccagtaaatgcagactgctgcaaagcttttgcctgcaagagaatctgatcaatttgaagtccctgtttgggaatgaggcacttatcagcatgaagaattttttctcattctgtgccattttaaaaatagaatacattttgtatattaactttataa

SEQ ID NO: 1175 - protein, 803 aa, Homo sapiens
MGIQGLLQFIKEASEPIHVRKYKGQVVAVDTYCWLHKGAIACAEKLAKGEPTDRYVGFCMKFVNMLLSHGIKPILVFDGCTLPSKKEVERSRRERRQANLLKGKQLLREGKVSEARECFTRSINITHAMAHKVIKAARSQGVDCLVAPYEADAQLAYLNKAGIVQAIITEDSDLLAFGCKKVILKMDQFGNGLEIDQARLGMCRQLGDVFTEEKFRYMCILSGCDYLSSLRGIGLAKACKVLRLANNPDIVKVIKKIGHYLKMNITVPEDYINGFIRANNTFLYQLVFDPIKRKLIPLNAYEDDVDPETLSYAGQYVDDSIALQIALGNKDINTFEQIDDYNPDTAMPAHSRSRSWDDKTCQKSANVSSIWHRNYSPRPESGTVSDAPQLKENPSTVGVERVISTKGLNLPRKSSIVKRPRSAELSEDDLLSQYSLSFTKKTKKNSSEGNKSLSFSEVFVPDLVNGPTNKKSVSTPPRTRNKFATFLQRKNEESGAVVVPGTRSRFFCSSDSTDCVSNKVSIQPLDETAVTDKENNLHESEYGDQEGKRLVDTDVARNSSDDIPNNHIPGDHIPDKATVFTDEESYSFESSKFTRTISPPTLGTLRSCFSWSGGLGDFSRTPSPSPSTALQQFRRKSDSPTSLPENNMSDVSQLKSEESSDDESHPLREGACSSQSQESGEFSLQSSNASKLSQCSSKDSDSEESDCNIKLLDSQSDQTSKLCLSHFSKKDTPLRNKVPGLYKSSSADSLSTTKIKPLGPARASGLSKKPASIQKRKHHNAENKPGLQIKLNELWKNFGFKKF

SEQ ID NO: 1176 - DNA, 3006 bp, Homo sapiens
agacctaaggaaacgtgtcgtctggaatgggcttgggggccacgcctgcacatctccgcgagacagagggataaagtgaagatggtgctgttattgttacctcgagtgccacatgcgatctctgagatatgtacacagtcattcttactatcgcactcagccattcttactacgctaaagaagaaataattattcgaggatatttgcctggcccagaagaaacttatgtaaatttcatgaactattatatccgttttcctcggagtgagagaaaactctttttagatatcatctgagaggtagttaatttggcaccatggggatacagggattgctacaatttatcaaagaagcttcagaacccatccatgtgaggaagtataaagggcaggtagtagctgtggatacatattgctggcttcacaaaggagctattgcttgtgctgaaaaactagccaaaggtgaacctactgataggtatgtaggattttgtatgaaatttgtaaatatgttactatctcatgggatcaagcctattctcgtatttgatggatgtactttaccttctaaaaaggaagtagagagatctagaagagaaagacgacaagccaatcttcttaagggaaagcaacttcttcgtgaggggaaagtctcggaagctcgagagtgtttcacccggtctatcaatatcacacatgccatggcccacaaagtaattaaagctgcccggtctcagggggtagattgcctcgtggctccctatgaagctgatgcgcagttggcctatcttaacaaagcgggaattgtgcaagccataattacagaggactcggatctcctagcttttggctgtaaaaaggtaattttaaagatggaccagtttggaaatggacttgaaattgatcaagctcggctaggaatgtgcagacagcttggggatgtattcacggaagagaagtttcgttacatgtgtattctttcaggttgtgactacctgtcatcactgcgtgggattggattagcaaaggcatgcaaagtcctaagactagccaataatccagatatagtaaaggttatcaagaaaattggacattatctcaagatgaatatcacggtaccagaggattacatcaacgggtttattcgggccaacaataccttcctctatcagctagtttttgatcccatcaaaaggaaacttattcctctgaacgcctatgaagatgatgttgatcctgaaacactaagctacgctgggcaatatgttgatgattccatagctcttcaaatagcacttggaaataaagatataaatacttttgaacagatcgatgactacaatccagacactgctatgcctgcccattcaagaagtcgtagttgggatgacaaaacatgtcaaaagtcagctaatgttagcagcatttggcataggaattactctcccagaccagagtcgggtactgtttcagatgccccacaattgaaggaaaatccaagtactgtgggagtggaacgagtgattagtactaaagggttaaatctcccaaggaaatcatccattgtgaaaagaccaagaagtgcagagctgtcagaagatgacctgttgagtcagtattctctttcatttacgaagaagaccaagaaaaatagctctgaaggcaataaatcattgagcttttctgaagtgtttgtgcctgacctggtaaatggacctactaacaaaaagagtgtaagcactccacctaggacgagaaataaatttgcaacatttttacaaaggaaaaatgaagaaagtggtgcagttgtggttccagggaccagaagcaggtttttttgcagttcagattctactgactgtgtatcaaacaaagtgagcatccagcctctggatgaaactgctgtcacagataaagagaacaatctgcatgaatcagagtatggagaccaagaaggcaagagactggttgacacagatgtagcacgtaattcaagtgatgacattccgaataatcatattccaggtgatcatattccagacaaggcaacagtgtttacagatgaagagtcctactcttttgagagcagcaaatttacaaggaccatttcaccacccactttgggaacactaagaagttgttttagttggtctggaggtcttggagatttttcaagaacgccgagcccctctccaagcacagcattgcagcagttccgaagaaagagcgattcccccacctctttgcctgagaataatatgtctgatgtgtcgcagttaaagagcgaggagtccagtgacgatgagtctcatcccttacgagaaggggcatgttcttcacagtcccaggaaagtggagaattctcactgcagagttcaaatgcatcaaagctttctcagtgctctagtaaggactctgattcagaggaatctgattgcaatattaagttacttgacagtcaaagtgaccagacctccaagctatgtttatctcatttctcaaaaaaagacacacctctaaggaacaaggttcctgggctatataagtccagttctgcagactctctttctacaaccaagatcaaacctctaggacctgccagagccagtgggctgagcaagaagccggcaagcatccagaagagaaagcatcataatgccgagaacaagccggggttacagatcaaactcaatgagctctggaaaaactttggatttaaaaaagattctgaaaagcttcctccttgtaagaaacccctgtccccagtcagagataacatccaactaactccagaagcggaagaggatatatttaacaaacctgaatgtggccgtgttcaaagagcaatattccagtaaatgcagactgctgcaaagcttttgcctgcaagagaatctgatcaatttgaagtccctgtttgggaatgaggcacttatcagcatgaagaattttttctcattctgtgccattttaaaaatagaatacattttgtatattaactttataa

SEQ ID NO: 1177 - protein, 846 aa, Homo sapiens
MGIQGLLQFIKEASEPIHVRKYKGQVVAVDTYCWLHKGAIACAEKLAKGEPTDRYVGFCMKFVNMLLSHGIKPILVFDGCTLPSKKEVERSRRERRQANLLKGKQLLREGKVSEARECFTRSINITHAMAHKVIKAARSQGVDCLVAPYEADAQLAYLNKAGIVQAIITEDSDLLAFGCKKVILKMDQFGNGLEIDQARLGMCRQLGDVFTEEKFRYMCILSGCDYLSSLRGIGLAKACKVLRLANNPDIVKVIKKIGHYLKMNITVPEDYINGFIRANNTFLYQLVFDPIKRKLIPLNAYEDDVDPETLSYAGQYVDDSIALQIALGNKDINTFEQIDDYNPDTAMPAHSRSRSWDDKTCQKSANVSSIWHRNYSPRPESGTVSDAPQLKENPSTVGVERVISTKGLNLPRKSSIVKRPRSAELSEDDLLSQYSLSFTKKTKKNSSEGNKSLSFSEVFVPDLVNGPTNKKSVSTPPRTRNKFATFLQRKNEESGAVVVPGTRSRFFCSSDSTDCVSNKVSIQPLDETAVTDKENNLHESEYGDQEGKRLVDTDVARNSSDDIPNNHIPGDHIPDKATVFTDEESYSFESSKFTRTISPPTLGTLRSCFSWSGGLGDFSRTPSPSPSTALQQFRRKSDSPTSLPENNMSDVSQLKSEESSDDESHPLREGACSSQSQESGEFSLQSSNASKLSQCSSKDSDSEESDCNIKLLDSQSDQTSKLCLSHFSKKDTPLRNKVPGLYKSSSADSLSTTKIKPLGPARASGLSKKPASIQKRKHHNAENKPGLQIKLNELWKNFGFKKDSEKLPPCKKPLSPVRDNIQLTPEAEEDIFNKPECGRVQRAIFQ

SEQ ID NO: 1178 - DNA, 3239 bp, Homo sapiens
ggcgttgccggccgtgggtgctctggccacagtgagttaggggcgtcggagcgggtttctccaaccgcaatcggctccgctcaaggggaggaggagagtcccttctcggaaggcctaaggaaacgtgtcgtctggaatgggcttgggggccacgcctgcacatctccgcgagacagagggataaagtgaagatggtgctgttattgttacctcgagtgccacatgcgacctctgagatatgtacacagtcattcttactatcgcactcagccattcttactacgctaaagaagaaataattattcgaggatatttgcctggcccagaagaaacttatgtaaatttcatgaactattatatccgttttcctcggagtgagagaaaactctttttagatatcatctgagagaactagtgaatcccagtcactgagtggagttgagagtctaagaacctctgaaatttgagaactgctggaccagagcctttagagctctgataaggtgtcaacagggtagttaatttggcaccatggggatacagggattgctacaatttatcaaagaagcttcagaacccatccatgtgaggaagtataaagggcaggtagtagctgtggatacatattgctggcttcacaaaggagctattgcttgtgctgaaaaactagccaaaggtgaacctactgataggtatgtaggattttgtatgaaatttgtaaatatgttactatctcatgggatcaagcctattctcgtatttgatggatgtactttaccttctaaaaaggaagtagagagatctagaagagaaagacgacaagccaatcttcttaagggaaagcaacttcttcgtgaggggaaagtctcggaagctcgagagtgtttcacccggtctatcaatatcacacatgccatggcccacaaagtaattaaagctgcccggtctcagggggtagattgcctcgtggctccctatgaagctgatgcgcagttggcctatcttaacaaagcgggaattgtgcaagccataattacagaggactcggatctcctagcttttggctgtaaaaaggtaattttaaagatggaccagtttggaaatggacttgaaattgatcaagctcggctaggaatgtgcagacagcttggggatgtattcacggaagagaagtttcgttacatgtgtattctttcaggttgtgactacctgtcatcactgcgtgggattggattagcaaaggcatgcaaagtcctaagactagccaataatccagatatagtaaaggttatcaagaaaattggacattatctcaagatgaatatcacggtaccagaggattacatcaacgggtttattcgggccaacaataccttcctctatcagctagtttttgatcccatcaaaaggaaacttattcctctgaacgcctatgaagatgatgttgatcctgaaacactaagctacgctgggcaatatgttgatgattccatagctcttcaaatagcacttggaaataaagatataaatacttttgaacagatcgatgactacaatccagacactgctatgcctgcccattcaagaagtcatagttgggatgacaaaacatgtcaaaagtcagctaatgttagcagcatttggcataggaattactctcccagaccagagtcgggtactgtttcagatgccccacaattgaaggaaaatccaagtactgtgggagtggaacgagtgattagtactaaagggttaaatctcccaaggaaatcatccattgtgaaaagaccaagaagtgcagagctgtcagaagatgacctgttgagtcagtattctctttcatttacgaagaagaccaagaaaaatagctctgaaggcaataaatcattgagcttttctgaagtgtttgtgcctgacctggtaaatggacctactaacaaaaagagtgtaagcactccacctaggacgagaaataaatttgcaacatttttacaaaggaaaaatgaagaaagtggtgcagttgtggttccagggaccagaagcaggtttttttgcagttcagattctactgactgtgtatcaaacaaagtgagcatccagcctctggatgaaactgctgtcacagataaagagaacaatctgcatgaatcagagtatggagaccaagaaggcaagagactggttgacacagatgtagcacgtaattcaagtgatgacattccgaataatcatattccaggtgatcatattccagacaaggcaacagtgtttacagatgaagagtcctactcttttgagagcagcaaatttacaaggaccatttcaccacccactttgggaacactaagaagttgttttagttggtctggaggtcttggagatttttcaagaacgccgagcccctctccaagcacagcattgcagcagttccgaagaaagagcgattcccccacctctttgcctgagaataatatgtctgatgtgtcgcagttaaagagcgaggagtccagtgacgatgagtctcatcccttacgagaaggggcatgttcttcacagtcccaggaaagtggagaattctcactgcagagttcaaatgcatcaaagctttctcagtgctctagtaaggactctgattcagaggaatctgattgcaatattaagttacttgacagtcaaagtgaccagacctccaagctatgtttatctcatttctcaaaaaaagacacacctctaaggaacaaggttcctgggctatataagtccagttctgcagactctctttctacaaccaagatcaaacctctaggacctgccagagccagtgggctgagcaagaagccggcaagcatccagaagagaaagcatcataatgccgagaacaagccggggttacagatcaaactcaatgagctctggaaaaactttggatttaaaaaagattctgaaaagcttcctccttgtaagaaacccctgtccccagtcagagataacatccaactaactccagaagcggaagaggatatatttaacaaacctgaatgtggccgtgttcaaagagcaatattccagtaaatgcagactgctgcaaagcttttgcctgcaagagaatctgatcaatttgaagtccctgtttgggaatgaggcacttatcagcatgaagaattttttctcattctgtgccattttaaaaatagaatacattttgtatattgactttaaaaaaaaaaaaaaaaaaaaaa

SEQ ID NO: 1179 - protein, 846 aa, Homo sapiens
MGIQGLLQFIKEASEPIHVRKYKGQVVAVDTYCWLHKGAIACAEKLAKGEPTDRYVGFCMKFVNMLLSHGIKPILVFDGCTLPSKKEVERSRRERRQANLLKGKQLLREGKVSEARECFTRSINITHAMAHKVIKAARSQGVDCLVAPYEADAQLAYLNKAGIVQAIITEDSDLLAFGCKKVILKMDQFGNGLEIDQARLGMCRQLGDVFTEEKFRYMCILSGCDYLSSLRGIGLAKACKVLRLANNPDIVKVIKKIGHYLKMNITVPEDYINGFIRANNTFLYQLVFDPIKRKLIPLNAYEDDVDPETLSYAGQYVDDSIALQIALGNKDINTFEQIDDYNPDTAMPAHSRSHSWDDKTCQKSANVSSIWHRNYSPRPESGTVSDAPQLKENPSTVGVERVISTKGLNLPRKSSIVKRPRSAELSEDDLLSQYSLSFTKKTKKNSSEGNKSLSFSEVFVPDLVNGPTNKKSVSTPPRTRNKFATFLQRKNEESGAVVVPGTRSRFFCSSDSTDCVSNKVSIQPLDETAVTDKENNLHESEYGDQEGKRLVDTDVARNSSDDIPNNHIPGDHIPDKATVFTDEESYSFESSKFTRTISPPTLGTLRSCFSWSGGLGDFSRTPSPSPSTALQQFRRKSDSPTSLPENNMSDVSQLKSEESSDDESHPLREGACSSQSQESGEFSLQSSNASKLSQCSSKDSDSEESDCNIKLLDSQSDQTSKLCLSHFSKKDTPLRNKVPGLYKSSSADSLSTTKIKPLGPARASGLSKKPASIQKRKHHNAENKPGLQIKLNELWKNFGFKKDSEKLPPCKKPLSPVRDNIQLTPEAEEDIFNKPECGRVQRAIFQ

SEQ ID NO: 1180 - DNA, 8046 bp, Homo sapiens
ctgcggcggcgcgctccgagcctgcgtctagggcgcccccgggtcagagctgtcgccgtggccgccgctgcaaagaacaatgtaccgcaagcagcgctcgctcctccgtttcttcccaccggcctaaagacgacggcgggggcggcccgcgcagcggccgcagctctggctcctcttcaggcccggctcgccgcagctcaccgccgccttccgccctccggctcctcgtcgcggaccccggctcgccgaccccgctcgccctcaaggcaccgcggccgccgggcctcgccgtccccgccacgggttcgtcgcgtctccccgtccccgcctcgggcccgtcgcggctccccgtcgccaccgcggggccgacgactcttcccgccgggcccggccggcttcagaggcagcagccgaggggagtcccgcgccgactatgcccgggacggccgcggagaccatccaggcgacagcggcagccggagacgctctcctggtctgtgttctgactctttggaaaagagcttaaggatcactgttggcaatgaccacttctgtgttagcacaccagaacggcgacggcttagtgatcggctggggtcaccagtggataatctggaagacatggacagggatgacctgactgatgattctgtcttcactcgaagctcccagtgctctcggggtcttgagcgatatatttcccaggaggaagggcctctcagtcccttcttgggacaacttgatgaggactaccgaacaaaagaaactttcctgcatcgatctgattatagtccccatatcagttgtcatgatgagctgttgcggggaacagaacggaatcgagaaaaactcaaaggctactccatacgatctgaagaaaggagccgggaggccaaaagaccccgttatgatgacacagtgaagataaacagcatgggaggggatcacccaagttttacatcaggaactcgcaactatcgacagcgtagaagaagcccaagtcctaggtttctcgaccctgagtttcgagaactggatcttgccagacgaaagcgagaggaagaggaggagcgaagtaggagcttgagtcaggagctggttggggttgatggtggtggtactggctgttccatccctggattgtcaggtgtcctaacagcatcggagccaggatattctttgcatcggcctgaggaagtatctgtgatgcccaagaaatccattttgaagaagcggattgaggtggacataatggagccctccatgcagcttgagagtttttccagcagtaccagctccagccaggatcaccctctctactctgggcacccatcccttccactaagtggtgctattgctgcttttgcctcagagattgaaaacaaggggactatggtagagactgccttgaaggaacctcagggcaacctctaccaatggggtccccttcctgggattcccaaagacaacagtcctctcagagaaaaatttggaagttttctatgccacaaggataatttggatttgaaggctgagggacctgagcgacacacagacttcctgctgccccatgagagagctagccaggatggcagtggtttttcccgcattctgagcatgttggctgattctaccagtacacaggaaaaaaggcgacgtagctttcccgacattgaagatgaggagaaatttctctatggggatgaagaagaggatttaaaggcagaatccgtaccaaagccccttgggagctctgagagtgaagttatgaggcagaaggcaagctccctgccgtcttcagctccagctgtaaagctagaatcactagaagagaccaatccagaatatgcgaagatccatgacttgctcaagacaatagggctggatattggagtagcagagattagtcaattggctgcacgcacccaggaacgacttcatggcaagaagccatcattacgctcctcagctgaccgccgttcctcagttgaccgatacttttcagctgaccactgttcctcagttgaccaccgcttctcagctgaccgctgttcctcagttgaccactgcttctcagctgatcgacgttcctcagatccccacagactagagagcagggaggcacatcatagcaatacccactctccagaggtgtcccatccacacccaccttctcctgtggatccttacctgctcacaaaaaacagccctccattcctaaagtctgaccatccagtgggtcatatttcaggaccagaggtggttggtagtgggtttcagtcatctgttgcagtcaggtgcatgttgccatcagccccatctgccccaattagacttccacacactgctgctttatctcagtttcacatgccaagggcctctcagtttgctgcagctcggatacctccgaactaccagggacctgccattccccctgcctcttttgatgcctataggcactacatggcatatgcagcctccagatggcccatgtatcccacctctcaaccgtcaaaccaccctgtacctgaaccacacaggataatgccaataaccaaacaagctactcgtagccgtcccaatcttcgtgtgatccccactgtgactcctgataagcctaagcagaaagagtctctgcgaggctcaattcctgcggcccaagtgcctgtccaggtgtccattccatcactcataagatataatccagagaagatctctgatgagaagaaccgtgcttcccagaagcaaaaggttattgaagagagggaaaaactaaagaatgaccgggaagcccgccagaagaagatgtactatcttaggaccgagttagagcggcttcataaacaacaaggagaaatgctgcgcaagaaacgaagggagaaggatggccacaaagatcctctcttggtggaggtgagtcggcttcaggataacattatgaaggacattgcagagctacggcaagaggcagaagaggcagaaaagaagcaatctgaactggacaaagtggctcagatcttgggaattaacattttcgataaatcccagaagtctttaagtgacagtagagagcctacagagaagcctgggaaagcagaaaaatctaagagcccagaaaaagtgtcatcgttctcaaactcctcctccaacaaggaatcaaaagtaaacaatgagaagttttgtattaagagccccaagcctgccgaaagcccccagtcagccactaagcagttggatcagcccactgctgcttatgagtattatgatgctggcaatcactggtgcaaagactgcaacaccatctgtgggaccatgtttgatttcttcactcatatgcacaataagaagcacacacagacactggatccctacaacagaccttgggcttcaaagacccagagtgaggccaagcaagatgccataaagcgcactgacaagataactgttcctgcaaaaggctctgagtttctggttcccatcagtggattttattgccagctctgtgaggaatttttgggggatccaatttctggggagcaacatgtgaagggtcaccaacacaatgagaaatacaagaaatatgtggatgaaaacccattatatgaggagcggcggaatctggaccgccaagctggcttggctgtggtcctagagacagaacggcgacggcagagtgagctaaagcgcaaacttagtgagaaaccaaaggaggagaagaaagaaaaaaaggcaaaggctgtgaaagaagtaaaggaggatgacaaggtctctgagaaattagaagaccaactctctgagggtaggaactcccctgaaaaagctgaaaataaaaggaacactggcatcaaactccagtttaaagaagaagtaaagaaggaatcaccaacatcatcttcttttgggaaattcagctggaagaagcccgaaaaagaagaggagaaaagttccttggtgaccccaagtatctctaaagaagagattctagaaagtagtaaggacaaagaggatggcaaaactgaagctgggaaggcaaagcctatcaaaatcaagctctctgggaaaactgttgttgcacataccagcccttggatgcctgttgtgacaacttccacacagactaagatcggacccaacctgcctattccatccacagtactccgcaagtcatgttcagccacaatgagcaagccagctcctcttaacacctttctgtctattaagtcctctggaaccactgctaaacctctgccagtggttaaagagtcttcagctgatctcctcttacctccagacatcatctccaaagcatttggaggggaagaggtgattctaaaagggtctccagaggaaaaagtggtgttggctgaaaagagtgagccatctcatttacctgaacaaatactaccacctcctccaccacccccacctccaccacctccaccaccccccgttatacctcatccagctgccccgtctgctgctcaagcaaatgctatcttggctccagtaaaatcaaacccagttgtatctcaaactctcagccctggcttcgtgggtcctaacattttgaacccagtgttgcctgtagccatcatggcctcagcacagccagctgccattccttctgatgagacagctcctggggtgagtgagagtgaccgagaccagaccctgttctctgtgttagtacgtcctccaccacccctctcaagtgtgttcagtgaacaagccaaaaaattagagaagcgaaattcatgcttagccacagccaatgctaaggacctgtatgacatattctatagtagtggtggaaagggggcccctgagactaagggggcccctgagactaagctaagtggtggtccattggccaatggggaaaatagcaacctctctagaaccaaaagttcagacacctcttctacttctcctttgaacagcagtgcatcccaagaggagttgcatcaagatgagggtttggtcgctgctcctatagttagcaactctgaaaagcccattgcaaaaactctggtggccctagggaaatggtcagttgtagaacatgtaggcccaaaaagcacaggcagcacctatggcttcctacagcctctgacaaggttgtgccaaagcaggccttatgaaacaattaccccaaagacagacactttggccatatggacctctagttccttccagagtgacactagtagggatatatctccagagaagagtgagcttgacctgggagagccaggaccacctggtgtagaaccacctcctcaactgttagatatacagtgcaaagaatctcagaagttggtagaaatccacctcagagaatctgttaaccaggataaggaaagccaagagctccgtaaatctgaggattgtagagaaagtgagatagagacaaacactgaactaaaagaaagggtaaaggagctgtctgaggggatagttgatgagggagcaagtaccagcattggaccccacagcatagatgattctaatttgaaccatggaaacagatacatgtgggagggagaagtaaaacagcccaacttgctaatgattgacaaagaggctgaacagtccaataaattgatgacaggaagtgaaactccaagtaaagtagtgatcaaattgagtccacaggcttgctctttcacaaaggcaaaattagactcatttttatcagaagctaggtctttactcaacccacaagatacacctgtgaaaatttctgccccagagttgctgcttcattccccagccagatcagctatgtgtttaacaggtagtccacaagagcaaggagtttcagttgttagtgaggaggggctagagaattcagctccagaatcagcttctagaacttctaggtacagaagtctcaaactcaagagagaaagatcaaaagactttcaagttaaaaagatctatgagttggctgtttgggatgaaaacaagaagaggccagagacctgggagagcccagagaaaccaaaaacagaagcactggagctacaagatgtccatccagagttaacagtgacaatagaaagcaaggccctagaagactttgaagctacagacttaaaggtagaggagcttactgccctggggaatctgggggatatgcctgttgatttctgcactactcgggtaagcccagcacatagatccccaactgtcttgtgtcagaaagtgtgtgaagaaaattctgtatcacctatagggtgtaattcctccgatcccgctgacttcgaaccaatcccatctttttctgggtttccgttagattctcccaaaaccttggtgcttgactttgagacagagggtgaacgaaactcacctaatcccaggagtgttaggatcccttctcctaacattttgaaaactggacttacagaaaatgttgaccgtggcttggggggcctagagggaacacaccaggcccttgacctgttagcaggaggaatgatgcctgaggaagtaaaagaatcttcccaattagacaaacaagagtcactcggattggaattaaaaacaattaattttgcaggccttgggccatctccttgccttccagaccttgttgactttgtcacacggacctctggagttcaaaaagataaactgtgttctccactctctgagccaggtgacccttctaaatgtagttccctggagttggggccattacagctagaaatatcgaatgcatccaccacagaggtggcaattctgcaagtagatgatgacagtggcgaccctctgaatttggttaaagctccagtgtcaaggtcccctccaagggagcaggtaattgaagacaatatggtccctcagggaatgcctgaacaggaaactacagttggtgccatccaggaccacacagaatccagtgttcacaactaagaataaatacctagagctacttgtgagtgaatcattggcttctagaaatcagatgcccagatgatccaagactagtttgttatctcatctggaacctacaccaagagatgcagtcagcatcttaaagtaaatgttcatggaagctaaaaaatttacctcctttccttttccctttccccttaaaacaccagacaaatcgataacaacttatatatatatatatatatatctgtaaaaatgtattttgttaatttttttggccaatttattttctcccactttgtcattaaaatcacatgtctaactggctcaccacatagtgtgctttgattgtattttggctttgactctgccatttctgaaatgtgggggaggatggaggcagctgacctctccagttgctgtgttgtattcctacccaatttcctgggcagttgatgcatctctgggaaaaacaccagaaagcttgctgaaatggaaaacttggaagaattgttcatctcttaggcttccatttggatgggcctgccttaacattgtttgaaatgcagcgtgagtagctcttttgtttactgtttacaccccttattggcatgtcaactcctgtacttcccttactctgttgcctttcttgagatgcattgtcctgctaacccacaaacctgtttggaaataaacatggaagaatatctggcaggcttacttttagaagacgacaaatcggtaaggcttattcatggttcattgccaggagcagatatgcttttgagatcacttttatttttgaaatggcctttgttcattgtattgtgatccaataacactttgtattaaattgtttagcagccatttgtgttgtgaaggggtagaagatctctgaaacttgtctttagattgaactcattccctgttccacaaacccatatgtatcctttcctcaacctcctcctttcccaattaatttcaaccatagtacgatgtttggggttgtatattttgttaaaaagattaaagaatttatgagttggcttggacaagtttaactttatttttaatgtgttaattacttggaataaatgcattaatttcagaaaaaaaaaaaaaaaaaaaaaaaaaaaaaaaaaa

SEQ ID NO: 1181 - protein, 2099 aa, Homo sapiens
MDRDDLTDDSVFTRSSQCSRGLERYISQEEGPLSPFLGQLDEDYRTKETFLHRSDYSPHISCHDELLRGTERNREKLKGYSIRSEERSREAKRPRYDDTVKINSMGGDHPSFTSGTRNYRQRRRSPSPRFLDPEFRELDLARRKREEEEERSRSLSQELVGVDGGGTGCSIPGLSGVLTASEPGYSLHRPEEVSVMPKKSILKKRIEVDIMEPSMQLESFSSSTSSSQDHPLYSGHPSLPLSGAIAAFASEIENKGTMVETALKEPQGNLYQWGPLPGIPKDNSPLREKFGSFLCHKDNLDLKAEGPERHTDFLLPHERASQDGSGFSRILSMLADSTSTQEKRRRSFPDIEDEEKFLYGDEEEDLKAESVPKPLGSSESEVMRQKASSLPSSAPAVKLESLEETNPEYAKIHDLLKTIGLDIGVAEISQLAARTQERLHGKKPSLRSSADRRSSVDRYFSADHCSSVDHRFSADRCSSVDHCFSADRRSSDPHRLESREAHHSNTHSPEVSHPHPPSPVDPYLLTKNSPPFLKSDHPVGHISGPEVVGSGFQSSVAVRCMLPSAPSAPIRLPHTAALSQFHMPRASQFAAARIPPNYQGPAIPPASFDAYRHYMAYAASRWPMYPTSQPSNHPVPEPHRIMPITKQATRSRPNLRVIPTVTPDKPKQKESLRGSIPAAQVPVQVSIPSLIRYNPEKISDEKNRASQKQKVIEEREKLKNDREARQKKMYYLRTELERLHKQQGEMLRKKRREKDGHKDPLLVEVSRLQDNIMKDIAELRQEAEEAEKKQSELDKVAQILGINIFDKSQKSLSDSREPTEKPGKAEKSKSPEKVSSFSNSSSNKESKVNNEKFCIKSPKPAESPQSATKQLDQPTAAYEYYDAGNHWCKDCNTICGTMFDFFTHMHNKKHTQTLDPYNRPWASKTQSEAKQDAIKRTDKITVPAKGSEFLVPISGFYCQLCEEFLGDPISGEQHVKGHQHNEKYKKYVDENPLYEERRNLDRQAGLAVVLETERRRQSELKRKLSEKPKEEKKEKKAKAVKEVKEDDKVSEKLEDQLSEGRNSPEKAENKRNTGIKLQFKEEVKKESPTSSSFGKFSWKKPEKEEEKSSLVTPSISKEEILESSKDKEDGKTEAGKAKPIKIKLSGKTVVAHTSPWMPVVTTSTQTKIGPNLPIPSTVLRKSCSATMSKPAPLNTFLSIKSSGTTAKPLPVVKESSADLLLPPDIISKAFGGEEVILKGSPEEKVVLAEKSEPSHLPEQILPPPPPPPPPPPPPPPVIPHPAAPSAAQANAILAPVKSNPVVSQTLSPGFVGPNILNPVLPVAIMASAQPAAIPSDETAPGVSESDRDQTLFSVLVRPPPPLSSVFSEQAKKLEKRNSCLATANAKDLYDIFYSSGGKGAPETKGAPETKLSGGPLANGENSNLSRTKSSDTSSTSPLNSSASQEELHQDEGLVAAPIVSNSEKPIAKTLVALGKWSVVEHVGPKSTGSTYGFLQPLTRLCQSRPYETITPKTDTLAIWTSSSFQSDTSRDISPEKSELDLGEPGPPGVEPPPQLLDIQCKESQKLVEIHLRESVNQDKESQELRKSEDCRESEIETNTELKERVKELSEGIVDEGASTSIGPHSIDDSNLNHGNRYMWEGEVKQPNLLMIDKEAEQSNKLMTGSETPSKVVIKLSPQACSFTKAKLDSFLSEARSLLNPQDTPVKISAPELLLHSPARSAMCLTGSPQEQGVSVVSEEGLENSAPESASRTSRYRSLKLKRERSKDFQVKKIYELAVWDENKKRPETWESPEKPKTEALELQDVHPELTVTIESKALEDFEATDLKVEELTALGNLGDMPVDFCTTRVSPAHRSPTVLCQKVCEENSVSPIGCNSSDPADFEPIPSFSGFPLDSPKTLVLDFETEGERNSPNPRSVRIPSPNILKTGLTENVDRGLGGLEGTHQALDLLAGGMMPEEVKESSQLDKQESLGLELKTINFAGLGPSPCLPDLVDFVTRTSGVQKDKLCSPLSEPGDPSKCSSLELGPLQLEISNASTTEVAILQVDDDSGDPLNLVKAPVSRSPPREQVIEDNMVPQGMPEQETTVGAIQDHTESSVHN

SEQ ID NO: 1182 - DNA, 2104 bp, Homo sapiens
ctctgccgagcctccttaaaactctgccgttaaaatgggggcgggtttttcaactcaaaaagcgctcaatttttttcttttcaaaaaaagctgatgaggtcggaaaaaagggagaagaaaccggcaccctctctgagaggcaacagaagcagcaattgtttcagcgaaaaaagcagcaagggagggagtgaaggaaaaaagcaaaaaagggggcgacacgcaagtgcctgtaggggtgaaaggagcagggaccggcgatctagggggggatcagctacaaaagaaactgtcactgggagcggtgcggccaaggaggaagcagtgctgccaggctctgctccagggcacagctggctggcggctgccctgtccgcagcaaaggggcacaggccggggaccgcgagaggtggcaaagtggcaccgggcgccgaggctgctgagcgctcgccgagacggcgaccggactggctgccccggaactgcggcgactctccctactcagaacttggcctacgtttcccaggactctccccatctccagaggcccccacaaaaccgggaaaggaaggaaaggacagcggcggcagcagctcaatgagtgcctacagcagaaagcctgaacgagctcggtcgtaggcgggaagttcccgggggggctgcccagtgcagccgcaatgctgccgcgagctgccccagcagtccgggctccgtagacgctttccgcatcactctccttcctcgggctgccgggagtcccgggacctggcggggccggcatgacgggcttctcgggggcccgccgcacgcccggcagcctccggagacgcgcgccgagcccggctcccacggcctctgaggctcggcggggctgcggctgcctggcgggcgggctccggagctttcctgagcggcattagcccacggcttggcccggacgcgaccaaaggctcttctggagaagcccagagcactgggcaatcgttacgacctgtaacttgagggccaccgaactgctactcccgttcgcctttggcgatcatcttttaaccctccggagcacgtcagcatccagccaccgcggcgctctcccagcagcggaggacccaggactatcccttcggcgagacggatggaaaccgagccccctggaggacctgcccctgcagttctgcctcacacggctcaagtcaccaccgtgaacaagggaccctaaagaatggccgagccttgggggaacgagttggcgtccgcagctgccaggggggacctagagcaacttactagtttgttgcaaaataatgtaaacgtcaatgcacaaaatggatttggaaggactgcgctgcaggttatgaaacttggaaatcccgagattgccaggagactgctacttagaggtgctaatcccgatttgaaagaccgaactggtttcgctgtcattcatgatgcggccagagcaggtttcctggacactttacagactttgctggagtttcaagctgatgttaacatcgaggataatgaagggaacctgcccttgcacttggctgccaaagaaggccacctccgggtggtggagttcctggtgaagcacacggccagcaatgtggggcatcggaaccataagggggacaccgcctgtgatttggccaggctctatgggaggaatgaggttgttagcctgatgcaggcaaacggggctgggggagccacaaatcttcaataaacgtggggagggctcccccacgttgcctctactttatcaattaactgagtagctctcctgacttttaatgtcatttgttaaaatacagttctgtcatatgttaagcagctaaattttctgaaactgcataagtgaaaatcttacaacaggcttatgaatatatttaagcaacatctttttaacctgcaaaatctgttctaacatgtaattgcagataactttgactttcttctgaatattttatctttccttggcttttcccttgcttccccttttgccaatctcaacacccaagttgaagactttgtttttaaaatggtttgtcctgatgcttttgtctaattaaaacactttcaaaacaggaaaaaaaaaaaaaaaaaa

SEQ ID NO: 1183 - protein, 168 aa, Homo sapiens
MAEPWGNELASAAARGDLEQLTSLLQNNVNVNAQNGFGRTALQVMKLGNPEIARRLLLRGANPDLKDRTGFAVIHDAARAGFLDTLQTLLEFQADVNIEDNEGNLPLHLAAKEGHLRVVEFLVKHTASNVGHRNHKGDTACDLARLYGRNEVVSLMQANGAGGATNLQ

SEQ ID NO: 1184 - DNA, 1315 bp, Homo sapiens
cggggattttgtgccccgatctatagttccttgagtctccacacacactcctcacagagatctgtagcgtaggtacgtgacagctctgcctacatctgacgtccggagtcattaaccaggaatgtatgtgtgtctgtgtgtctctctgtggagtcgtcagaattcttcataggggttaagctaaaaaagcgaggcgaggagcccctctccaatggctcagttttgctgaataatcacgtgtgaatcgaggggcgggcttttggcaggcagatcttactagtatttactaccaagctctactccagattaaccatcccagtccttctgtcagtctccgatgccatcatgcagcctggttaggagcaaaggaaaggggaaaaagaaaaacgactaattcatcttttcctgatcgtcaggaccctaaagaatggccgagccttgggggaacgagttggcgtccgcagctgccaggggggacctagagcaacttactagtttgttgcaaaataatgtaaacgtcaatgcacaaaatggatttggaaggactgcgctgcaggttatgaaacttggaaatcccgagattgccaggagactgctacttagaggtgctaatcccgatttgaaagaccgaactggtttcgctgtcattcatgatgcggccagagcaggtttcctggacactttacagactttgctggagtttcaagctgatgttaacatcgaggataatgaagggaacctgcccttgcacttggctgccaaagaaggccacctccgggtggtggagttcctggtgaagcacacggccagcaatgtggggcatcggaaccataagggggacaccgcctgtgatttggccaggctctatgggaggaatgaggttgttagcctgatgcaggcaaacggggctgggggagccacaaatcttcaataaacgtggggagggctcccccacgttgcctctactttatcaattaactgagtagctctcctgacttttaatgtcatttgttaaaatacagttctgtcatatgttaagcagctaaattttctgaaactgcataagtgaaaatcttacaacaggtttatgaatatatttaagcaacatctttttaacctgcaaaatctgttctaacatgtaattgcagataactttgactttcttctgaatattttatctttccttggcttttcccttgcttccccttttgccaatctcaacacccaagttgaagactttgtttttaaaatggtttgtcctgatgcttttgtctaattaaaacactttcaaaacaggaaaaaaaaaaaaaaaaaa

SEQ ID NO: 1185 - DNA, 4164 bp, Homo sapiens
gcggcttgttgttgtggaggccaaaatggcggctcaggcggcggcagcggcccaggcggcggcggcccaggctgcgcaggccgaggcggccgactcgtggtacctggcgcttctgggcttcgctgagcacttccgcacttccagcccgcccaaaatccgcctgtgcgtgcactgcctgcaggccgtgttccccttcaagccgccgcagcgcatcgaggcccgtacacacctgcagctgggctccgttctctatcaccacaccaagaacagcgagcaggcgcgcagccacctggagaaggcgtggttgatatcacagcaaatcccacagttcgaagatgttaaatttgaagcagcaagtctgttgtctgaattgtactgtcaagagaattccgttgatgcagcaaagccgctgctgcggaaggcgatccagatctcacagcagaccccatattggcactgccgcctgctcttccagctcgctcaactgcacacgcttgagaaggacctggtgtctgcctgtgacctcctgggtgtaggggccgagtacgcccgggtggtgggatctgaatacacacgggcgctgttcctcctcagcaaggggatgctgctgctgatggagcgaaagctgcaggaggtgcacccgctgctgaccctctgcgggcagatcgtggagaactggcaggggaaccccatccagaaggagtcgctgcgtgtcttcttcctggtgctccaggtcacccactatctggatgccgggcaggtgaagagcgtgaagccgtgtctgaagcagctgcagcagtgcatccagaccatctccacactgcacgatgatgagatcctgcccagcaaccccgctgacctcttccactggctgcccaaggagcacatgtgtgtgcttgtctacctggtgactgtgatgcactccatgcaggccggctacctggagaaggcgcagaagtacacggacaaggccctcatgcagctggagaagctcaagatgctggactgcagccccatcctgtcatccttccaagtgatcctgctggagcacatcatcatgtgccgccttgtcacgggtcacaaggccacggcgctgcaggagatctcccaggtctgccagctgtgccagcagtccccccggctcttctccaaccatgcagcacagctgcacacattgctgggcctgtactgtgtctctgtcaactgcatggacaacgcggaagcccagttcaccacggccctgcggctcaccaaccaccaggagctgtgggccttcatcgtcaccaacctggcgagtgtgtatatacgggaaggaaatagacaccaagaggtactctacagtctgctggagaggatcaacccggaccacagcttccctgtcagctcgcactgcctccgagcagccgccttctatgtgcgtgggctcttctccttcttccagggacgctacaacgaggccaagcgatttctgcgggaaactctgaagatgtccaatgctgaggacctgaaccggctcacagcctgctccctcgtgcttctgggccacatcttctatgtgctgggaaaccacagggagagtaacaacatggtggtgcctgccatgcagctcgccagcaagatcccggacatgtcggtacagctgtggtcgtcagcactgctgagagacctgaataaagcctgtgggaacgccatggatgcccatgaagccgcccagatgcaccagaacttctcgcagcagctgctccaggaccacattgaggcctgcagcctccccgaacacaacctcatcacgtggacagacggtccaccccccgtgcagttccaagctcagaatggacccaacaccagcctggccagcctcctgtgaggccttgatggggccatccagctccgcagggcctgcgcgtctccggcttccacccagacggcactcaagcctgcccccgaggcgtgcttccttcctgattgtctctagagcttccaagtcctgggaatgtgcggggccagtccctgccctcccaggaggggtggtagccgttcccacctcgcagcaggacccccagtgcagaggctcacaggtggcacacaggcgctgtctctccagagccatccttcagagtggacctcagtgccagtcctgcctcagcatctgggtcacgtcggccaggagtagggtgcaggcctccagcaggtcctaatcctgtgtgccagggcaggcagtgccccaggggcaccacgcctgactctccatcacccaggccttgatgccgagcgggagtagagtgtttcctctgctcaaggcaatttccagagcccggatgccagtttctggcctgaatttggagggaagaagtaatggccctagtgtgggacgaagcacagatcccagcacttttcccagctttctctccagcatcagtccctgcagcagctggggcctctggtcaggaaccctcagggacccaggaactcagcttccaaacatctgcaccttgaccggactcgccatcccgccgtgggggtgcaggtgattgtaaacacgggtgtgcatgtggatgcacacgggtgtgcggtgaagatctgtggagatggagctgggagctgaggctcctgttgcaccagccaccttcccccatcttgtggctgctgaggggcaggaagcgggggagtgggctcgtctcctaaatttaagatcacctcctcagctagcttagagtgcgtggcacgggccccccgcccccgagatctggagcccagggactttcttcctggcagatctgtggccttccctgctcagcctcttggtccccccactccctccaccgcctcaccttccctgctgggtctctggggcacagtgtgaaacccgcaccctagccaggccccagggagcctccgctgggcccagacagcagcgtttggttttatccacttttcttggataatcaggaggtgccccagtggtcacagtgtggcattccgagttggggcgggtggtcgggtcaagatagcagcagcaggtgtcagggctcaagacaccaccccctccagcttctggggcccaggagcctctccctgctacagggggtgggggtcctgctcagcagggtaggtggtggttttaggtcttgtcaccctcactcagtggaactgcctctgggagctttggcgtctgtgactaaagggacgctggattgctcaggtcagctgctcggggctcccaggctgggtgtgccttagccacaggcagggctgtcaataacccccttcctcactggccaccacctgacatcagcaccagtgacaggctggtcagagggcggggctggtgagggtttgtcctaagaggaccaccgccatctctgggtctccagggggagagcctggccctgtcctttgctacccagggctgcccccaggcccatgaagccaataggagagcgtgtggcactggcccacaaactgtccctgtcctgtcttcctcccgagccatggcctctgctagctccaccttgaaggagccccccacatcctcccctacatcccagagatgccaccacttgtgtctccacaatgtgctcctgcccacccgggttccgcactgtccgacccctgcacaccactcatgtcaccacggcgtgcatcatgttcatccccatctatttatttaagcctttctttgcttgtagggcattttgtatgtagagcagttgaaaacagaacctcagaacttaacatctgtcctgatgttaaagtgcttttcatgaccaccctgttatctatgtatatgtaaagttaaggatgagatcttaagtttacaattaaaaactcagtactcaatatttaatattctactcgagctttatggaagccaaatcatgtgcatgtgtgtgtgtgcgtgtgtgcaagctttgaacctccttccacagccgcatcttctcatgacacaaagcttttgataagtactttcctgtgggtcgctcagggcctcatagcatctcattcaattacaagaatagaggccagacacggtggcgcatgcctgtagtcccagctaactgggaggctgaggcaggaggatcacttgagcccaggagattgaggctgcagtgagcatgatcgcgacactgcactccagcctgggtgacggtgagactttgtctc

SEQ ID NO: 1186 - protein, 621 aa, Homo sapiens
RLVVVEAKMAAQAAAAAQAAAAQAAQAEAADSWYLALLGFAEHFRTSSPPKIRLCVHCLQAVFPFKPPQRIEARTHLQLGSVLYHHTKNSEQARSHLEKAWLISQQIPQFEDVKFEAASLLSELYCQENSVDAAKPLLRKAIQISQQTPYWHCRLLFQLAQLHTLEKDLVSACDLLGVGAEYARVVGSEYTRALFLLSKGMLLLMERKLQEVHPLLTLCGQIVENWQGNPIQKESLRVFFLVLQVTHYLDAGQVKSVKPCLKQLQQCIQTISTLHDDEILPSNPADLFHWLPKEHMCVLVYLVTVMHSMQAGYLEKAQKYTDKALMQLEKLKMLDCSPILSSFQVILLEHIIMCRLVTGHKATALQEISQVCQLCQQSPRLFSNHAAQLHTLLGLYCVSVNCMDNAEAQFTTALRLTNHQELWAFIVTNLASVYIREGNRHQEVLYSLLERINPDHSFPVSSHCLRAAAFYVRGLFSFFQGRYNEAKRFLRETLKMSNAEDLNRLTACSLVLLGHIFYVLGNHRESNNMVVPAMQLASKIPDMSVQLWSSALLRDLNKACGNAMDAHEAAQMHQNFSQQLLQDHIEACSLPEHNLITWTDGPPPVQFQAQNGPNTSLASLL

SEQ ID NO: 1187 - DNA, 6305 bp, Homo sapiens
cggacgcgtgggttggattttttccgtggatctatcaattcacaattcgaatttggaagaaagaaggaaaacatgacgtctccagccaaattcaaaaaggataaggagatcatagcagagtacgatactcaggtcaaagagatccgtgctcagctcacagagcagatgaaatgcctggaccagcagtgtgagcttcgggtgcaactgttgcaggacctccaggacttcttccgaaagaaggcagagattgagatggactactcccgcaacctggagaagctggcagaacgcttcctggccaagacacgcagcaccaaggaccagcaattcaagaaggatcagaatgttctctctccagtcaactgctggaatctcctcttaaaccaggtgaagcgggaaagcagggaccataccaccctgagtgacatctacctgaataatatcattcctcgatttgtacaagtcagcgaggactcaggaagactctttaaaaagagtaaagaagtcggccagcagctccaagatgatttgatgaaggtcctgaacgagctctactcggtgatgaagacatatcacatgtacaatgccgacagcatcagtgctcagagcaaactaaaggaggcggagaagcaggaggagaagcaaattggtaaatcggtaaagcaggaggaccggcagaccccacgctcccctgactccacggccaacgttcgcattgaggagaaacatgtccggaggagctcagtgaagaagattgagaagatgaaggagaagcgtcaagccaagtacacggagaataagctgaaggccatcaaagcccggaatgagtacttgctggctttggaggcaaccaatgcatctgtcttcaagtactacatccatgacctatctgaccttattgatcagtgttgtgacttaggctaccatgcaagtctgaaccgggctctacgcaccttcctctctgctgagttaaacctggaacagtcgaagcatgagggtctggatgccatcgagaatgcagtagaaaacctggatgccaccagtgacaagcagcgcctcatggagatgtacaacaacgtcttctgcccccctatgaagtttgagtttcagccccacatgggggatatggcttcccagctctgtgcccagcagcctgtccagagtgagctggtacagagatgccaacaactgcagtctcgcttatccactctaaagattgaaaacgaagaggtaaagaagacaatggaggccaccctgcaaaccatccaggacattgtgactgtcgaggactttgatgtgtctgactgcttccagtacagcaactccatggagtccgtcaagtccacggtctctgaaaccttcatgagcaagcccagcattgctaagaggagagccaaccagcaagagacagagcagttttatttcacaaaaatgaaagagtacctggagggcaggaacctcatcaccaagttacaagccaagcatgaccttctgcagaaaaccctgggagaaagtcagcggacagattgcagtctagccaggcgcagctcaactgtgaggaaacaggactccagccaggcaattcctctggtggtggaaagctgtatccggtttatcagcagacacggactacagcatgaaggaattttccgggtgtcaggatcccaggtggaagtgaatgacatcaaaaatgcctttgagagaggagaggaccccctggctggggaccagaacgaccatgacatggattccatagctggtgtcctgaagctttacttccgggggctggaacaccctctcttccccaaggacatctttcatgacctgatggcctgcgtcacaatggacaacctgcaggagagagctctgcacatccggaaagtcctcctagtcctgcccaaaaccactctgattatcatgagatacctctttgccttcctcaatcatttatcacagttcagtgaagagaacatgatggacccctacaacctcgccatctgcttcgggccctcgctaatgtcagtgccagagggccacgaccaggtgtcctgccaagcccacgtgaatgagctgatcaaaaccatcatcatccagcatgagaacatcttcccaagccccagggagctggagggccctgtctacagcagaggaggaagcatggaggattactgtgatagccctcatggagagactaccccggttgaagactcaacccaggatgtgaccgcagagcaccacacgagcgatgacgaatgtgagcccatcgaggccattgccaagtttgactacgtgggccggacagcccgagagctgtcctttaagaagggagcatccctgctgctttaccagcgggcttccgacgactggtgggaaggccggcacaatggcatcgacggactcatcccccatcagtacatcgtggtccaagacaccgaggacggtgtcgtggagaggtccagccccaagtctgagattgaggtcatttctgagccacctgaagaaaaggtgacagccagagcgggggccagctgtcccagtgggggtcatgtagccgatatttatcttgcaaacatcaacaagcaaaggaagcgtccagaatctgggagcatccggaaaacttttcggagtgacagccatgggctgagcagttccctgactgactcctcctccccaggggtgggggctagctgccgcccatcctcccagcccatcatgagccagagcctccccaaagaagggccagataagtgttccatcagtgggcacgggagcctcaactccatcagccgccactcatccctgaagaatcggctggatagtccacagatccggaagactgccacagcgggaaggtcaaaaagcttcaataaccatcggcccatggaccctgaggtcattgctcaggatattgaggcaacaatgaactcggccctgaatgagctacgggaactagaacggcagagcagtgtcaaacacacccctgacgtggttctggacaccttggagcccctcaaaacctccccagtggtggcccccacgtcagagccctccagccctctgcacacccagctcctcaaggaccccgagcccgccttccagcgcagcgccagtactgctggggacatcgcctgcgccttccggcctgtcaagtctgtcaagatggctgccccggtcaaaccaccagccacacggcccaagcccactgtcttccccaaaacaaatgccactagccctggtgtcaactcatcaacttccccacagtctactgacaagtcttgtactgtctgagggataataatttaattgttctagacaaggggactatagggactgactgttattaaaatcttcctatttaactagcttggggacttcagttgaaaattaggttctaagttgttcttgcaggaattagcctccccgtctcccaaaaccttgagaatgaagcccttggtatcgcctctcccttcccactgccctctgcttcccccagtcgtcgtaattcagccagctgcagtccgtaccgttcttaggttagccagagacaggttttcattatcaggtcactgtgaaatctggtaaggcagtcctgaggacatgggctcaagtctcagtcccctcagaccacggtgatgccttgaccagatggttggctactgccatccagctttcagtggcatcttgttttgggaactgattatagagaatcatatatagtccagtcttcattttacatacacacacatattttacacacacacacattttacacacacacacacacacacacacacacacatatgtttttctagtctctggcatgtgtagcctctcctggtcatagaccagtctctttgtaagttattgtggcagttcacacagtagccaccaggggtctctgtttccattacaaactttgttctgtctgggccagagaacctagcctttgaaatctctccatcatgtgaaacataacgggatgggacaatcccgtaacctgtttggggttgggggctttctctctgtgttctttccattgatgtgaattggtcattggtgtttgctcttgcctctcctccatcccctagaagtacacccccgtcttattaaggagcttttaaagtttttctgaatgtatagacatttctcgggttcctacctttgtctctgatggaccattttccatttaagacattttcctgtataagacagttttatagctggttccttttagggtaaagagtcttaagagagttttattgtgtctatggcaggtttgggaaaggtaagaaatgggtcctttttcctcctaatgtttttggcacttaaaacataaaattcattatcctattaaaaaattaaattcagctttgctaatccagaaattgttcccaaatgaaaacttgttttaagtccaccccttagtttccttattttacaaggtctctcttcagggaccaacaggggcttagagagccttagttagattaaagggagaccctacctcttaaaaccagttttcatttatgcaaacaaggacaattaagggaaccctgaccccacaggctctcaagtcttcccaaggccagaatcgaaagaaaattaaaatttgaatgctgaatattctggctctactctggccttttttctggttcccttccaaaatgcacaaatcatacccttgtctgctccaattcagtctccaaacctggtgcctgtgctcctggcccccctagcatcatgctatcccaggagtatcaggaccagacacatccacagccaggctcatgggtctcagacagcaacttgagttaaagctgaaactcatccttcttctctgtgttttctggtttaaaagctgcacttatattttagccttattattttctgtagttccggagagatggtgggttgccattctggtaggaaaatctgagttttcttatctttgacctagaagagattctttttggaccaacctgcgaaattggtagttaggtctatggaaagtggtaggatttttttttttttaatcctgtgcaaaggaaaagaggtgctttgtgggaaatcactaatgagaaggctaacctgcagcaccagagaaacctttccaagtgctaggcaggagaactgaagaactctttcagtgaagtgagtcagcctagaagaggcaacccacagtcttgatttttgttgctgtttcctgacctgttcttgcctgtcacctgggcctacacaggtcccgagccaacggggctttcatacccaaggatctgtttccttgctgaaaatgaaaccctatctttcactttacattcctttcaatccaactgatcaaaactggtacccacacttgccctttctccctctctccagcacactcccctctaagaaagtaaaagcaaagctttcttaatggcaacactttgggcctgttctgttgctcctgccttatttctctttcaaccctgtacatgactcgtgttcaccatccccttgatcagtgtccatccgcgctaatttgcatcatgaactgaacagtgtgtgagtggtcacctactaaacccagctctgggggcagagctgtcttccccatctctggtgctcctaacacctgtgagatggtcctgtcgagaggactaggaaccgataggaggagagtccttctcggcagagctcactgcaaacaactggaattgaggttgcacactgtgatttttacaccgaaaagccaaaaggagctggccatccagggcctagggagaccagccttcctcagctatgcttgccgaaaccagcatgatgcttcaaagagccctgctccacccctcatggcatggatccttttcctggtgtggactctgaagggtcagtcttcggggaagagaggtggggtggggctactagcatcccaatttagaaaatagaggagtttgtagccagcagcctgtaaactggaaacactggtctcagccaacctcctcagggcgccctggcttctccccaaggagatgaggagcggtgatgccagcaccgggatgcgcagagcactggaagggctggtgcagatctacttcccatgcagaagagaagtcacatcttccagggaatcgcaatgttgtggcgtctgacttgtatgtcacatttgtgtaaaatggtatattctttaaaatagtgttgataactggaatattgtatgtatgcttggagatgctttgtgtgaacctaagactgtcactcaacagatgttggattggggaaaatccaaagcacaacttcaaaataaaatacatttttaggtttcg

SEQ ID NO: 1188 - protein, 1095 aa, Homo sapiens
RTRGLDFFRGSINSQFEFGRKKENMTSPAKFKKDKEIIAEYDTQVKEIRAQLTEQMKCLDQQCELRVQLLQDLQDFFRKKAEIEMDYSRNLEKLAERFLAKTRSTKDQQFKKDQNVLSPVNCWNLLLNQVKRESRDHTTLSDIYLNNIIPRFVQVSEDSGRLFKKSKEVGQQLQDDLMKVLNELYSVMKTYHMYNADSISAQSKLKEAEKQEEKQIGKSVKQEDRQTPRSPDSTANVRIEEKHVRRSSVKKIEKMKEKRQAKYTENKLKAIKARNEYLLALEATNASVFKYYIHDLSDLIDQCCDLGYHASLNRALRTFLSAELNLEQSKHEGLDAIENAVENLDATSDKQRLMEMYNNVFCPPMKFEFQPHMGDMASQLCAQQPVQSELVQRCQQLQSRLSTLKIENEEVKKTMEATLQTIQDIVTVEDFDVSDCFQYSNSMESVKSTVSETFMSKPSIAKRRANQQETEQFYFTKMKEYLEGRNLITKLQAKHDLLQKTLGESQRTDCSLARRSSTVRKQDSSQAIPLVVESCIRFISRHGLQHEGIFRVSGSQVEVNDIKNAFERGEDPLAGDQNDHDMDSIAGVLKLYFRGLEHPLFPKDIFHDLMACVTMDNLQERALHIRKVLLVLPKTTLIIMRYLFAFLNHLSQFSEENMMDPYNLAICFGPSLMSVPEGHDQVSCQAHVNELIKTIIIQHENIFPSPRELEGPVYSRGGSMEDYCDSPHGETTPVEDSTQDVTAEHHTSDDECEPIEAIAKFDYVGRTARELSFKKGASLLLYQRASDDWWEGRHNGIDGLIPHQYIVVQDTEDGVVERSSPKSEIEVISEPPEEKVTARAGASCPSGGHVADIYLANINKQRKRPESGSIRKTFRSDSHGLSSSLTDSSSPGVGASCRPSSQPIMSQSLPKEGPDKCSISGHGSLNSISRHSSLKNRLDSPQIRKTATAGRSKSFNNHRPMDPEVIAQDIEATMNSALNELRELERQSSVKHTPDVVLDTLEPLKTSPVVAPTSEPSSPLHTQLLKDPEPAFQRSASTAGDIACAFRPVKSVKMAAPVKPPATRPKPTVFPKTNATSPGVNSSTSPQSTDKSCTV

SEQ ID NO: 1189 - DNA, 5801 bp, Homo sapiens
gagcgagagcgcgaaggaaatctggccgccgccgccgcgagcgctcccgaatttttacttgttcctgcaaagctgctggagctcagaagctgattctatcacattgtaagatgcctttggataattctacagtcctcttaaatgaatctttagaacttggcaagtctcactagataccttcaatcatcattttgagctcaaagaattctgagacttatggttggtcatatagaagagtaccttgaacctatagtttcctgaagaatcagtttaaaagatccaaggagtacaaaaggagaagtacaaatgtctactacaagacgaaaacgtagtatgttatgttgtttaccgtaagctgtagtaaaatgagctcgattgttgacagagatgacagtagtatttttgatgggttggtggaagaagatgacaaggacaaagcgaaaagagtatctagaaacaaatctgaaaagaaacgtagagatcaatttaatgttctcattaaagaactgggatccatgcttcctggtaatgctagaaagatggacaaatctactgttctgcagaaaagcattgattttttacgaaaacataaagaaatcactgcacagtcagatgctagtgaaattcgacaggactggaaacctacattccttagtaatgaagagtttacacaattaatgttagaggctcttgatggtttttttttagcaatcatgacagatggaagcataatatatgtgtctgagagtgtaacttcattacttgaacatttaccatctgatcttgtggatcaaagtatatttaattttatcccagaaggggaacattcagaggtttataaaatactctctactcatctgctggaaagtgattcattaaccccagaatatttaaaatcaaaaaatcagttagaattctgttgtcacatgctgcgaggaacaatagacccaaaggagccatctacctatgaatatgtaaaatttataggaaatttcaaatctttaaacagtgtatcctcttcagcacacaatggttttgaaggaactatacaacgcacacataggccatcttatgaagatagagtttgttttgtagctactgtcaggttagctacacctcagttcatcaaggaaatgtgcactgttgaagaacccaatgaagagtttacatctagacatagtttagaatggaagtttctgtttctagatcacagggcaccacccataatagggtatttgccatttgaagttctgggaacatcaggctatgattactatcatgtggatgacctagaaaatttggcaaaatgtcatgagcacttaatgcaatatgggaaaggcaaatcatgttattataggttcctgactaaggggcaacagtggatttggcttcagactcattattatatcacttaccatcagtggaattcaaggccagagtttattgtttgtactcacactgtagtaagttatgcagaagttagggctgaaagacgacgagaacttggcattgaagagtctcttcctgagacagctgctgacaaaagccaagattctgggtcagataatcgtataaacacagtcagtctcaaggaagcattggaaaggtttgatcacagcccaaccccttctgcctcttctcggagttcaagaaaatcatctcacacggccgtctcagacccttcctcaacaccaaccaagatcccgacggatacgagcactccacccaggcagcatttaccagctcatgagaagatggtgcaaagaaggtcatcatttagtagtcagtccataaattcccagtctgttggttcatcattaacacagccagtgatgtctcaagctacaaatttaccaattccacaaggcatgtcccagtttcagttttcagctcaattaggagccatgcaacatctgaaagaccaattggaacaacggacacgcatgatagaagcaaatattcatcggcaacaagaagaactaagaaaaattcaagaacaacttcagatggtccatggtcaggggctgcagatgtttttgcaacaatcaaatcctgggttgaattttggttccgttcaactttcttctggaaattcatctaacatccagcaacttgcacctataaatatgcaaggccaagttgttcctactaaccagattcaaagtggaatgaatactggacacattggcacaactcagcacatgatacaacaacagactttacagagtacatcaactcagagtcaacaaaatgtactgagtgggcacagtcagcaaacatctctacccagtcagacacagagcactcttacagccccactgtataacactatggtgatttctcagcctgcagccggaagcatggtccagattccatctagtatgccacaaaacagcacccagagtgctgcagtaactacattcactcaggacaggcagataagattttctcaaggtcaacaacttgtgaccaaattagtgactgctcctgtagcttgtggggcagtcatggtacctagtactatgcttatgggccaggtggtgactgcatatcctacttttgctacacaacagcaacagtcacagacattgtcagtaacgcagcagcagcagcagcagagctcccaggagcagcagctcacttcagttcagcaaccatctcaggctcagctgacccagccaccgcaacaatttttacagacttctaggttgctccatgggaatccctcaactcaactcattctctctgctgcatttcctctacaacagagcaccttccctcagtcacatcaccagcaacatcagtctcagcaacagcagcaactcagccggcacaggactgacagcttgcccgacccttccaaggttcaaccacagtagcacacgtgcttcctctcttgacatcaagggaggaaggggatggcccattaagagttactcagatgacctgaggaaaggagggaaagttccagcagtttcatgagatgcagtattgagtgttctagttcctggaattagttggcagagaaaatgctgcctagtgctacagatgtacattaaataccagccagcaggaggtgatcataggggcatagccagttctgacagtgttttaggtgcctggatattttttgatggaaaaagaatatattgccaaatattaagaagctcagctatgaaatgacctccagggaatcagaaaggcactaatgatgttagtaacttttagtggttctgtgcctcttatcaagtgttacagaggacataccactgccatgtcaggggtttgcttacagtgatgccatgaagacagtccagtagacttggtagcgaccccctcccccaacccctctcccttttcagataatgatggaacagtaattactttcagaatgttgtgtgggttcaaattctctatgtacagatgatgtaaaaatatgtatatgtctagataaaaggagagaaagcaaaacattttgtatgctgcatgaaagcgttatctcttccttacaggtgtgagcacctttcctgaaattctgacaccatgtgcaaactgatccatcctgtttttccttttgtttacaacacagtagtgttctgttcacttttccggggcacaagtttttttgttcatactttggctgtgatgtcacagtttgttcagtgaggtatgatgtgctgctgggaatggattttttttttcaggttaaattattgatacaacaggattttcaagttattcagaaatatccctcatttcattatttttcaattatgtttgaaaataggatttgcactgctttattttaggtggctgggagttttgattgcatattttgttatagttcatagttggaaatatttgcgtaaatggttttcaacaagcctgaaagtaatttcaagaatgtttcagttatagaggtaaaatttgcacacaaaacatcttaggcactttttaacattctcaatcatgggaattttaacttttgggatttgttgaaatcttttttattatccttcacaatttcaatgcttcttttagtcagaaatgattcagggttatttgaggggaaaaaaccccatagtgccttgattttaattcaggtgataactcaccatcttgaagtcattgtccggtttccgtagcagttttgaaaccttagtacctttttaacagcatgtgggtgtcagtgtcattattagtctcctaataagttcctctgaagactgctatcagtctcttggactggaggtacaaataatttagaaataaaagatgataacctaacactatcatagttattaatgtgatcctaaaattgtttcctaaatcagcatttttctttagtcatttaagaatttaccagaaatatttgctcaatatgatcttgatattcctacaaagaaaaaagaaggggtagggatttggctatgccttcactacaacattagaatattgtaactcacatgccttctaaacgtgaactaagatttcctttggcaatatcatattctaaaagtaataaattccaatacaagttacatacatttaaaaaacattttacagattttatggtactaatgaaatttacagtgatagaacaaaagaggattagtagaaaatacattattagaatataaaaaatgttattactgaggaaagggaggagaggacaagtgtaataaatcaaaattgacctcaaaagaaaatgtgtaacagagttgaggttgttaaaacagaaaaggttctgaataatgaagattaacctaatgcagaattgctaggtaaagaggtcaggggaatgctaagccagttcttaagacttctctgtcctctgctttgctgttatccttaaggcatatactttgtctttctgcagaaaattctacctggctacaattactttgaacattaatgttgaaaaagaaaacaaccaaagaaaattggtacttacccttctacaaaagaagtgtgactagatatcaatcagtaattaacatatcaaggagctcttctagctaaatgaccatccagtagagatttcccacattcccatgaatatcaagaatagttgtcagaatatgtatgtacctgagcatatgtacacagacaagggggatgttgtggaatatggcaatagcattgttcttctcccctttcaaattgcctttcttgaccttatgccattccatatatatctgagttgtgcctcatttatttattggcaatacctagtgatacggatttagctaacaaaagatatgaagaactattatattgaggcctgtcctctacataccacacttaaaagatggtgaactgtgagtactacttaggttgacagcaacaaagcataagacaagccccaggtaaacgtctaaactgtttactcacattgtcctactccagccccttcaattatttcccatctccacaaatagtcgggggaaaaaattaaaattttcctttatgattcttactgttcttcgcagctcatcttttcctgcttagaattaaccattgctaatttaaaggagcagctagctgcttttctgtcagtctgaagcgtagtagtggaagaggtagtaagcaccagctgcctctttgctgctttgttttcctcctgattctcttaaatttgggttgcaaagctatcccgccccccaccctgccccatgaaacttgagcattcaaatgaagattcagcagtgtctgttcttcatttctatagccaaagctgttagttaaaatcccaaatctatagcatttaaagataccaaatagaaacaccttccagcttt

SEQ ID NO: 1190 - protein, 846 aa, Homo sapiens
MLFTVSCSKMSSIVDRDDSSIFDGLVEEDDKDKAKRVSRNKSEKKRRDQFNVLIKELGSMLPGNARKMDKSTVLQKSIDFLRKHKEITAQSDASEIRQDWKPTFLSNEEFTQLMLEALDGFFLAIMTDGSIIYVSESVTSLLEHLPSDLVDQSIFNFIPEGEHSEVYKILSTHLLESDSLTPEYLKSKNQLEFCCHMLRGTIDPKEPSTYEYVKFIGNFKSLNSVSSSAHNGFEGTIQRTHRPSYEDRVCFVATVRLATPQFIKEMCTVEEPNEEFTSRHSLEWKFLFLDHRAPPIIGYLPFEVLGTSGYDYYHVDDLENLAKCHEHLMQYGKGKSCYYRFLTKGQQWIWLQTHYYITYHQWNSRPEFIVCTHTVVSYAEVRAERRRELGIEESLPETAADKSQDSGSDNRINTVSLKEALERFDHSPTPSASSRSSRKSSHTAVSDPSSTPTKIPTDTSTPPRQHLPAHEKMVQRRSSFSSQSINSQSVGSSLTQPVMSQATNLPIPQGMSQFQFSAQLGAMQHLKDQLEQRTRMIEANIHRQQEELRKIQEQLQMVHGQGLQMFLQQSNPGLNFGSVQLSSGNSSNIQQLAPINMQGQVVPTNQIQSGMNTGHIGTTQHMIQQQTLQSTSTQSQQNVLSGHSQQTSLPSQTQSTLTAPLYNTMVISQPAAGSMVQIPSSMPQNSTQSAAVTTFTQDRQIRFSQGQQLVTKLVTAPVACGAVMVPSTMLMGQVVTAYPTFATQQQQSQTLSVTQQQQQQSSQEQQLTSVQQPSQAQLTQPPQQFLQTSRLLHGNPSTQLILSAAFPLQQSTFPQSHHQQHQSQQQQQLSRHRTDSLPDPSKVQPQ

SEQ ID NO: 1191 - DNA, 1080 bp, Homo sapiens
ctcgcgcaagcggcgtgcggtcccgcggcgctgcagttgtgtccagccggtcacggggcggctatggcggccacgttcttcggagaggtggtgaaggcgccgtgccgagctgggactgaggacgaagaggaggaggaggaggggcggagggagacgcccgaggacagggaggtgcgtctgcagctggcgcggaagagggaagtgcggctccttcgaagacaaacaaaaacatctttggaagtttctttgctagaaaaatatccgtgctccaagtttataattgctataggaaataatgcagtagcatttctgtcatcatttgttatgaattcaggagtctgggaggaagttggttgtgccaaactctggaatgaatggtgtagaacaacagacactacacatctgtcctccacagaggctttttgtgtgttttatcatctaaaatccaatccctcggtttttctctgtcagtgcagttgctatgttgcagaagatcaacagtatcagtggctggaaaaggtttttggctcttgtccaaggaagaacatgcagataactattctcacatgtcgacatgttaccgattataaaacctcagaatccaccggcagccttccttctcctttcctgagagccctaaaaacacagaatttcaaagactcggcgtgttgtccattgctagaacaaccgaatatagtacacgaccttcctgcagcagttctaagctactgtcaagtatggaaaatcccagcaattctgtacttgtgttatactgatgtgatgaaattagacctaatcacagtggaagcttttaagcctatactttctaccagaagcttgaagggtttggttaagaatattccccaaagcactgagatactaaagaaattgatgacaacaaatgagattcagagtaacatttatacatgatcttaaacattgttttgtagtgtatattacttgtccattcctttaaggggagcagcctgcactcttttgtagattacttttgggggatatattttgagaatgatgaaacggaataaaattgtaaaaaactaaaaaaaaaaaaaaaaaaaa

SEQ ID NO: 1192 - protein, 288 aa, Homo sapiens
MAATFFGEVVKAPCRAGTEDEEEEEEGRRETPEDREVRLQLARKREVRLLRRQTKTSLEVSLLEKYPCSKFIIAIGNNAVAFLSSFVMNSGVWEEVGCAKLWNEWCRTTDTTHLSSTEAFCVFYHLKSNPSVFLCQCSCYVAEDQQYQWLEKVFGSCPRKNMQITILTCRHVTDYKTSESTGSLPSPFLRALKTQNFKDSACCPLLEQPNIVHDLPAAVLSYCQVWKIPAILYLCYTDVMKLDLITVEAFKPILSTRSLKGLVKNIPQSTEILKKLMTTNEIQSNIYT

SEQ ID NO: 1193 - DNA, 2765 bp, Homo sapiens
gggagacgtggtgccgctgcgggctcgctctgccgtgcgctaggcttggtgggaaggcctgttctcgagtccgcgcttttcgtcaccgccatgtcgggaggtggtgtgattcgtggccccgcagggaacaacgattgccgcatctacgtgggtaacttacctccagacatccgaaccaaggacattgaggacgtgttctacaaatacggcgctatccgcgacatcgacctcaagaatcgccgcgggggaccgcccttcgccttcgttgagttcgaggacccgcgagacgcggaagacgcggtgtatggtcgcgacggctatgattacgatgggtaccgtctgcgggtggagtttcctcgaagcggccgtggaacaggccgaggcggcggcgggggtggaggtggcggagctccccgaggtcgctatggccccccatccaggcggtctgaaaacagagtggttgtctctggactgcctccaagtggaagttggcaggatttaaaggatcacatgcgtgaagcaggtgatgtatgttatgctgatgtttaccgagatggcactggtgtcgtggagtttgtacggaaagaagatatgacctatgcagttcgaaaactggataacactaagtttagatctcatgagggagaaactgcctacatccgggttaaagttgatgggcccagaagtccaagttatggaagatctcgatctcgaagccgtagtcgtagcagaagccgtagcagaagcaacagcaggagtcgcagttactccccaaggagaagcagaggatcaccacgctattctccccgtcatagcagatctcgctctcgtacataagatgattggtgacactttttgtagaacccatgttgtatacagttttcctttattcagtacaatcttttcattttttaattcaaactgttttgttcagaatgggctaaagtgttgaattgcattcttgtaatatccccttgctcctaacatctacattcccttcgtgtctttgataaattgtattttaagtgatgtcatagacaggattgtttaaatttagttaactccatactcttcagactgtgatattgtgtaaatgtctatctgccctggtttgtgtgaactgggatgttgggggtgtttgtggttatcttacctggggaagttcttatgtttatcttgcttttcatgtgtctttctgtagacatatctgaagagatggattaagaatgctttggattaaggattgtggagcacatttcaatcattttaggattgtcaaaaggaggattgaggaggatcagatcaataatggaggcaatggtatgactccaagtgctattgtcacagatgaaattggcagtattgaccttatactaaaaggcaggggttaaaaatgattatatacattttccttaaaacacttgcaaacattttattcagttgtctttagctacaattgctttgctttttaaaccttggcaattgtggcaaaattatattgcccattttgtagcaacttattttgctcccttccccccatttttgttttaatagggactaatgtgggaagaactggctaatttgtcacagtgcttagttacaactgttaatgtgtgacctgctgttggtgtacatgtgggtacagggtgtttttaaatccaacaagatagagtataatatcaatactgctaaatctgcatgtcctctgtgtgactgatagagcgttgctatttcatttttttaagacaaaatgaaagcaaaatatagagttccaatgtattggtgtagataatctagttgggaatacttttaagtctcaccttcccctttaaactaatattcataattggttcatatgtttaaaagactttaatttacaaattaaattgcaaatgggagcattagatttagttttagacttaggtgggtagcaatgccagtaaacttaaattacgtaacttcttgcaaccacgaaacctgtaatacgctgtacagtaacaagtgttggcattatcagttgaactgtaaatacaaaatgcttcttccaattagtctctatgatgattaagtttctaaaatttatctgaacaccattcagaaacttgttttggggaatttgatagttattgatgtgcatctgttaaactgatgacagacataactcatcattccccagaaaccttttttgattacagtatctaacattttgcctcctcttttttggttttgctggttataaaggtttggattggagagggctcactggatcccaatccttggagctggatcattggattcaaatcataatgtggataggatagggaggatgaattacccaggattcatggagcgggatcagattaccaggaacataggagtggattcctgccccaaccaaaccgcattcgtgtggatttttttattcaacttaattggctattccaaagattttttttttcctatttttgacgattggagcccttaagatgcacgatggaattgtgttttgcgttttttggtaaaaggagcaaagcgaggacctggagataaacgctggagcaatctccttggaaggattcagcacgagtagatggtaaacatttaaaggggaaagggggggtttgtttaaaatagtaaatcagtaagtcacttctaaatttaaagaaaacaaaattggagttgaagaataagtaggtttccaattggctattgccgttttctttgaaaaaataaacattttttaaaaaactaaaaaaaaaaaaaaa

SEQ ID NO: 1194 - protein, 248 aa, Homo sapiens
MSGGGVIRGPAGNNDCRIYVGNLPPDIRTKDIEDVFYKYGAIRDIDLKNRRGGPPFAFVEFEDPRDAEDAVYGRDGYDYDGYRLRVEFPRSGRGTGRGGGGGGGGGAPRGRYGPPSRRSENRVVVSGLPPSGSWQDLKDHMREAGDVCYADVYRDGTGVVEFVRKEDMTYAVRKLDNTKFRSHEGETAYIRVKVDGPRSPSYGRSRSRSRSRSRSRSRSNSRSRSYSPRRSRGSPRYSPRHSRSRSRT

SEQ ID NO: 1195 - DNA, 6267 bp, Homo sapiens
cttccatgtgtgaaagctacttggcatgaatgcctgggccgtaccaagtgtcaccgcagcaagagggggagtcagaagaaaaacagatcagaccaagcagacaataggcccctaaagtgttccccctaagttgctttgatgttgtcctggtgtcttgataccaggaggccagggattgcgggaaaagggtcttttttgtcttcattcactttcccccctcagtttctgaaatgattctccagaatttctcctcataaaaaaggactgaatgtgggcccagttggcgtcattctgctttgacctaaacattcccatctgattgggtggcagagatcatttttggaaagttcttccgtgtcccgatgtagaagaaatagcaaattggacatattgaaagacaagggtcatctttgagaagggggttcctggactcctcacctccaggatgagcactgcagtgtcgtgacccttggggttttgtatgccctggagatgcgagattttcctctggcagcaggaggcacgcacccagagaatgctggagctgcaaggggaaaggacccacttccacagcagagaaaaacaaagaggaaaaaggcatacaggcagcgagcgctaagggacgcacccagcaagcagtgggccagtgccactgcccccagcagctgtttctgctgcaacccgagaggaactcggtgagcctgtcccgtttgtgactgcaagctcaggatttcaatcaatgcattccagtaaccctaaagtgaggagctctccatcaggaaacacacagagtagccctaagtcaaagcaggaggtgatggtccgtccccctacagtgatgtccccatctggaaacccccagctggattccaaattctccaatcagggtaaacaggggggctcagccagccaatcccagccatccccctgtgactccaagagtgggggccatacccctaaagcactccctggcccaggtgggagcatggggctgaagaatggggctggaaatggtgccaagggcaaggggaaaagggagcgaagtatttccgccgactcctttgatcagagagatcctgggactccaaacgatgactctgacattaaagaatgtaattctgctgaccacataaagtcccaggattcccagcacacaccacactcgatgaccccatcaaatgctacagcccccaggtcttctaccccctcccatggccaaactactgccacagagcccacacctgctcagaagactccagccaaagtggtgtacgtgttttctactgagatggccaataaagctgcagaagctgttttgaagggccaggttgaaactatcgtctctttccacatccagaacatttctaacaacaagacagagagaagcacagcgcctctgaacacacagatatctgcccttcggaatgatccgaaacctctcccacaacagcccccagttccggccaaccaggaccagaattcttcccagaataccagactgcagccaactccacccattccggcaccagcacccaagcctgccgcacccccacgtcccctggaccgggagagtcctggggtagaaaacaaactgattccttctgtaggaagtcctgccagctccactccactgcccccagatggtactgggcccaactcaactcccaacaatagggcagtgacccctgtctcccaggggagcaatagctcttcagcagatcccaaagcccctccgcctccaccagtgtccagtggcgagccccccacactgggagagaatcccgatggcttatctcaggagcagctggagcaccgggagcgctccttacaaactctcagagatatccagcgcatgctttttcctgatgagaaagaattcacaggagcacaaagtgggggaccgcagcagaatcctggggtattagatgggcctcagaaaaaaccagaagggccaatacaggccatgatggcccaatcccaaagcctaggtaagggacctgggccccggacagacgtgggagctccatttggccctcaaggacatagagatgtacccttttctccagatgaaatggttccaccttctatgaactcccagtctgggaccataggacccgaccaccttgaccatatgactcccgagcagatagcgtggctgaaactgcagcaggagttttatgaagagaagaggaggaagccggaacaagtggttgtccagcagtgttccctccaggacatgatggtccatcagcacgggcctcggggagtggtccgaggacccccccctccataccagatgacccctagtgaaggctgggcacctgggggtacagagccattttctgatggtatcaacatgccacattctctgcccccgaggggcatggctccccaccccaacatgccagggagccagatgcgcctccctggatttgcaggcatgataaactctgaaatggaagggccgaatgtccccaaccctgcatctagaccaggtctttctggagtcagttggccagatgatgtgccaaaaatcccagatggtcgaaattttcctcctggccggggcattttcagcggccctggccgaggggaacgcttcccaaacccccaaggattgtctgaagagatgtttcagcagcagctggcagagaaacagctgggtctccccccagggatggccatggaaggcatcaggcccagcatggagatgaacaggatgattccaggctcccagcgccacatggagcctgggaataaccccattttccctcgaataccagttgagggccctctgagtccttctaggggtgactttccaaaaggaattcccccacagatgggccctggtcgggaacttgagtttgggatggttcctagtgggatgaagggagatgtcaatctaaatgtcaacatgggatccaactctcagatgatacctcagaagatgagagaggctggggcgggccctgaggagatgctgaaattacgcccaggtggctcagacatgctgcctgctcagcagaagatggtgccactgccatttggtgagcacccccagcaggagtatggcatgggccccagaccattccttcccatgtctcagggtccaggcagcaacagtggcttgcggaatctcagagaaccaattgggcccgaccagaggactaacagccggctcagtcatatgccaccactacctctcaacccttccagtaaccccaccagcctcaacacagctcctccagttcagcgcggcctggggcggaagcccttggatatatctgtggcaggcagccaggtgcattccccaggcattaaccctctgaagtctcccacgatgcaccaagtccagtcaccaatgctgggctcgccctcggggaacctcaagtccccccagactccatcgcagctggcaggcatgctggcgggcccagctgctgctgcttccattaagtccccccctgttttggggtctgctgctgcttcacctgtccacctcaagtctccatcacttcctgccccgtcacctggatggacctcttctccaaaacctccccttcagagtcctgggatccctccaaaccataaagcacccctcaccatggcctccccagccatgctgggaaatgtagagtcaggtggccccccacctcctacagccagccagcctgcctctgtgaatatccctggaagtcttccctctagtacaccttataccatgcctccagagccaaccctttcccagaacccactctctattatgatgtctcgaatgtccaagtttgcaatgcccagttccaccccgttataccatgatgctatcaagactgtggccagctcagatgacgactcccctccagctcgttctcccaacttgccatcaatgaataatatgccaggaatgggcattaatacacagaatcctcgaatttcaggtccaaaccccgtggttccgatgccaaccctcagcccaatgggaatgacccagccactttctcactccaatcagatgccctctccaaatgccgtgggacccaacatacctcctcatggggtcccaatggggcctggcttgatgtcacacaatcctatcatggggcatgggtcccaagagccaccgatggtacctcaaggacggatgggcttcccccagggcttccctccagtacagtctcccccacagcaggttccattccctcacaatggccccagtggggggcagggcagcttcccaggagggatgggtttcccaggagaaggcccccttggccgccccagcaacctgccccaaagttcagcagatgcagcactttgcaagcctggaggccccgggggtcctgactccttcactgtcctggggaacagcatgccttcggtgtttacagacccagatctgcaggaggtcatccgacctggagccaccggaatacctgagtttgatctatcccgcattattccatctgagaagcccagccagacgctgcaatatttccctcgaggggaagttccaggccgtaaacagccccagggtcctggacctgggttttcacacatgcaggggatgatgggcgaacaagcccccagaatgggactagcattacctggcatgggaggtccagggccagtgggaactccggacatccctcttggtacagctccatccatgccaggccacaaccccatgagaccaccagcctttctccaacaaggcatgatgggacctcaccatcggatgatgtcaccagcacaatctacaatgcccggccagcccaccctgatgagcaatccagctgctgccgtgggcatgattcctggcaaggatcgggggcctgccgggctctacacccaccctgggcctgtgggctctccaggcatgatgatgtccatgcagggcatgatgggacccaacagaacatcatgatccccccacagatgaggccccggggcatggctgctgacgtgggcatgggtggatttagccaaggacctggcaacccaggaaacatgatgttttaagctgctaagatgggatgtgccgatccttgtcaaaatgagattccaggtcctgagagctgctttgagggagttccaggagtacttactattggtcatgcaataggagaacagagacccgagggctgctttgggggaggggggaactcgagaatgtatggatttacctgaaaacaaattattcatttaatcaacaggtgtgttttttttaagatttattttttaaaaattatttttgtggacttgggtatcaatgatggcacctacttttgggaatctgtagctgtgctttgagaattgccatcggtcatgtgttgcaccgttctctgtatgtttacgtcctttggactggcttctcccaggattcttttctgtttttgtttttttgatttgggctttatttttttctgtgtactgtactatattgtaaaagggattttagcagagactttagtctttggggcaagaggagaacaggaatgctgggctgtttactttaggtggagaatccatcttcagacctttggactattttctttcaactgcagtgtatagaaaaaccaaactacgacctcagagcagagtattaatgaaaagcacaaaaaaaggaactaagttcagcgaggggtggggggaggggggagatttttcttttgaaaaataatgactcttaggacatttgtttttaagttcaagtgctcttcagcactgtcttgtctcccaatataccaacccactggcacattttctctgtttctctctccgattttgctctgtctcctcagttaagtgtttccttcctttgtgccccccgctggtgaccctctgcttccctctctctttccctttggcagctgcaatacacagtgttattttggggaaataaatctagcaaagcctcgccttccatgccgagcgtcctcttggctctgagagggaaagtctgtcctgggatgcttctctgtcttttttccccctaagtctttctctttcccatcatacccttccctgccccaccttgttttctgttccccttttattaggaattcccaagtgaattttattaatgtgggagtggaacagatgctaaaagctatccaggattttgtttctgtttgttttaaattttgtggttccttccctttcctccccctcccatgcgtaagacgttctgtgtaacctccattaaatttggtacaaaaccactcgccagagctgtggtgtcagaaaaataaaatatattgtttctta

SEQ ID NO: 1196 - protein, 1394 aa, Homo sapiens
MHSSNPKVRSSPSGNTQSSPKSKQEVMVRPPTVMSPSGNPQLDSKFSNQGKQGGSASQSQPSPCDSKSGGHTPKALPGPGGSMGLKNGAGNGAKGKGKRERSISADSFDQRDPGTPNDDSDIKECNSADHIKSQDSQHTPHSMTPSNATAPRSSTPSHGQTTATEPTPAQKTPAKVVYVFSTEMANKAAEAVLKGQVETIVSFHIQNISNNKTERSTAPLNTQISALRNDPKPLPQQPPVPANQDQNSSQNTRLQPTPPIPAPAPKPAAPPRPLDRESPGVENKLIPSVGSPASSTPLPPDGTGPNSTPNNRAVTPVSQGSNSSSADPKAPPPPPVSSGEPPTLGENPDGLSQEQLEHRERSLQTLRDIQRMLFPDEKEFTGAQSGGPQQNPGVLDGPQKKPEGPIQAMMAQSQSLGKGPGPRTDVGAPFGPQGHRDVPFSPDEMVPPSMNSQSGTIGPDHLDHMTPEQIAWLKLQQEFYEEKRRKPEQVVVQQCSLQDMMVHQHGPRGVVRGPPPPYQMTPSEGWAPGGTEPFSDGINMPHSLPPRGMAPHPNMPGSQMRLPGFAGMINSEMEGPNVPNPASRPGLSGVSWPDDVPKIPDGRNFPPGRGIFSGPGRGERFPNPQGLSEEMFQQQLAEKQLGLPPGMAMEGIRPSMEMNRMIPGSQRHMEPGNNPIFPRIPVEGPLSPSRGDFPKGIPPQMGPGRELEFGMVPSGMKGDVNLNVNMGSNSQMIPQKMREAGAGPEEMLKLRPGGSDMLPAQQKMVPLPFGEHPQQEYGMGPRPFLPMSQGPGSNSGLRNLREPIGPDQRTNSRLSHMPPLPLNPSSNPTSLNTAPPVQRGLGRKPLDISVAGSQVHSPGINPLKSPTMHQVQSPMLGSPSGNLKSPQTPSQLAGMLAGPAAAASIKSPPVLGSAAASPVHLKSPSLPAPSPGWTSSPKPPLQSPGIPPNHKAPLTMASPAMLGNVESGGPPPPTASQPASVNIPGSLPSSTPYTMPPEPTLSQNPLSIMMSRMSKFAMPSSTPLYHDAIKTVASSDDDSPPARSPNLPSMNNMPGMGINTQNPRISGPNPVVPMPTLSPMGMTQPLSHSNQMPSPNAVGPNIPPHGVPMGPGLMSHNPIMGHGSQEPPMVPQGRMGFPQGFPPVQSPPQQVPFPHNGPSGGQGSFPGGMGFPGEGPLGRPSNLPQSSADAALCKPGGPGGPDSFTVLGNSMPSVFTDPDLQEVIRPGATGIPEFDLSRIIPSEKPSQTLQYFPRGEVPGRKQPQGPGPGFSHMQGMMGEQAPRMGLALPGMGGPGPVGTPDIPLGTAPSMPGHNPMRPPAFLQQGMMGPHHRMMSPAQSTMPGQPTLMSNPAAAVGMIPGKDRGPAGLYTHPGPVGSPGMMMSMQGMMGPNRTS

SEQ ID NO: 1197 - DNA, 1018 bp, Homo sapiens
ggcacgaggctcaagattcacagcatctcagacgcagcctaggttcccatggacttgtcataagacaaaagaggacagctgtgctgagggggcagggtctgcagcctcctggctgtgccaggaccacacctaccaaggccgcaccaggatgtcggacaccgaggagcaggaatatgaggaggagcagccggaagaggaggctgcggaggaggaggaggaagaagaggaacgccccaaaccaagccgccccgtggtgcctcctttgatcccgccaaagatcccagaaggggagcgcgttgacttcgatgacatccaccgcaagcgcatggagaaagacctgctggagctgcagacactcatcgatgtacatttcgagcagcggaagaaggaggaagaggagctggttgccttgaaggagcgcattgagcggcgccggtcagagagagccgagcaacagcgcttcagaactgagaaggaacgcgaacgtcaggctaagctggcggaggagaagatgaggaaggaagaggaagaggccaagaagcgggcagaggatgatgccaagaaaaagaaggtgctgtccaacatgggggcccattttggcggctacctggtcaaggcagaacagaagcgtggtaagcggcagacggggcgggagatgaaggtgcgcatcctctccgagcgtaagaagcctctggacattgactacatgggggaggaacagctccgggagaaagcccaggagctgtcggactggatccaccagctggagtctgagaagttcgacctgatggcgaagctgaaacagcagaaatatgagatcaacgtgctgtacaaccgcatcagccacgcccagaagttccggaagggggcagggaagggccgcgttggaggccgctggaagtgaggatgccgccccggacagtggcacctgggaagcctgggagtgtttgtcccatcggtagcttgaaataaacgctcccctcagacactcaaaaaaaaaaaaaaaaaaaaaaaaaaa

SEQ ID NO: 1198 - protein, 251 aa, Homo sapiens
MSDTEEQEYEEEQPEEEAAEEEEEEEERPKPSRPVVPPLIPPKIPEGERVDFDDIHRKRMEKDLLELQTLIDVHFEQRKKEEEELVALKERIERRRSERAEQQRFRTEKERERQAKLAEEKMRKEEEEAKKRAEDDAKKKKVLSNMGAHFGGYLVKAEQKRGKRQTGREMKVRILSERKKPLDIDYMGEEQLREKAQELSDWIHQLESEKFDLMAKLKQQKYEINVLYNRISHAQKFRKGAGKGRVGGRWK

SEQ ID NO: 1199 - DNA, 1349 bp, Homo sapiens
gtctcctccctttggtccgctgcaggttggtggcgggaggaggggacagctgcgggcgcggggagggggcgccgcgccgcgggggccatggcggagccaggaagccgggagtccgagacccgggcccgcagcccgagtgtcgccgccatggcttcgccgcagctctgccgcgcgctggtgtcggcgcaatgggtggcggaggcgctgcgggccccgcgcgctgggcagcctctgcagctgctggacgcctcctggtacctgccgaagctggggcgcgacgcgcgacgcgagttcgaggagcgccacatcccgggcgccgctttcttcgacatcgaccagtgcagcgaccgcacctcgccctacgaccacatgctgcccggggccgagcatttcgcggagtacgcaggccgcctgggcgtgggcgcggccacccacgtcgtgatctacgacgccagcgaccagggcctctactccgccccgcgcgtctggtggatgttccgcgccttcggccaccacgccgtgtcactgcttgatggcggcctccgccactggctgcgccagaacctcccgctcagctccggcaagagccaacctgctcccgccgagttccgcgctcagctcgaccccgccttcatcaagacctacgaggacatcaaggagaacctggaatcccggcgcttccaggtggtggactcccgagccactggcaggttccgcggcaccgagcccgagccccgagacggcattgaacctggccacatcccaggtaccgtgaacatccccttcacagacttcctgagccaggaggggctggagaagagccctgaggagatccgccatctgttccaggagaagaaagtggacctgtctaagccactggtggccacgtgtggctctggcgtcacagcctgccacgtggcactaggggcctacctctgcggcaagccagacgtgcccatctacgatggctcctgggtggagtggtacatgcgcgcccggcccgaggatgtcatctcagagggccgggggaagacccactgaagctgggcaggacacaggcgagctcaggtgatgccggccaccagcaatgcctggcctggtagctccgcttctgctttcaccaagagagtgtttcttcactcaactcaggtggcatttggggtgacatctcaaaggccaggaattccgttgacttgttggctgccagtaggggcgggaggaaaggcggaggcgagccctggaggagggaggccacaactccgagctgcccacctggtgctgagctggggccccgcctcctttctgttttatttttgaggaaataaaataaccaagtgctaaatcttgta

SEQ ID NO: 1200 - protein, 297 aa, Homo sapiens
MASPQLCRALVSAQWVAEALRAPRAGQPLQLLDASWYLPKLGRDARREFEERHIPGAAFFDIDQCSDRTSPYDHMLPGAEHFAEYAGRLGVGAATHVVIYDASDQGLYSAPRVWWMFRAFGHHAVSLLDGGLRHWLRQNLPLSSGKSQPAPAEFRAQLDPAFIKTYEDIKENLESRRFQVVDSRATGRFRGTEPEPRDGIEPGHIPGTVNIPFTDFLSQEGLEKSPEEIRHLFQEKKVDLSKPLVATCGSGVTACHVALGAYLCGKPDVPIYDGSWVEWYMRARPEDVISEGRGKTH

SEQ ID NO: 1201 - DNA, 1809 bp, Homo sapiens
cctgctccaaggtccagagagctttctggtctttgcagcaggcctgccgccttcatgtccactctcctcatcaatcagccccagtatgcgtggctgaaagagctggggctccgcgaggaaaacgagggcgtgtataatggaagctggggaggccggggagaggttattacgacctattgccccgctaacaacgagccaatagcaagagtccgacaggccagtgtggcagactatgaagaaactgtaaagaaagcaagagaagcatggaaaatctgggcagatattcctgctccaaaacgaggagaaatagtaagacagattggcgatgccttgcgggagaagatccaagtactaggaagcttggtgtctttggagatggggaaaatcttagtggaaggtgtgggtgaagttcaggagtatgtggatatctgtgactatgctgttggtttatcaaggatgattggaggacctatcttgccttctgaaagatctggccatgcactgattgagcagtggaatcccgtaggcctggttggaatcatcacggcattcaatttccctgtggcagtgtatggttggaacaacgccatcgccatgatctgtggaaatgtctgcctctggaaaggagctccaaccacttccctcattagtgtggctgtcacaaagataatagccaaggttctggaggacaacaagctgcctggtgcaatttgttccttgacttgtggtggagcagatattggcacagcaatggccaaagatgaacgagtgaacctgctgtccttcactgggagcactcaggtgggaaaacaggtgggcctgatggtgcaggagaggtttgggagaagtctgttggaacttggaggaaacaatgccattattgcctttgaagatgcagacctcagcttagttgttccatcagctctcttcgctgctgtgggaacagctggccagaggtgtaccactgcgaggcgactgtttatacatgaaagcatccatgatgaggttgtaaacagacttaaaaaggcctatgcacagatccgagttgggaacccatgggaccctaatgttctctatgggccactccacaccaagcaggcagtgagcatgtttcttggagcagtggaagaagcaaagaaagaaggtggcacagtggtctatgggggcaaggttatggatcgccctggaaattatgtagaaccgacaattgtgacaggtcttggccacgatgcgtccattgcacacacagagactttcgctccgattctctatgtctttaaattcaagaatgaagaagaggtctttgcatggaataatgaagtaaaacagggactttcaagtagcatctttaccaaagatctgggcagaatctttcgctggcttggacctaaaggatcagactgtggcattgtaaatgtcaacattccaacaagtggggctgagattggaggtgcctttggaggagaaaagcacactggtggtggcagggagtctggcagtgatgcctggaaacagtacatgagaaggtctacttgtactatcaactacagtaaagaccttcctctggcccaaggaatcaagtttcagtaaaggtgttttagatgaacatcccttaatttgaggtgttccagcagctgtttttggagaagacaaagaagattaaagttttccctgaataaatgcattattatgactgtgacagtgactaatccccctatgaccccaaagccctgattaaatcaagagattccttttttaaaaatcaaaataaaattgttacaacatagccatagttactaaaaaaaaaaa

SEQ ID NO: 1202 - protein, 511 aa, Homo sapiens
MSTLLINQPQYAWLKELGLREENEGVYNGSWGGRGEVITTYCPANNEPIARVRQASVADYEETVKKAREAWKIWADIPAPKRGEIVRQIGDALREKIQVLGSLVSLEMGKILVEGVGEVQEYVDICDYAVGLSRMIGGPILPSERSGHALIEQWNPVGLVGIITAFNFPVAVYGWNNAIAMICGNVCLWKGAPTTSLISVAVTKIIAKVLEDNKLPGAICSLTCGGADIGTAMAKDERVNLLSFTGSTQVGKQVGLMVQERFGRSLLELGGNNAIIAFEDADLSLVVPSALFAAVGTAGQRCTTARRLFIHESIHDEVVNRLKKAYAQIRVGNPWDPNVLYGPLHTKQAVSMFLGAVEEAKKEGGTVVYGGKVMDRPGNYVEPTIVTGLGHDASIAHTETFAPILYVFKFKNEEEVFAWNNEVKQGLSSSIFTKDLGRIFRWLGPKGSDCGIVNVNIPTSGAEIGGAFGGEKHTGGGRESGSDAWKQYMRRSTCTINYSKDLPLAQGIKFQ

SEQ ID NO: 1203 - DNA, 1478 bp, Homo sapiens
gcgggcgacacgagggccgcggtgcagtgtccgacccgagagttgcggcctgagtcaccggccccgccctccggagccggacgctccgggaggcccgggagcggcagtggaaccgactcccagaactccggacgtgtgcggcgcagtgagtcgcagccatgttcctggttaactcgttcttgaagggcggcggcggcggcggcgggggaggcgggggcctgggtgggggcctgggaaatgtgcttggaggcctgatcagcggggccgggggcggcggcggcggcggcggcggcggcggcggtggtggaggcggcggtggcggtggaacggccatgcgcatcctaggcggagtcatcagcgccatcagcgaggcggctgcgcagtacaacccggagcccccgcccccacgcacacattactccaacattgaggccaacgagagtgaggaggtccggcagttccggagactctttgcccagctggctggagatgacatggaggtcagcgccacagaactcatgaacattctcaataaggttgtgacacgacaccctgatctgaagactgatggttttggcattgacacatgtcgcagcatggtggccgtgatggatagcgacaccacaggcaagctgggctttgaggaattcaagtacttgtggaacaacatcaaaaggtggcaggccatatacaaacagttcgacactgaccgatcagggaccatttgcagtagtgaactcccaggtgcctttgaggcagcagggttccacctgaatgagcatctctataacatgatcatccgacgctactcagatgaaagtgggaacatggattttgacaacttcatcagctgcttggtcaggctggacgccatgttccgtgccttcaaatctcttgacaaagatggcactggacaaatccaggtgaacatccaggagtggctgcagctgactatgtattcctgaactggagccccagacccgccccctcaccgccttgctataggagtcacctggagcctcggtctctcccagggccgatcctgtctgcagtcacatctttgtggggcctgctgacccacaagcttttgttctctcagtacttgttacccagcttctcaacatccagggcccaatttgccctgcctggagttccccctggctctaggacactctaacaagctctgtccacgggtctccccattcccaccaggccctgcacacacccactccgtaacctctcccctgtacctgtgccaagcctagcacttgtgatgcctccatgccccgagggcctctctcagttctgggaggatgactccagtccctgcacgccctggcacacccttcacggttgctacccaggcggccaagctccagaccgtgccagacccaggtgccccagtgcctttgtctatattctgctcccagcctgccaggccaggaggaaataaacatgccccagttgctgatctctaa

SEQ ID NO: 1204 - protein, 268 aa, Homo sapiens
MFLVNSFLKGGGGGGGGGGGLGGGLGNVLGGLISGAGGGGGGGGGGGGGGGGGGGGTAMRILGGVISAISEAAAQYNPEPPPPRTHYSNIEANESEEVRQFRRLFAQLAGDDMEVSATELMNILNKVVTRHPDLKTDGFGIDTCRSMVAVMDSDTTGKLGFEEFKYLWNNIKRWQAIYKQFDTDRSGTICSSELPGAFEAAGFHLNEHLYNMIIRRYSDESGNMDFDNFISCLVRLDAMFRAFKSLDKDGTGQIQVNIQEWLQLTMYS

SEQ ID NO: 1205 - DNA, 2646 bp, Homo sapiens
agtgcagacgcggctcctagcggatgggtgctattgtgaggcggttgtagaagagtttcgtgagtgctcgcagctcatacctgtggctgtgtatccgtggccacagctggttggcgtcgccttgaaatcccaggccgtgaggagttagcgagccctgctcacactcggcgctctggttttcggtgggtgtgccctgcacctgcctcttcccccattctcattaataaaggtatccatggagaacactgaaaactcagtggattcaaaatccattaaaaatttggaaccaaagatcatacatggaagcgaatcaatggactctggaatatccctggacaacagttataaaatggattatcctgagatgggtttatgtataataattaataataagaattttcataaaagcactggaatgacatctcggtctggtacagatgtcgatgcagcaaacctcagggaaacattcagaaacttgaaatatgaagtcaggaataaaaatgatcttacacgtgaagaaattgtggaattgatgcgtgatgtttctaaagaagatcacagcaaaaggagcagttttgtttgtgtgcttctgagccatggtgaagaaggaataatttttggaacaaatggacctgttgacctgaaaaaaataacaaactttttcagaggggatcgttgtagaagtctaactggaaaacccaaacttttcattattcaggcctgccgtggtacagaactggactgtggcattgagacagacagtggtgttgatgatgacatggcgtgtcataaaataccagtggaggccgacttcttgtatgcatactccacagcacctggttattattcttggcgaaattcaaaggatggctcctggttcatccagtcgctttgtgccatgctgaaacagtatgccgacaagcttgaatttatgcacattcttacccgggttaaccgaaaggtggcaacagaatttgagtccttttcctttgacgctacttttcatgcaaagaaacagattccatgtattgtttccatgctcacaaaagaactctatttttatcactaaagaaatggttggttggtggttttttttagtttgtatgccaagtgagaagatggtatatttggtactgtatttccctctcattttgacctactctcatgctgcagagggtactttaagacatactccttccatcaaatagaaccactatgaagctacctcaaacttccagtcaggtagttgcaattgaattaaattaggaataaataaaaatggatactggtgcagtcattatgagaggcaatgattgttaatttacagctttcatgattagcaagttacagtgatgctgtgctatgaattttcaagtaattgtgaaaaagttaaacattgaagtaatgaatttttatgatattccccccacttaagactgtgtattctagttttgtcaaactgtagaaatgatgatgtggaagaacttaggcatctgtgggcatggtcaaaggctcaaacctttattttagaattgatatacacggatgacttaactgcattttagaccatttatctgggattatggttttgtgatgtttgtcctgaacacttttgttgtaaaaaaataataataataatgtttaatattgagaaagaaactaatattttatgtgagagaaagtgtgagcaaactaacttgacttttaaggctaaaacttaacattcatagaggggtggagttttaactgtaaggtgctacaatgcccctggatctaccagcataaatatcttctgatttgtccctatgcatatcagttgagcttcatataccagcaatatatctgaagagctattatataaaaaccccaaactgttgattattagccaggtaatgtgaataaattctataggaacatatgaaaatacaacttaaataataaacagtggaatataaggaaagcaataaatgaatgggctgagctgcctgtaacttgagagtagatggtttgagcctgagcagagacatgactcagcctgttccatgaaggcagagccatggaccacgcaggaagggcctacagcccatttctccatacgcactggtatgtgtggatgatgctgccagggcgccatcgccaagtaagaaagtgaagcaaatcagaaacttgtgaagtggaaatgttctaaaggtggtgaggcaataaaaatcatagtactctttgtagcaaaattcttaagtatgttattttctgttgaagtttacaatcaaaggaaaatagtaatgttttatactgtttactgaaagaaaaagacctatgagcacataggactctagacggcatccagccggaggccagagctgagcactcagcccgggaggcaggctccaggcctcagcaggtgcggagccgtcactgcaccaagtctcactggctgtcagtatgacatttcacgggagatttcttgttgctcaaaaaatgagctcgcatttgtcaatgacagtttcttttttcttactagacctgtaacttttgtaaatacacacagcatgtaatggtatcttaaagtgtgtttctatgtgacaattttgtacaaatttgttattttccatttttatttcaaaatatacattcaaacttaaaatt

SEQ ID NO: 1206 - protein, 277 aa, Homo sapiens
MENTENSVDSKSIKNLEPKIIHGSESMDSGISLDNSYKMDYPEMGLCIIINNKNFHKSTGMTSRSGTDVDAANLRETFRNLKYEVRNKNDLTREEIVELMRDVSKEDHSKRSSFVCVLLSHGEEGIIFGTNGPVDLKKITNFFRGDRCRSLTGKPKLFIIQACRGTELDCGIETDSGVDDDMACHKIPVEADFLYAYSTAPGYYSWRNSKDGSWFIQSLCAMLKQYADKLEFMHILTRVNRKVATEFESFSFDATFHAKKQIPCIVSMLTKELYFYH

SEQ ID NO: 1207 - DNA, 2479 bp, Homo sapiens
agtgcagacgcggctcctagcggatgggtgctattgtgaggcggttgtagaagttaataaaggtatccatggagaacactgaaaactcagtggattcaaaatccattaaaaatttggaaccaaagatcatacatggaagcgaatcaatggactctggaatatccctggacaacagttataaaatggattatcctgagatgggtttatgtataataattaataataagaattttcataaaagcactggaatgacatctcggtctggtacagatgtcgatgcagcaaacctcagggaaacattcagaaacttgaaatatgaagtcaggaataaaaatgatcttacacgtgaagaaattgtggaattgatgcgtgatgtttctaaagaagatcacagcaaaaggagcagttttgtttgtgtgcttctgagccatggtgaagaaggaataatttttggaacaaatggacctgttgacctgaaaaaaataacaaactttttcagaggggatcgttgtagaagtctaactggaaaacccaaacttttcattattcaggcctgccgtggtacagaactggactgtggcattgagacagacagtggtgttgatgatgacatggcgtgtcataaaataccagtggaggccgacttcttgtatgcatactccacagcacctggttattattcttggcgaaattcaaaggatggctcctggttcatccagtcgctttgtgccatgctgaaacagtatgccgacaagcttgaatttatgcacattcttacccgggttaaccgaaaggtggcaacagaatttgagtccttttcctttgacgctacttttcatgcaaagaaacagattccatgtattgtttccatgctcacaaaagaactctatttttatcactaaagaaatggttggttggtggttttttttagtttgtatgccaagtgagaagatggtatatttggtactgtatttccctctcattttgacctactctcatgctgcagagggtactttaagacatactccttccatcaaatagaaccactatgaagctacctcaaacttccagtcaggtagttgcaattgaattaaattaggaataaataaaaatggatactggtgcagtcattatgagaggcaatgattgttaatttacagctttcatgattagcaagttacagtgatgctgtgctatgaattttcaagtaattgtgaaaaagttaaacattgaagtaatgaatttttatgatattccccccacttaagactgtgtattctagttttgtcaaactgtagaaatgatgatgtggaagaacttaggcatctgtgggcatggtcaaaggctcaaacctttattttagaattgatatacacggatgacttaactgcattttagaccatttatctgggattatggttttgtgatgtttgtcctgaacacttttgttgtaaaaaaataataataataatgtttaatattgagaaagaaactaatattttatgtgagagaaagtgtgagcaaactaacttgacttttaaggctaaaacttaacattcatagaggggtggagttttaactgtaaggtgctacaatgcccctggatctaccagcataaatatcttctgatttgtccctatgcatatcagttgagcttcatataccagcaatatatctgaagagctattatataaaaaccccaaactgttgattattagccaggtaatgtgaataaattctataggaacatatgaaaatacaacttaaataataaacagtggaatataaggaaagcaataaatgaatgggctgagctgcctgtaacttgagagtagatggtttgagcctgagcagagacatgactcagcctgttccatgaaggcagagccatggaccacgcaggaagggcctacagcccatttctccatacgcactggtatgtgtggatgatgctgccagggcgccatcgccaagtaagaaagtgaagcaaatcagaaacttgtgaagtggaaatgttctaaaggtggtgaggcaataaaaatcatagtactctttgtagcaaaattcttaagtatgttattttctgttgaagtttacaatcaaaggaaaatagtaatgttttatactgtttactgaaagaaaaagacctatgagcacataggactctagacggcatccagccggaggccagagctgagcactcagcccgggaggcaggctccaggcctcagcaggtgcggagccgtcactgcaccaagtctcactggctgtcagtatgacatttcacgggagatttcttgttgctcaaaaaatgagctcgcatttgtcaatgacagtttcttttttcttactagacctgtaacttttgtaaatacacacagcatgtaatggtatcttaaagtgtgtttctatgtgacaattttgtacaaatttgttattttccatttttatttcaaaatatacattcaaacttaaaatt

SEQ ID NO: 1208 - DNA, 1093 bp, Homo sapiens
ggctctcttcctgtctttgtggctccggaaaggcgtttgggatgccaacgatgaggctgctgtcatttgtggtgttggctctatttgctgtcactcaagcagaggaaggagccaggcttttggcttccaaatcactgctgaacagatacgccgtggagggacgagacctgaccttgcagtacaacatctacaatgttggctcaagtgctgcattagacgtggaactatctgatgattccttccctccagaagactttggcattgtgtctggaatgctcaatgtcaaatgggaccggattgcccctgctagcaatgtctcccacactgtggtcctgcgccctctcaaggctggttatttcaacttcacctcggcaacaattacttacctggcccaggaggatgggcccgttgtgattggctctaccagtgcacctggacagggaggaatcctggctcagcgggagtttgacaggcgattctcccctcattttctggactgggcagcctttggggtcatgacccttccctccatcggcatccccctgctattgtggtactccagcaagaggaaatatgacactcccaaaacgaagaagaactgattggggcttccacagccctcctctcccaagaaatccaggctcctctcccaagaaatccaggtgctttccagactccaaagggtatcttaaatgcaatctcttctctcttagcccttggccactttctcctggatcctgccctgctctcagccatagtgaaggaccagccctaggagtctgcgagagcctccttggttccatcgtgaagccataaacaggaatgcctttggcaatagccttgagcctagagggccctctgatgccccactgaggtgctgttggtttattgctggcaacgtgaattctctcaggggtctaggaggggcattttggagactgcctgacaccacccctatcccctgcctccccctctcagaagagggtggaagatgaaatgaaagctatgggactcttggaggatacccagtgtctattctgggttagagaagtgcttactaaggggttttctaataaaaacaaatgccaattgc

SEQ ID NO: 1209 - protein, 183 aa, Homo sapiens
MRLLSFVVLALFAVTQAEEGARLLASKSLLNRYAVEGRDLTLQYNIYNVGSSAALDVELSDDSFPPEDFGIVSGMLNVKWDRIAPASNVSHTVVLRPLKAGYFNFTSATITYLAQEDGPVVIGSTSAPGQGGILAQREFDRRFSPHFLDWAAFGVMTLPSIGIPLLLWYSSKRKYDTPKTKKN

SEQ ID NO: 1210 - DNA, 1723 bp, Homo sapiens
agctgaatagaatctgaccattggctttcacctggccaggaccttctatgtagctctccttttgtggcccatgtgctgcatcctctgccctcagtgtgcaactggcccccaacgcaatgtgtgtttgtcaaaccatggaagtggggcagtatggcaagaatgcaagtcgggctggagaccggggagtcctcctggagcccttcatccaccaagtaggcggacacagcagcatgatgcgttacgacgatcacactgtgtgcaagcccctcatctcccgggaacagcgcttttacgagtccctccctcccgaaatgaaggagttcacccctgaatacaaaggcgtggtatctgtctgttttgagggggacagtgatggttacatcaacttagtggcctatccttatgtggaaagtgagactgtggaacaggatgacacaacagaacgggagcaacctcggcgcaaacactcccgccggagcctgcaccggtcaggcagtggcagtgaccacaaggaggagaaagccagcctgtcccttgagacctctgagagctcacaggaggcaaagagtccgaaggtggagctgcacagccactcagaggtccctttccagatgctagatggcaacagtggcttgagttctgagaagatcagccacaacccctggagcctgcgttgtcacaagcagcagctgagccgcatgcgctccgagtccaaggaccgaaagctctacaagttcctcctgcttgagaacgtggtgcaccacttcaagtacccctgcgtgttggacctgaagatgggcacgcggcagcatggcgatgacgcgtcagctgagaaggcagcccggcagatgcggaaatgcgagcagagcacatcagccacgctgggcgtcagggtctgcggcatgcaggtgtaccagctggacacagggcattacctctgcaggaacaagtactatggccgtgggctctccattgaaggcttccgcaatgccctctatcaatatctgcacaatggcctggacctgcgacgtgacctgtttgagcctatcctgagcaaactgcggggcctgaaagctgtgctggagcggcaggcctcttaccgcttctactccagttccctgcttgtcatctatgatggcaaggagtgccgggctgagtcctgcctggaccgccggtctgagatgcgtctcaagcacctggacatggtgctccctgaggtggcgtcatcctgtggccccagcaccagccccagcaacaccagccccgaggcgggtccctcctctcagcccaaggtggatgtccgcatgattgactttgcacacagcacattcaagggcttccgggatgaccccaccgtgcatgatgggccagacagaggctacgtgtttggcctggagaacctcatcagcatcatggaacagatgcgggacgagaaccagtaggccctgttctgggcccccagaaccccttcctctccactgcaggcagggaccattgttctgaacttgccgtgaggacacacagacttgcttttaaagggttatatttctctttggtgtaaactaaaagaaatgtttttagctgtagcctggaatccatatatataaagtgaaggagggcagaccacacgccctctcagccaggctcctcaaaaaaaaaaaaaaaaaaaaaaaaaaaaaaaaaaaaaaaaaaaaaaaaaaaaaaaaaaaaaaaaaaaaaaaaa

SEQ ID NO: 1211 - protein, 441 aa, Homo sapiens
MCVCQTMEVGQYGKNASRAGDRGVLLEPFIHQVGGHSSMMRYDDHTVCKPLISREQRFYESLPPEMKEFTPEYKGVVSVCFEGDSDGYINLVAYPYVESETVEQDDTTEREQPRRKHSRRSLHRSGSGSDHKEEKASLSLETSESSQEAKSPKVELHSHSEVPFQMLDGNSGLSSEKISHNPWSLRCHKQQLSRMRSESKDRKLYKFLLLENVVHHFKYPCVLDLKMGTRQHGDDASAEKAARQMRKCEQSTSATLGVRVCGMQVYQLDTGHYLCRNKYYGRGLSIEGFRNALYQYLHNGLDLRRDLFEPILSKLRGLKAVLERQASYRFYSSSLLVIYDGKECRAESCLDRRSEMRLKHLDMVLPEVASSCGPSTSPSNTSPEAGPSSQPKVDVRMIDFAHSTFKGFRDDPTVHDGPDRGYVFGLENLISIMEQMRDENQ

SEQ ID NO: 1212 - DNA, 1638 bp, Homo sapiens
gccgcgggcggcggcggcagcggttggaggttgtaggaccggcgaggaataggaatcatggcggctgcgctgttcgtgctgctgggattcgcgctgctgggcacccacggagcctccggggctgccggcacagtcttcactaccgtagaagaccttggctccaagatactcctcacctgctccttgaatgacagcgccacagaggtcacagggcaccgctggctgaaggggggcgtggtgctgaaggaggacgcgctgcccggccagaaaacggagttcaaggtggactccgacgaccagtggggagagtactcctgcgtcttcctccccgagcccatgggcacggccaacatccagctccacgggcctcccagagtgaaggccgtgaagtcgtcagaacacatcaacgagggggagacggccatgctggtctgcaagtcagagtccgtgccacctgtcactgactgggcctggtacaagatcactgactctgaggacaaggccctcatgaacggctccgagagcaggttcttcgtgagttcctcgcagggccggtcagagctacacattgagaacctgaacatggaggccgaccccggccagtaccggtgcaacggcaccagctccaagggctccgaccaggccatcatcacgctccgcgtgcgcagccacctggccgccctctggcccttcctgggcatcgtggctgaggtgctggtgctggtcaccatcatcttcatctacgagaagcgccggaagcccgaggacgtcctggatgatgacgacgccggctctgcacccctgaagagcagcgggcagcaccagaatgacaaaggcaagaacgtccgccagaggaactcttcctgaggcaggtggcccgaggacgctccctgctccgcgtctgcgccgccgccggagtccactcccagtgcttgcaagattccaagttctcacctcttaaagaaaacccaccccgtagattcccatcatacacttccttcttttttaaaaaagttgggttttctccattcaggattctgttccttaggattttttccttctgaagtgtttcacgagagcccgggagctgctgccctgcggccccgtctgtggctttcagcctctgggtctgagtcatggccgggtgggcggcacagccttctccactggccggagtcagtgccaggtccttgccctttgtggaaagtcacaggtcacacgaggggccccgtgtcctgcctgtctgaagccaatgctgtctggttgcgccatttttgtgcttttatgtttaattttatgagggccacgggtctgtgttcgactcagcctcagggacgactctgacctcttggccacagaggactcacttgcccacaccgagggcgaccccgtcacagcctcaagtcactcccaagccccctccttgtctgtgcatccgggggcagctctggagggggtttgctggggaactggcgccatcgccgggactccagaaccgcagaagcctccccagctcacccctggaggacggccggctctctatagcaccagggctcacgtgggaacccccctcccacccaccgccacaataaagatcgcccccacctccaccctcaaaaaaaaaaaaaaaaaaaaaaa

SEQ ID NO: 1213 - protein, 269 aa, Homo sapiens
MAAALFVLLGFALLGTHGASGAAGTVFTTVEDLGSKILLTCSLNDSATEVTGHRWLKGGVVLKEDALPGQKTEFKVDSDDQWGEYSCVFLPEPMGTANIQLHGPPRVKAVKSSEHINEGETAMLVCKSESVPPVTDWAWYKITDSEDKALMNGSESRFFVSSSQGRSELHIENLNMEADPGQYRCNGTSSKGSDQAIITLRVRSHLAALWPFLGIVAEVLVLVTIIFIYEKRRKPEDVLDDDDAGSAPLKSSGQHQNDKGKNVRQRNSS

SEQ ID NO: 1214 - DNA, 444 bp, Homo sapiens
ctttagtcaggaaggacgttggtgttgaggttagcatacgtatcaaggacagtaactaccatggctcccgaagttttgccaaaacctcggatgcgtggccttctggccaggcgtctgcgaaatcatatggctgtagcattcgtgctatccctgggggttgcagctttgtataagtttcgtgtggctgatcaaagaaagaaggcatacgcagatttctacagaaactacgatgtcatgaaagattttgaggagatgaggaaggctggtatctttcagagtgtaaagtaatcttggaatataaagaatttcttcaggttgaattacctagaagtttgtcactgacttgtgttcctgaactatgacacatgaatatgtgggctaagaaatagttcctcttgataaataaacaattaacaaatactttgaaaaaaaaaaaaaaaaaaa

SEQ ID NO: 1215 - protein, 75 aa, Homo sapiens
MAPEVLPKPRMRGLLARRLRNHMAVAFVLSLGVAALYKFRVADQRKKAYADFYRNYDVMKDFEEMRKAGIFQSVK

SEQ ID NO: 1216 - DNA, 1007 bp, Homo sapiens
gacgctgcggggcgggcggacagactgcgggacggacggtggacgctgggacgcgtttgtagctccggccccgccgttccgacccccgccgccgtcgccgccatgacggggctagcactgctctactccggggtcttcgtggccttctgggcctgcgcgctggccgtgggagtctgctacaccatttttgatttgggcttccgctttgatgtggcatggttcctgacggagacttcgcccttcatgtggtccaacctgggcattggcctagctatctccctgtctgtggttggggcagcctggggcatctatattaccggctcctccatcattggtggaggagtgaaggcccccaggatcaagaccaagaacctggtcagcatcatcttctgtgaggctgtggccatctacggcatcatcatggcaattgtcattagcaacatggctgagcctttcagtgccacagaccccaaggccatcggccatcggaactaccatgcaggctactccatgtttggggctggcctcaccgtaggcctgtctaacctcttctgtggagtctgcgtgggcatcgtgggcagtggggctgccctggccgatgctcagaaccccagcctctttgtaaagattctcatcgtggagatctttggcagcgccattggcctctttggggtcatcgtcgcaattcttcagacctccagagtgaagatgggtgactagatgatatgtgtgggtggggccgtgcctcacttttatttattgctggttttcctgggacagctggagctgtgtcccttagcctttcagaggcttggtgttcagggccctccctgcactcccctcttgctgcgtgttgatttggaggcactgcagtccaggccgagtcctcagtgcggggagcaggctgctgctgctgactctgtgcagctgcgcacctgtgtcccccacctccaccctcaacccatcttcctagtgtttgtgaaataaacttggtatttgtctgggtc

SEQ ID NO: 1217 - protein, 205 aa, Homo sapiens
MTGLALLYSGVFVAFWACALAVGVCYTIFDLGFRFDVAWFLTETSPFMWSNLGIGLAISLSVVGAAWGIYITGSSIIGGGVKAPRIKTKNLVSIIFCEAVAIYGIIMAIVISNMAEPFSATDPKAIGHRNYHAGYSMFGAGLTVGLSNLFCGVCVGIVGSGAALADAQNPSLFVKILIVEIFGSAIGLFGVIVAILQTSRVKMGD

SEQ ID NO: 1218 - DNA, 479 bp, Homo sapiens
agattccgtcgcttcttccggagccgtacgtggcaccgccccgcctcgcgggcgaccgcggggcttgctgggaagagaggcgaagccaggtcacctttcaaggacccagaagtagggttttggcctaggtaacggggcagagatgtggttcgagattctccccggactctccgtcatgggcgtgtgcttgttgattccaggactggctactgcgtacatccacaggttcactaacgggggcaaggaaaaaagggttgctcattttgggtatcactggagtctgatggaaagagataggcgcatctctggagttgatcgttactatgtgtcaaagggtttggagaacattgattaaggaagcattttcctgattgatgaaaaaaataactcagttatggccatctacccctgctagaaggttacagtgtattatgtagcatgcaaatgtgtttatgtagtggcttaataaaaataaaatg

SEQ ID NO: 1219 - protein, 70 aa, Homo sapiens
MWFEILPGLSVMGVCLLIPGLATAYIHRFTNGGKEKRVAHFGYHWSLMERDRRISGVDRYYVSKGLENID

SEQ ID NO: 1220 - DNA, 964 bp, Homo sapiens
gagtgccgtagcgcccggctcctgcagacgctcggcctccgctcattcctgaccccgcagtgggcgcgatggcggaggctgtactgagggtcgcccggcggcagctgagccagcgcggcgggtctggagcccccatcctcctgcggcagatgttcgagcctgtgagctgcaccttcacgtacctgctgggtgacggagagtcccgggaggccgttctgatcgacccagtcctggaaacagcgcctcgggatgcccagctgatcaaggagctggggctgcggctgctctatgctgtgaatacccactgccacgcggaccacattacaggctcggggctgctccgttccctcctccctggctgccagtctgtcatctcccgccttagtggggcccaggctgacttacacattgaggatggagactccatccgcttcgggcgcttcgcgttggagaccagggccagccctggccacaccccaggctgtgtcaccttcgtcctgaatgaccacagcatggccttcactggagatgccctgttgatccgtgggtgtgggcggacagacttccagcaaggctgtgccaagaccttgtaccactcggtccatgaaaagatcttcacacttccaggagactgtctgatctaccctgctcacgattaccatgggttcacagtgtccaccgtggaggaggagaggactctgaaccctcggctcaccctcagctgtgaggagtttgtcaaaatcatgggcaacctgaacttgcctaaacctcagcagatagactttgctgttccagccaacatgcgctgtggggtgcagacacccactgcctgatctcacttctgtcagatgctcccatccactattaatgcactaggtgggaggagagggcggcaatgacactgcacctctcctttcccaccgcattccctggagctccctaaataaaactttttttaacgtga

SEQ ID NO: 1221 - protein, 227 aa, Homo sapiens
MFEPVSCTFTYLLGDGESREAVLIDPVLETAPRDAQLIKELGLRLLYAVNTHCHADHITGSGLLRSLLPGCQSVISRLSGAQADLHIEDGDSIRFGRFALETRASPGHTPGCVTFVLNDHSMAFTGDALLIRGCGRTDFQQGCAKTLYHSVHEKIFTLPGDCLIYPAHDYHGFTVSTVEEERTLNPRLTLSCEEFVKIMGNLNLPKPQQIDFAVPANMRCGVQTPTA

SEQ ID NO: 1222 - DNA, 2263 bp, Homo sapiens
gatatcacagcaacattgaaatgctaaaaagtttttaaacactctcaatttctaattcaccatgtcacagactggtgaaaaaaaaaaaaaaagcggccgcttccccccggccgggcccccgccgccccgcggtccccagagcgccaggcccccggggggagggagggagggcgccgggccggtgggagccagcggcgcgcggtgggacccacggagccccgcgacccgccgagcctggagccgggccggctcggggaagccggctccagcccggagcgaacttcgcagcccgtcggggggcggcggggagggggcccggagccggaggagggggcggccgcgggcacccccgcctgtgccccggcgtccccgggcaccatgctgtccaactcccagggccagagcccgccggtgccgttccccgccccggccccgccgccgcagccccccacccctgccctgccgcaccccccggcgcagccgccgccgccgcccccgcagcagttcccgcagttccacgtcaagtccggcctgcagatcaagaagaacgccatcatcgatgactacaaggtcaccagccaggtcctggggctgggcatcaacggcaaagttttgcagatcttcaacaagaggacccaggagaaattcgccctcaaaatgcttcaggactgccccaaggcccgcagggaggtggagctgcactggcgggcctcccagtgcccgcacatcgtacggatcgtggatgtgtacgagaatctgtacgcagggaggaagtgcctgctgattgtcatggaatgtttggacggtggagaactctttagccgaatccaggatcgaggagaccaggcattcacagaaagagaagcatccgaaatcatgaagagcatcggtgaggccatccagtatctgcattcaatcaacattgcccatcgggatgtcaagcctgagaatctcttatacacctccaaaaggcccaacgccatcctgaaactcactgactttggctttgccaaggaaaccaccagccacaactctttgaccactccttgttatacaccgtactatgtggctccagaagtgctgggtccagagaagtatgacaagtcctgtgacatgtggtccctgggtgtcatcatgtacatcctgctgtgtgggtatccccccttctactccaaccacggccttgccatctctccgggcatgaagactcgcatccgaatgggccagtatgaatttcccaacccagaatggtcagaagtatcagaggaagtgaagatgctcattcggaatctgctgaaaacagagcccacccagagaatgaccatcaccgagtttatgaaccacccttggatcatgcaatcaacaaaggtccctcaaaccccactgcacaccagccgggtcctgaaggaggacaaggagcggtgggaggatgtcaaggggtgtcttcatgacaagaacagcgaccaggccacttggctgaccaggttgtgagcagaggattctgtgttcctgtccaaactcagtgctgtttcttagaatccttttattccctgggtctctaatgggaccttaaagaccatctggtatcatcttctcattttgcagaagagaaactgaggcccagaggcggagggcagtctgctcaaggtcacgcagctggtgactggttggggcagaccggacccaggtttcctgactcctggcccaagtctcttcctcctatcctgcgggatcactggggggctctcagggaacagcagcagtgccatagccaggctctctgctgcccagcgctggggtgaggctgccgttgtcagcgtggaccactaaccagcccgtcttctctctctgctcccacccctgccgccctcaccctgcccttgttgtctctgtctctcacgtctctcttctgctgtctctcctacctgtcttctggctctctctgtacccttcctggtgctgccgtgcccccaggaggagatgaccagtgccttggccacaatgcgcgttgactacgagcagatcaagataaaaaagattgaagatgcatccaaccctctgctgctgaagaggcggaagaaagctcgggccctggaggctgcggctctggcccactgagccaccgcgccctcctgcccacgggaggacaagcaataactctctacaggaatatattttttaaacgaagagacagaactgtccacatctgcctcctctcctcctcagctgcatggagcctggaactgcatcagtgactgaattc

SEQ ID NO: 1223 - protein, 370 aa, Homo sapiens
MLSNSQGQSPPVPFPAPAPPPQPPTPALPHPPAQPPPPPPQQFPQFHVKSGLQIKKNAIIDDYKVTSQVLGLGINGKVLQIFNKRTQEKFALKMLQDCPKARREVELHWRASQCPHIVRIVDVYENLYAGRKCLLIVMECLDGGELFSRIQDRGDQAFTEREASEIMKSIGEAIQYLHSINIAHRDVKPENLLYTSKRPNAILKLTDFGFAKETTSHNSLTTPCYTPYYVAPEVLGPEKYDKSCDMWSLGVIMYILLCGYPPFYSNHGLAISPGMKTRIRMGQYEFPNPEWSEVSEEVKMLIRNLLKTEPTQRMTITEFMNHPWIMQSTKVPQTPLHTSRVLKEDKERWEDVKGCLHDKNSDQATWLTRL

SEQ ID NO: 1224 - DNA, 1726 bp, Homo sapiens
gatatcacagcaacattgaaatgctaaaaagtttttaaacactctcaatttctaattcaccatgtcacagactggtgaaaaaaaaaaaaaaagcggccgcttccccccggccgggcccccgccgccccgcggtccccagagcgccaggcccccggggggagggagggagggcgccgggccggtgggagccagcggcgcgcggtgggacccacggagccccgcgacccgccgagcctggagccgggccggctcggggaagccggctccagcccggagcgaacttcgcagcccgtcggggggcggcggggagggggcccggagccggaggagggggcggccgcgggcacccccgcctgtgccccggcgtccccgggcaccatgctgtccaactcccagggccagagcccgccggtgccgttccccgccccggccccgccgccgcagccccccacccctgccctgccgcaccccccggcgcagccgccgccgccgcccccgcagcagttcccgcagttccacgtcaagtccggcctgcagatcaagaagaacgccatcatcgatgactacaaggtcaccagccaggtcctggggctgggcatcaacggcaaagttttgcagatcttcaacaagaggacccaggagaaattcgccctcaaaatgcttcaggactgccccaaggcccgcagggaggtggagctgcactggcgggcctcccagtgccccgacatcgtacggatcgtggatgtgtacgagaatctgtacgcagggaggaagtgcctgctgattgtcatggaatgtttggacggtggagaactctttagccgaatccaggatcgaggagaccaggcattcacagaaagagaagcatccgaaatcatgaagagcatcggtgaggccatccagtatctgcattcaatcaacattgcccatcgggatgtcaagcctgagaatctcttatacacctccaaaaggcccaacgccatcctgaaactcactgactttggctttgccaaggaaaccaccagccacaactctttgaccactccttgttatacaccgtactatgtggctccagaagtgctgggtccagagaagtatgacaagtcctgtgacatgtggtccctgggtgtcatcatgtacattctgctgtgtgggtatccccccttctactccaaccacggccttgccatctctccgggcatgaagactcgcatccgaatgggccagtatgaatttcccaacccagaatggtcagaagtatcagaggaagtgaagatgctcattcggaatctgctgaaaacagagcccacccagagaatgaccatcaccgagtttatgaaccacccttggatcatgcaatcaacaaaggtccctcaaaccccactgcacaccagccgggtcctgaaggaggacaaggagcggtgggaggatgtcaaggaggagatgaccagtgccttggccacaatgcgcgttgactacgagcagatcaagataaaaaagattgaagatgcatccaaccctctgctgctgaagaggcggaagaaagctcgggccctggaggctgcggctctggcccactgagccaccgcgccctcctgcccacgggaggacaagcaataactctctacaggaatatattttttaaacgaagagacagaactgtccacatctgcctcctctcctcctcagctgcatggagcctggaactgcatcagtgactgaattc

SEQ ID NO: 1225 - protein, 400 aa, Homo sapiens
MLSNSQGQSPPVPFPAPAPPPQPPTPALPHPPAQPPPPPPQQFPQFHVKSGLQIKKNAIIDDYKVTSQVLGLGINGKVLQIFNKRTQEKFALKMLQDCPKARREVELHWRASQCPDIVRIVDVYENLYAGRKCLLIVMECLDGGELFSRIQDRGDQAFTEREASEIMKSIGEAIQYLHSINIAHRDVKPENLLYTSKRPNAILKLTDFGFAKETTSHNSLTTPCYTPYYVAPEVLGPEKYDKSCDMWSLGVIMYILLCGYPPFYSNHGLAISPGMKTRIRMGQYEFPNPEWSEVSEEVKMLIRNLLKTEPTQRMTITEFMNHPWIMQSTKVPQTPLHTSRVLKEDKERWEDVKEEMTSALATMRVDYEQIKIKKIEDASNPLLLKRRKKARALEAAALAH

SEQ ID NO: 1226 - DNA, 2821 bp, Homo sapiens
ggcacgaggctaaaagagtggatcatgacccatgaagagcaccatgcagccaaaaccctggggattggcaaagccattgctgtcttaacctctggtggagatgcccaaggtatgaatgctgctgtcagggctgtggttcgagttggtatcttcaccggtgcccgtgtcttctttgtccatgagggttatcaaggcctggtggatggtggagatcacatcaaggaagccacctgggagagcgtttcgatgatgcttcagctgggaggcacggtgattggaagtgcccggtgcaaggactttcgggaacgagaaggacgactccgagctgcctacaacctggtgaagcgtgggatcaccaatctctgtgtcattgggggtgatggcagcctcactggggctgacaccttccgttctgagtggagtgacttgttgagtgacctccagaaagcaggtaagatcacagatgaggaggctacgaagtccagctacctgaacattgtgggcctggttgggtcaattgacaatgacttctgtggcaccgatatgaccattggcactgactctgccctgcatcggatcatggaaattgtagatgccatcactaccactgcccagagccaccagaggacatttgtgttagaagtaatgggccgccactgtggatacctggcccttgtcacctctctgtcctgtggggccgactgggtttttattcctgaatgtccaccagatgacgactgggaggaacacctttgtcgccgactcagcgagacaaggacccgtggttctcgtctcaacatcatcattgtggctgagggtgcaattgacaagaatggaaaaccaatcacctcagaagacatcaagaatctggtggttaagcgtctgggatatgacacccgggttactgtcttggggcatgtgcagaggggtgggacgccatcagcctttgacagaattctgggcagcaggatgggtgtggaagcagtgatggcacttttggaggggaccccagataccccagcctgtgtagtgagcctctctggtaaccaggctgtgcgcctgcccctcatggaatgtgtccaggtgaccaaagatgtgaccaaggccatggatgagaagaaatttgacgaagccctgaagctgagaggccggagcttcatgaacaactgggaggtgtacaagcttctagctcatgtcagacccccggtatctaagagtggttcgcacacagtggctgtgatgaacgtgggggctccggctgcaggcatgaatgctgctgttcgctccactgtgaggattggccttatccagggcaaccgagtgctcgttgtccatgatggtttcgagggcctggccaaggggcagatagaggaagctggctggagctatgttgggggctggactggccaaggtggctctaaacttgggactaaaaggactctacccaagaagagctttgaacagatcagtgccaatataactaagtttaacattcagggccttgtcatcattgggggctttgaggcttacacagggggcctggaactgatggagggcaggaagcagtttgatgagctctgcatcccatttgtggtcattcctgctacagtctccaacaatgtccctggctcagacttcagcgttggggctgacacagcactcaatactatctgcacaacctgtgaccgcatcaagcagtcagcagctggcaccaagcgtcgggtgtttatcattgagactatgggtggctactgtggctacctggctaccatggctggactggcagctggggccgatgctgcctacatttttgaggagcccttcaccattcgagacctgcaggcaaatgttgaacatctggtgcaaaagatgaaaacaactgtgaaaaggggcttggtgttaaggaatgaaaagtgcaatgagaactataccactgacttcattttcaacctgtactctgaggaggggaagggcatcttcgacagcaggaagaatgtgcttggtcacatgcagcagggtgggagcccaaccccatttgataggaattttgccactaagatgggcgccaaggctatgaactggatgtctgggaaaatcaaagagagttaccgtaatgggcggatctttgccaatactccagattcgggctgtgttctggggatgcgtaagagggctctggtcttccaaccagtggctgagctgaaggaccagacagattttgagcatcgaatccccaaggaacagtggtggctgaaactgaggcccatcctcaaaatcctagccaagtacgagattgacttggacacttcagaccatgcccacctggagcacatcacccggaagcggtccggggaagctgccgtctaaacctctctggagtgaggggaatagattacctgatcatggtcagctcacaccctaataagtccacatcttctcagtgttttagctgtttttttcattaggtttccttttattctgtaccttgcagccatgaccagttctggccaggagctggaggagcaggcagtgggtgggagctccttttaggtagaatttaacatgacttctgccccagctttatctgtcacacaaggctgggcacctctagtgctactgctagatatcacttactcagttagaattttcctaaaaataagctttatttatttctttgtgataacaaagagtcttggttcctctactacttttactacagtgacaaattgtaactacactaataaatgccaactggtcactgtgaaaaaaaaaaaaaaaaaaaaaaaaaaaaaaaaaaaaaaaaaaaaaaaaaaaaaaaaaa

SEQ ID NO: 1227 - protein, 780 aa, Homo sapiens
MTHEEHHAAKTLGIGKAIAVLTSGGDAQGMNAAVRAVVRVGIFTGARVFFVHEGYQGLVDGGDHIKEATWESVSMMLQLGGTVIGSARCKDFREREGRLRAAYNLVKRGITNLCVIGGDGSLTGADTFRSEWSDLLSDLQKAGKITDEEATKSSYLNIVGLVGSIDNDFCGTDMTIGTDSALHRIMEIVDAITTTAQSHQRTFVLEVMGRHCGYLALVTSLSCGADWVFIPECPPDDDWEEHLCRRLSETRTRGSRLNIIIVAEGAIDKNGKPITSEDIKNLVVKRLGYDTRVTVLGHVQRGGTPSAFDRILGSRMGVEAVMALLEGTPDTPACVVSLSGNQAVRLPLMECVQVTKDVTKAMDEKKFDEALKLRGRSFMNNWEVYKLLAHVRPPVSKSGSHTVAVMNVGAPAAGMNAAVRSTVRIGLIQGNRVLVVHDGFEGLAKGQIEEAGWSYVGGWTGQGGSKLGTKRTLPKKSFEQISANITKFNIQGLVIIGGFEAYTGGLELMEGRKQFDELCIPFVVIPATVSNNVPGSDFSVGADTALNTICTTCDRIKQSAAGTKRRVFIIETMGGYCGYLATMAGLAAGADAAYIFEEPFTIRDLQANVEHLVQKMKTTVKRGLVLRNEKCNENYTTDFIFNLYSEEGKGIFDSRKNVLGHMQQGGSPTPFDRNFATKMGAKAMNWMSGKIKESYRNGRIFANTPDSGCVLGMRKRALVFQPVAELKDQTDFEHRIPKEQWWLKLRPILKILAKYEIDLDTSDHAHLEHITRKRSGEAAV

SEQ ID NO: 1228 - DNA, 4693 bp, Homo sapiens
ggactgcgggataggaagctggggatatggacaagcagcagcgttatagcgctctgggtttcgggacataggcctgggccatgcggcccccttggccccttggcgcgacccccaggaacgttcggaaagctggtcctcgtggctgggggaaaggcggggggtgggggggaagcgggcacgtgaccccggtcagccaatctgggtgctgctgacgtggccgcgcggccccgatgctctccccacccccccagcccgttccggaagggaggggctgggggctacgccccctcccccagcacggcttcgttttctgggggggggttgacaccccggattacataccccgtaccaagccgagggcaactttggaggccccctggaaggctttaggatccagattcttcgctgctgctgccttaccgccgagaaccaccacccgccaggcgtcttgcggccacacccctggcgggttcaggcaggctacgcccacgcgacccctcccgtttccctgctttggccaatggaggagctacgaatggcacgacctgctcgagcttggcagtctccagttgggctgtgcatggaagcttgggaagactttgttggaaggggaggcggggagagagtgctggaggctctggggcgatggcttccgcacctcttccaaccaccctctttccctggagtcggcggaccacagctcagccaattggcttggagatgtggcgggttgccacttccctgtgggtctctgcggcactcttctgcctggtgactgacaccttggaaatgaagtttatgacgtcatcgctgcggctggccaatagaaaaagctcccgcggagaggtgttccttccccttcgactcagcttcttcacccgcgtgagcgagcgcgcgcgcgcggagggggtggggaaaatctcaagcagggtggcgcgcatgagcggcgaagctcctcctccccgcctatatataaagggctggcgcggggctcggcggcgccatttcgtgctggagtggagcagcctctagaacgagctggaggattctgcctaccgatacagagccttcgagtcgtccggggccgccattacaatccacctccatccgcttggaaatggccttcgtcccggcctatgactggtcccagcgggcagtacagaccccctagaagcccctggagctcccctttttcgggccccgcccaatcctcggagtctgtccaccccctctactccgccctcaagaggatttcaaagatggaggcggcggctccctaaaccacttttcgtgttcatccgcctccatccgagatcgaaacgggacctcgtcggccccgtaggggcccgacaagaagagggaatccctgcagaccaacagcgggctatattgacgacggtgtctgagatcggggaccgtcttttgaagagtcagtccctccttagttgcccgcctcagctgaggccgccgccattttcttgctgtccgccgtctgcagagcgcgccaagctgcccggagctctccgagaggccccaaagagactgctttcgtgccggccaggcagggggtttgtcgcctggaggcccaagaggaacggcctccccccaacttagcgggttatgctggaccgggcggtgagggaaaccgaggccacccggactttccgcggctgagggcagcgccggttccttgcggtcaagatgctgcaaaacgtgactccccacaataagctccctggggaagggaatgcagggttgctggggctgggcccagaagcagcagcaccagggaaaaggattcgaaaaccctctctcttgtatgagggctttgagagccccacaatggcttcggtgcctgctttgcaacttacccctgccaacccaccacccccggaggtgtccaatcccaaaaagccaggacgagttaccaaccagctgcaatacctacacaaggtagtgatgaaggctctgtggaaacatcagttcgcatggccattccggcagcctgtggatgctgtcaaactgggtctaccggattatcacaaaattataaaacagcctatggacatgggtactattaagaggagacttgaaaacaattattattgggctgcttcagagtgtatgcaagattttaataccatgttcaccaactgttacatttacaacaagcccactgatgatattgtcctaatggcacaaacgctggaaaagatattcctacagaaggttgcatcaatgccacaagaagaacaagagctggtagtgaccatccctaagaacagccacaagaagggggccaagttggcagcgctccagggcagtgttaccagtgcccatcaggtgcctgccgtctcttctgtgtcacacacagccctgtatactcctccacctgagatacctaccactgtcctcaacattccccacccatcagtcatttcctctccacttctcaagtccttgcactctgctggacccccgctccttgctgttactgcagctcctccagcccagccccttgccaagaaaaaaggcgtaaagcggaaagcagatactaccacccctacacctacagccatcttggctcctggttctccagctagccctcctgggagtcttgagcctaaggcagcacggcttccccctatgcgtagagagagtggtcgccccatcaagcccccacgcaaagacttgcctgactctcagcaacaacaccagagctctaagaaaggaaagctttcagaacagttaaaacattgcaatggcattttgaaggagttactctctaagaagcatgctgcctatgcttggcctttctataaaccagtggatgcttctgcacttggcctgcatgactaccatgacatcattaagcaccccatggacctcagcactgtcaagcggaagatggagaaccgtgattaccgggatgcacaggagtttgctgctgatgtacggcttatgttctccaactgctataagtacaatcccccagatcacgatgttgtggcaatggcacgaaagctacaggatgtatttgagttccgttatgccaagatgccagatgaaccactagaaccagggcctttaccagtctctactgccatgccccctggcttggccaaatcgtcttcagagtcctccagtgaggaaagtagcagtgagagctcctctgaggaagaggaggaggaagatgaggaggacgaggaggaagaagagagtgaaagctcagactcagaggaagaaagggctcatcgcttagcagaactacaggaacagcttcgggcagtacatgaacaactggctgctctgtcccagggtccaatatccaagcccaagaggaaaagagagaaaaaagagaaaaagaagaaacggaaggcagagaagcatcgaggccgagctggggccgatgaagatgacaaggggcctagggcaccccgcccacctcaacctaagaagtccaagaaagcaagtggcagtgggggtggcagtgctgctttaggcccttctggctttggaccttctggaggaagtggcaccaagctccccaaaaaggccacaaagacagccccacctgccctgcctacaggttatgattcagaggaggaggaagagagcaggcccatgagttacgatgagaagcggcagctgagcctggacatcaacaaattacctggggagaagctgggccgagttgtgcatataatccaagccagggagccctctttacgtgattcaaacccagaagagattgagattgattttgaaacactcaagccatccacacttagagagcttgagcgctatgtcctttcctgcctacgtaagaaaccccggaagccctacaccattaagaagcctgtgggaaagacaaaggaggaactggctttggagaaaaagcgggaattagaaaagcggttacaagatgtcagcggacagctcaattctactaaaaagccccccaagaaagcgaatgagaaaacagagtcatcctctgcacagcaagtagcagtgtcacgccttagcgcttccagctccagctcagattccagctcctcctcttcctcgtcgtcgtcttcagacaccagtgattcagactcaggctaaggggtcaggccagatggggcaggaaggctccgcaggaccggacccctagaccaccctgccccacctgccccttccccctttgctgtgacacttcttcatctcacccccccccgcccccctctaggagagctggctctgcagtgggggagggatgcagggacatttactgaaggagggacatggacaaaacaacattgaattcccagccccattggggagtgatctcttggacacagagcccccattcaaaatggggcagggcaagggtgggagtgtgcaaagccctgatctggagttacctgaggccatagctgccctattcacttctaagggccctgttttgagattgtttgttctaatttattttaagctaggtaaggctggggggagggtggggccgtggtcccctcagcctccatggggagggaagaagggggagctctttttttacgttgatttttttttttctactctgttttccctttttccttccgctccatttggggccctgggggtttcagtcatctccccatttggtcccctggactgtctttgttgattctaacttgtaaataaagaaaatatt

SEQ ID NO: 1229 - protein, 801 aa, Homo sapiens
MLQNVTPHNKLPGEGNAGLLGLGPEAAAPGKRIRKPSLLYEGFESPTMASVPALQLTPANPPPPEVSNPKKPGRVTNQLQYLHKVVMKALWKHQFAWPFRQPVDAVKLGLPDYHKIIKQPMDMGTIKRRLENNYYWAASECMQDFNTMFTNCYIYNKPTDDIVLMAQTLEKIFLQKVASMPQEEQELVVTIPKNSHKKGAKLAALQGSVTSAHQVPAVSSVSHTALYTPPPEIPTTVLNIPHPSVISSPLLKSLHSAGPPLLAVTAAPPAQPLAKKKGVKRKADTTTPTPTAILAPGSPASPPGSLEPKAARLPPMRRESGRPIKPPRKDLPDSQQQHQSSKKGKLSEQLKHCNGILKELLSKKHAAYAWPFYKPVDASALGLHDYHDIIKHPMDLSTVKRKMENRDYRDAQEFAADVRLMFSNCYKYNPPDHDVVAMARKLQDVFEFRYAKMPDEPLEPGPLPVSTAMPPGLAKSSSESSSEESSSESSSEEEEEEDEEDEEEEESESSDSEEERAHRLAELQEQLRAVHEQLAALSQGPISKPKRKREKKEKKKKRKAEKHRGRAGADEDDKGPRAPRPPQPKKSKKASGSGGGSAALGPSGFGPSGGSGTKLPKKATKTAPPALPTGYDSEEEEESRPMSYDEKRQLSLDINKLPGEKLGRVVHIIQAREPSLRDSNPEEIEIDFETLKPSTLRELERYVLSCLRKKPRKPYTIKKPVGKTKEELALEKKRELEKRLQDVSGQLNSTKKPPKKANEKTESSSAQQVAVSRLSASSSSSDSSSSSSSSSSSDTSDSDSG

SEQ ID NO: 1230 - DNA, 1953 bp, Homo sapiens
cgctcccacccgcccgtggcccgcgcccatggccgcgcgcgctccacacaactcaccggagtccgcgccctgcgccgccgaccagttcgcagctccgcgccacggcagccagtctcacctggcggcaccgcccgcccaccgccccggccacagcccctgcgcccacggcagcaatcgaggcgaccgcgacagtggtgggggacgctgctgagtggaagagagcgcagcccggccaccggacctacttactcgccttgctgattgtctatttttgcgtttacaacttttctaagaacttttgtatacaaaggaactttttaaaaaagacgcttccaagttatatttaatccaaagaagaaggatctcggccaatttggggttttgggttttggcttcgttttttctcttcgttgactttggggttcaggtgccccagctgcttcgggctgccgaggaccttctgggcccccacattaatgaggcagccacctggcgagtctgacatggctgtcagcgacgcgctgctcccatctttctccacgttcgcgtctggcccggcgggaagggagaagacactgcgtcaagcaggtgccccgaataaccgctggcgggaggagctctcccacatgaagcgacttcccccagtgcttcccggccgcccctatgacctggcggcggcgaccgtggccacagacctggagagcggcggagccggtgcggcttgcggcggtagcaacctggcgcccctacctcggagagagaccgaggagttcaacgatctcctggacctggactttattctctccaattcgctgacccatcctccggagtcagtggccgccaccgtgtcctcgtcagcgtcagcctcctcttcgtcgtcgccgtcgagcagcggccctgccagcgcgccctccacctgcagcttcacctatccgatccgggccgggaacgacccgggcgtggcgccgggcggcacgggcggaggcctcctctatggcagggagtccgctccccctccgacggctcccttcaacctggcggacatcaacgacgtgagcccctcgggcggcttcgtggccgagctcctgcggccagaattggacccggtgtacattccgccgcagcagccgcagccgccaggtggcgggctgatgggcaagttcgtgctgaaggcgtcgctgagcgcccctggcagcgagtacggcagcccgtcggtcatcagcgtcagcaaaggcagccctgacggcagccacccggtggtggtggcgccctacaacggcgggccgccgcgcacgtgccccaagatcaagcaggaggcggtctcttcgtgcacccacttgggcgctggaccccctctcagcaatggccaccggccggctgcacacaacttccccctggggcggcagctccccagcaggagtaccccgaccctgggttttgaggaagtgctgagcagcagggaatgtcaccctgccctgccgcttcctcccggcttccatccccacccggggcccaattacccatccttcctgcccgatcagatgcagccgcaagtcccgccgctccattaccaagagctcatgccacccggttcctgcatgccagaggagcccaagccaaagaggggaagacgatcgtggccccggaaaaggaccgccacccacacttgtgattacgcgggctgcggcaaaacctacacaaagagttcccatctcaaggcacacctgcgaacccacacaggtgagaaaccttaccactgtgactgggacggctgtggatggaaattcgcccgctcagatgaactgaccaggcactaccgtaaacacacggggcaccgcccgttccagtgccaaaaatgcgaccgagcattttccaggtcggaccacctcgccttacacatgaagaggcatttttaaatcccagacagtggatatgacccacactgccagaaga

SEQ ID NO: 1231 - protein, 470 aa, Homo sapiens
MAVSDALLPSFSTFASGPAGREKTLRQAGAPNNRWREELSHMKRLPPVLPGRPYDLAAATVATDLESGGAGAACGGSNLAPLPRRETEEFNDLLDLDFILSNSLTHPPESVAATVSSSASASSSSSPSSSGPASAPSTCSFTYPIRAGNDPGVAPGGTGGGLLYGRESAPPPTAPFNLADINDVSPSGGFVAELLRPELDPVYIPPQQPQPPGGGLMGKFVLKASLSAPGSEYGSPSVISVSKGSPDGSHPVVVAPYNGGPPRTCPKIKQEAVSSCTHLGAGPPLSNGHRPAAHNFPLGRQLPSRSTPTLGFEEVLSSRECHPALPLPPGFHPHPGPNYPSFLPDQMQPQVPPLHYQELMPPGSCMPEEPKPKRGRRSWPRKRTATHTCDYAGCGKTYTKSSHLKAHLRTHTGEKPYHCDWDGCGWKFARSDELTRHYRKHTGHRPFQCQKCDRAFSRSDHLALHMKRHF

SEQ ID NO: 1232 - DNA, 3593 bp, Homo sapiens
ctcggccccgggctgccgcgccagcccgtctccgcggcgggggaccgggctgccttggcccctcagcgctcgcgtcttttccggcagttggaacgcttcctgttgtcctcacccgtaaccgcctgttgccccctgtctcagagtccctcacgcgtcccctcccgtctttggctcgttggctgccgccgccggggcttcgccagccttcaagtcgagactactggccgaaggggcgtctgcggctctccgccgtccccagccctgcctctccctgggctctgcagccatggcaatgacaggctcaacaccttgctcatccatgagtaaccacacaaaggaaagggtgacaatgaccaaagtgacactggagaatttttatagcaaccttatcgctcaacatgaagaacgagaaatgagacaaaagaagttagaaaaggtgatggaagaagaaggcctaaaagatgaggagaaacgactccggagatcagcacatgctcggaaggaaacagagtttcttcgtttgaagagaacaagacttggattggaagattttgagtccttaaaagtaataggcagaggagcatttggtgaggtacggcttgttcagaagaaagatacgggacatgtgtatgcaatgaaaatactccgtaaagcagatatgcttgaaaaagagcaggttggccacattcgtgcggagcgtgacattctagtggaggcagacagtttgtgggttgtgaaaatgttctatagttttcaggataagctaaacctctacctaatcatggagttcctgcctggaggggacatgatgaccttgttgatgaaaaaagacactctgacagaagaggagactcagttttatatagcagaaacagtattagccatagactctattcaccaacttggattcatccacagagacatcaaaccagacaaccttcttttggacagcaagggccatgtgaaactttctgactttggtctttgcacaggactgaaaaaagcacataggacagaattttataggaatctgaaccacagcctccccagtgatttcactttccagaacatgaattccaaaaggaaagcagaaacctggaaaagaaatagacgtcagctagccttctccacagtaggcactcctgactacattgctcctgaggtgttcatgcagaccgggtacaacaagctctgtgattggtggtcgcttggggtgatcatgtatgagatgctcatcggctacccacctttctgttctgagacccctcaagagacatataagaaggtgatgaactggaaagaaactttgacttttcctccagaagttcccatctctgagaaagccaaggatctaattttgaggttctgctgtgaatgggaacatagaattggagctcctggagttgaggaaataaaaagtaactctttttttgaaggcgttgactgggaacatatcagagagagacctgctgcaatatctattgaaatcaaaagcattgatgatacctcaaacttcgatgagtttccagaatctgatattcttaagccaacagtggccacaagtaatcatcctgagactgactacaagaacaaagactgggtcttcatcaattacacgtacaagcgctttgagggcctgactgcaaggggggcaataccttcctacatgaaagcagcaaaatagtactcttgccacggaatcctatgtggagcagagttctttgtataacatcatgcttttcctctcacactcttgaagagcttccaagaagttgatggaacccaccaatatgtcatagtaaagtctcctgaaatgtggtagtaagaggattttcttccataatgcatctgaaaaactgtaaacaaagacaaccatttctactacgtcggccataaacagctatcctgctttggaagagaagcatcatgagccaatttgataggtgttttaaaaataacttgagttttcctaagttcatcagaatgaaggggaaaaacagccatcatccaacattattgagattgtcgtgtatagtcatcgaatatcagccagttcctgtaattttgtgacacgctctctgccaagcccaccaagtatttcctttatagctaaaagttccatagtactaaggaaataaagcaataaagacagtctcagcagccaggattctggctgaaggaaatgatccgccaccctgagggtggtgatggtagtttctacccatacctcagcctcaggcgagtggcttatagcctccattcatggtgcactttatttatggtactaagataaagactgtcaatccattgatttatctcctcctgtcccccatctaaaatacccatgctgcttttctgagtgttgatgggggttaccagcttgatccactgttgctcttagaaggcccagaaagtctttgggcattgccaagaaatcccggattatgtggaaaaccctcactttctcttcacggctgtaccagaaaatccctaagacagatcttgccgtggactagcaatacctgcaagtgctgccaatgggaactcaatttattcctgggaacctaacgaggagagcccaggcctaggcaggaggcctggaaccctcttggctaaggtgctgttcctgttcctgcaaggtctccagaacccctttggaaatggtgaaggaaccagcccaatagaagtacagagccagctgacaagtccttgtaaagctcactcctcagtccttggcacagccatgttttgtcttctctcttggtatttcttctctcccaactttagccattttgccttggaatcatgattacaattttttcctttgcagatgccttcctgggggatactcctccccaccctaaagggtcgcctgcaacttaggcggattgggtctctctgctgtggcgttctctcttgagagaccctctgaattttagcacaaagtgccttctgtttcacagctgccaccacctttagaggaatttcgtcagaaaaatgtggaggctccatattaatgcattattttttaaaaagttttgataactcttaaagcatcatttgcacctatgtgggaactttgcctgttgcaaagtattgtggccgagctgcagctgggagcctgctttctgccagtcttgaggttctgaagatcagctttgaaaggaaagtatgtcctagcttagccattcagaagagaaaaatggaatatcagagttacagttgtcagtgaaactactttggattttaacctcttagaggaagaaaaaaggttagggaagtgtcaactctggatgaaggtgatgtgtttgcctctcagtctttcattcatagcctgctagtgaaaaggaagtaaatgagattcttttgtgtgactttgtagtctctttgtattaccaaatagttggggtgttgactcctgtgtgttttgcaagaatgtgtggtaagcctgggtaaagagaaggaactgcggtgttgggagagtctttgtgttggggagtggcaggggatgatttgtttcaggggaaaatgcccacattttaacttttaaacttctgaataaactgtgtaaaaacaaaaaaaaaaaaaaaaaa

SEQ ID NO: 1233 - protein, 465 aa, Homo sapiens
MAMTGSTPCSSMSNHTKERVTMTKVTLENFYSNLIAQHEEREMRQKKLEKVMEEEGLKDEEKRLRRSAHARKETEFLRLKRTRLGLEDFESLKVIGRGAFGEVRLVQKKDTGHVYAMKILRKADMLEKEQVGHIRAERDILVEADSLWVVKMFYSFQDKLNLYLIMEFLPGGDMMTLLMKKDTLTEEETQFYIAETVLAIDSIHQLGFIHRDIKPDNLLLDSKGHVKLSDFGLCTGLKKAHRTEFYRNLNHSLPSDFTFQNMNSKRKAETWKRNRRQLAFSTVGTPDYIAPEVFMQTGYNKLCDWWSLGVIMYEMLIGYPPFCSETPQETYKKVMNWKETLTFPPEVPISEKAKDLILRFCCEWEHRIGAPGVEEIKSNSFFEGVDWEHIRERPAAISIEIKSIDDTSNFDEFPESDILKPTVATSNHPETDYKNKDWVFINYTYKRFEGLTARGAIPSYMKAAK

SEQ ID NO: 1234 - DNA, 1082 bp, Homo sapiens
ttgtacaccacaaatatacccaacttttatttgtcaattacactttaataaagctgggggaagccactctttttttgggcacagcatccggcttttatttactaactttgagaacagagtaccttgatcaattaaatggtagggagcgctgtggagacagcatcctccccagtccgggaagagaggcctaggatgcctggggcccagcggcctcttccctcctggcgtccccggctgccctcgctcccaggccccgcagtctcatttgccgcttccgacgcgtgaccccggcgcgctagcgtccgggaccggtgacaggcgcggggtgcgccaagcagtcccatgtgtcccctccctctcgcagccgccgcagtcgctgcgccccgagcccctctccggctcctcaacagagggctcgccgccgccatgtctaccgcccagtcactcaaatccgtggactacgaggtgttcggaagagtgcagggtgtttgcttcagaatgtatacagaagatgaagctaggaaaataggagtggttggctgggtgaagaataccagcaaaggcaccgtgacaggccaagtgcaggggccagaagacaaagtcaattccatgaagtcctggctgagcaaggttggaagccctagttctcgcattgaccgcacaaacttttctaatgaaaaaaccatctctaagcttgaatactctaattttagtattagatactaatagaagagaaaaattgtaacacactgaacaatagatactgtatgttcttaagactatgtatactagaataatagtagcagagtagggtgaaaaggaactttctgttctgaaagctaagcgactgtacgtgctactaaaaatgtctgacactgaaataattttactcaactatgttttcaacaagcaaaaatatagtattctaagattaaaatgtcattacaaaatatttagtgtgaacatttaatttaaacttgtctcatggaatctttaatttcaatgaacattacagcatatatatgttatttggcgagacatcaaataaagttaaccatttaaaaattaaaaaaaaaaaaaaa

SEQ ID NO: 1235 - protein, 99 aa, Homo sapiens
MSTAQSLKSVDYEVFGRVQGVCFRMYTEDEARKIGVVGWVKNTSKGTVTGQVQGPEDKVNSMKSWLSKVGSPSSRIDRTNFSNEKTISKLEYSNFSIRY

SEQ ID NO: 1236 - DNA, 2157 bp, Homo sapiens
cgatcctgccggagccccgccgccgccggcttggattctgaaaccttccttgtatccctcctgagacatctttgctgcaagatcgaggctgtcctctggtgagaaggtggtgaggcttcccgtcatattccagctctgaacagcaacatggggtgcaaagtcctgctcaacattgggcagcagatgctgcggcggaaggtggtggactgtagccgggaggagacgcggctgtctcgctgcctgaacacttttgatctggtggccctcggggtgggcagcacactgggtgctggtgtctacgtcctggctggagctgtggcccgtgagaatgcaggccctgccattgtcatctccttcctgatcgctgcgctggcctcagtgctggctggcctgtgctatggcgagtttggtgctcgggtccccaagacgggctcagcttacctctacagctatgtcaccgttggagagctctgggccttcatcaccggctggaacttaatcctctcctacatcatcggtacttcaagcgtagcgagggcctggagcgccaccttcgacgagctgataggcagacccatcggggagttctcacggacacacatgactctgaacgcccccggcgtgctggctgaaaaccccgacatattcgcagtgatcataattctcatcttgacaggacttttaactcttggtgtgaaagagtcggccatggtcaacaaaatattcacttgtattaacgtcctggtcctgggcttcataatggtgtcaggatttgtgaaaggatcggttaaaaactggcagctcacggaggaggattttgggaacacatcaggccgtctctgtttgaacaatgacacaaaagaagggaagcccggtgttggtggattcatgcccttcgggttctctggtgtcctgtcgggggcagcgacttgcttctatgccttcgtgggctttgactgcatcgccaccacaggtgaagaggtgaagaacccacagaaggccatccccgtggggatcgtggcgtccctcttgatctgcttcatcgcctactttggggtgtcggctgccctcacgctcatgatgccctacttctgcctggacaataacagccccctgcccgacgcctttaagcacgtgggctgggaaggtgccaagtacgcagtggccgtgggctccctctgcgctctttccgccagtcttctaggttccatgtttcccatgcctcgggttatctatgccatggctgaggatggactgctatttaaattcttagccaacgtcaatgataggaccaaaacaccaataatcgccacattagcctcgggtgccgttgctgctgtgatggccttcctctttgacctgaaggacttggtggacctcatgtccattggcactctcctggcttactcgttggtggctgcctgtgtgttggtcttacggtaccagccagagcagcctaacctggtataccagatggccagtacttccgacgagttagatccagcagaccaaaatgaattggcaagcaccaatgattcccagctggggtttttaccagaggcagagatgttctctttgaaaaccatactctcacccaaaaacatggagccttccaaaatctctgggctaattgtgaacatttcaaccagccttatagctgttctcatcatcaccttctgcattgtgaccgtgcttggaagggaggctctcaccaaaggggcgctgtgggcagtctttctgctcgcagggtctgccctcctctgtgccgtggtcacgggcgtcatctggaggcagcccgagagcaagaccaagctctcatttaaggttcccttcctgccagtgctccccatcctgagcatcttcgtgaacgtctatctcatgatgcagctggaccagggcacctgggtccggtttgctgtgtggatgctgataggcttcatcatctactttggctatggcctgtggcacagcgaggaggcgtccctggatgccgaccaagcaaggactcctgacggcaacttggaccagtgcaagtgacgcacagccccgccccccggaggtggcagcagccccgagggacgcccccagaggaccgggaggcaccccaccctccccaccagtgcaacagaaaccacctgcgtccacaccctcactgca

SEQ ID NO: 1237 - protein, 629 aa, Homo sapiens
MGCKVLLNIGQQMLRRKVVDCSREETRLSRCLNTFDLVALGVGSTLGAGVYVLAGAVARENAGPAIVISFLIAALASVLAGLCYGEFGARVPKTGSAYLYSYVTVGELWAFITGWNLILSYIIGTSSVARAWSATFDELIGRPIGEFSRTHMTLNAPGVLAENPDIFAVIIILILTGLLTLGVKESAMVNKIFTCINVLVLGFIMVSGFVKGSVKNWQLTEEDFGNTSGRLCLNNDTKEGKPGVGGFMPFGFSGVLSGAATCFYAFVGFDCIATTGEEVKNPQKAIPVGIVASLLICFIAYFGVSAALTLMMPYFCLDNNSPLPDAFKHVGWEGAKYAVAVGSLCALSASLLGSMFPMPRVIYAMAEDGLLFKFLANVNDRTKTPIIATLASGAVAAVMAFLFDLKDLVDLMSIGTLLAYSLVAACVLVLRYQPEQPNLVYQMASTSDELDPADQNELASTNDSQLGFLPEAEMFSLKTILSPKNMEPSKISGLIVNISTSLIAVLIITFCIVTVLGREALTKGALWAVFLLAGSALLCAVVTGVIWRQPESKTKLSFKVPFLPVLPILSIFVNVYLMMQLDQGTWVRFAVWMLIGFIIYFGYGLWHSEEASLDADQARTPDGNLDQCK

SEQ ID NO: 1238 - DNA, 3428 bp, Homo sapiens
cgcgcggccaggccctcttagccctctgccgtttggggggcacgggtgaacctgccgccccactcccaccccgccccgccccgcccgtacagacaaatcggaagggacgagcctgccctttgaaagggttttttttcttgctcctgcggagggcgccccagccatggccctcaggagctccctagaccccgcagggactgccctccatcccggccgccggggcccgccctctgcatcccgcgggcagcctgtgtgaagcggcctcccgcagcccccggcccctcccccatggaggaggaggagggggcggtggccaaggagtggggcacgacccccgcggggcccgtctggaccgcggtgttcgactacgaggcggcgggcgacgaggagctgaccctgcggaggggcgatcgcgtccaggtgctttcccaagactgtgcggtgtccggcgacgagggctggtggaccgggcagctccccagcggccgcgtgggcgtcttccccagcaactacgtggcccccggcgcccccgctgcacccgcgggcctccagctgccccaggagatccccttccacgagctgcagctagaggagatcatcggtgtggggggctttggcaaggtctatcgggccctgtggcgtggcgaggaggtggcagtcaaggccgcccggctggaccctgagaaggacccggcagtgacagcggagcaggtgtgccaggaagcccggctctttggagccctgcagcaccccaacataattgcccttaggggcgcctgcctcaaccccccacacctctgcctagtgatggagtatgcccggggtggtgcactgagcagggtgctggcaggtcgccgggtgccacctcacgtgctggtcaactgggctgtgcaggtggcccggggcatgaactacctacacaatgatgcccctgtgcccatcatccaccgggacctcaagtccatcaacatcctgatcctggaggccatcgagaaccacaacctcgcagacacggtgctcaagatcacggacttcggcctcgcccgcgagtggcacaagaccaccaagatgagcgctgcggggacctacgcctggatggcgccggaggttatccgtctctccctcttctccaaaagcagtgatgtctggagcttcggggtgctgctgtgggagctgctgacgggggaggtcccctaccgtgagatcgacgccttggccgtggcgtatggcgtggctatgaataagctgacgctgcccattccctccacgtgccccgagccctttgcccgcctcctggaggaatgctgggacccagacccccacgggcggccagatttcggtagcatcttgaagcggcttgaagtcatcgaacagtcagccctgttccagatgccactggagtccttccactcgctgcaggaagactggaagctggagattcagcacatgtttgatgaccttcggaccaaggagaaggagcttcggagccgtgaggaggagctgctgcgggcggcacaggagcagcgcttccaggaggagcagctgcggcggcgggagcaggagctggcagaacgtgagatggacatcgtggaacgggagctgcacctgctcatgtgccagctgagccaggagaagccccgggtccgcaagcgcaagggcaacttcaagcgcagccgcctgctcaagctgcgggaaggcggcagccacatcagcctgccctctggctttgagcataagatcacagtccaggcctctccaactctggataagcggaaaggatccgatggggccagcccccctgcaagccccagcatcatcccccggctgagggccattcgcctgactcccgtggactgtggtggcagcagcagtggcagcagcagtggaggaagtgggacatggagccgcggtgggcccccaaagaaggaagaactggtcgggggcaagaagaagggacgaacgtgggggcccagctccaccctgcagaaggagcgggtgggaggagaggagaggctgaaggggctgggggaaggaagcaaacagtggtcatcaagtgcccccaacctgggcaagtcccccaaacacacacccatcgcccctggcttcgccagcctcaatgagatggaggagttcgcggaggcagaggatggaggcagcagcgtgcccccttccccctactcgaccccgtcctacctctcagtgccactgcctgccgagccctccccgggggcgcgggcgccgtgggagccgacgccgtccgcgccccccgctcggtggggacacggcgcccggcggcgctgcgacctggcgctgctaggctgcgccacgctgctgggggctgtgggcctgggcgccgacgtggccgaggcgcgcgcggccgacggtgaggagcagcggcgctggctcgacggcctcttctttccccgcgccggccgcttcccgcggggcctcagcccacccgcgcgtccccacggccgccgcgaagacgtgggccccggcctgggcctggcgccctcggccaccctcgtgtcgctgtcgtccgtgtccgactgcaactccacgcgttcactgctgcgctctgacagtgacgaggccgcaccggccgcgccctccccaccaccctccccgcccgcgcccacacccacgccctcgcccagcaccaaccccctggtggacctggagctggagagcttcaagaaggacccccgccagtcgctcacgcccacccacgtcacggctgcatgcgctgtgagccgcgggcaccggcggacgccatcggatggggcgctggggcagcgggggccgcccgagcccgcgggccatggccctggccctcgtgaccttctggacttcccccgcctgcccgacccccaggccctgttcccagcccgccgccggccccctgagttcccaggccgccccaccaccctgacctttgccccgagacctcggccggctgccagtcgcccccgcttggacccctggaaactggtctccttcggccggacactcaccatctcgcctcccagcaggccagacactccggagagccctgggccccccagcgtgcagcccacactgctggacatggacatggaggggcagaaccaagacagcacagtgcccctgtgcggggcccacggctcccactaaggcctgcccaccaccgcccgcctgggcagccatgaatgtagcgccccaggccctgccccagcccgccatgccacaaggtgggggaggccctgggcaggatgttcactctatttattggggaaggagggaggggggggacacttaacttattcctttgtaccccagggggtggagccctgtgcccaccctgcactggggggagggtgggcagggatactcagggacagggcatcatgggggatttggcacaaaatggagcattaaaggtaacccct

SEQ ID NO: 1239 - protein, 954 aa, Homo sapiens
MEEEEGAVAKEWGTTPAGPVWTAVFDYEAAGDEELTLRRGDRVQVLSQDCAVSGDEGWWTGQLPSGRVGVFPSNYVAPGAPAAPAGLQLPQEIPFHELQLEEIIGVGGFGKVYRALWRGEEVAVKAARLDPEKDPAVTAEQVCQEARLFGALQHPNIIALRGACLNPPHLCLVMEYARGGALSRVLAGRRVPPHVLVNWAVQVARGMNYLHNDAPVPIIHRDLKSINILILEAIENHNLADTVLKITDFGLAREWHKTTKMSAAGTYAWMAPEVIRLSLFSKSSDVWSFGVLLWELLTGEVPYREIDALAVAYGVAMNKLTLPIPSTCPEPFARLLEECWDPDPHGRPDFGSILKRLEVIEQSALFQMPLESFHSLQEDWKLEIQHMFDDLRTKEKELRSREEELLRAAQEQRFQEEQLRRREQELAEREMDIVERELHLLMCQLSQEKPRVRKRKGNFKRSRLLKLREGGSHISLPSGFEHKITVQASPTLDKRKGSDGASPPASPSIIPRLRAIRLTPVDCGGSSSGSSSGGSGTWSRGGPPKKEELVGGKKKGRTWGPSSTLQKERVGGEERLKGLGEGSKQWSSSAPNLGKSPKHTPIAPGFASLNEMEEFAEAEDGGSSVPPSPYSTPSYLSVPLPAEPSPGARAPWEPTPSAPPARWGHGARRRCDLALLGCATLLGAVGLGADVAEARAADGEEQRRWLDGLFFPRAGRFPRGLSPPARPHGRREDVGPGLGLAPSATLVSLSSVSDCNSTRSLLRSDSDEAAPAAPSPPPSPPAPTPTPSPSTNPLVDLELESFKKDPRQSLTPTHVTAACAVSRGHRRTPSDGALGQRGPPEPAGHGPGPRDLLDFPRLPDPQALFPARRRPPEFPGRPTTLTFAPRPRPAASRPRLDPWKLVSFGRTLTISPPSRPDTPESPGPPSVQPTLLDMDMEGQNQDSTVPLCGAHGSH

SEQ ID NO: 1240 - DNA, 2320 bp, Homo sapiens
ggggggttttccctgctttgtgttttctgctcgtggacgcccagcctctgtggccctgtggcctgcaggtattgggagatccacagctaagacgccgggaccccctggaagcctagaaatgggaccattgacatttagggatgtggccatagaattctctctgaaggagtggcaatgcctggacactgcacagcggaatttatatagaaatgtgatgttagagaactacagaaacctggtcttcctgggtattactgtttctaagccagacctgatcacttgtctggagcaagggaaagaggcctggagtatgaagagacatgagatcatggtggccaaacccacagttatgtgttctcattttgcccgagacctttggccggagcagaatataaaagattctttccaaaaagtgacactgaaaagatatggaaaatgtagacatgaaaatttaccattaagaaaaggctgtgaaagtatggatgagtgtaagatgcacaaaggaggttgtaatggacttaaccaatgtctcacagctacccagagcaaaatatttcaatgtgataaatatgtaaaagtcgctcataaattttcaaattcaaacagacatgagataagacatactaaaaagaaacctttcaaatgtacaaaatgtggcaaatcatttggcatgatttcatgcctaactgaacatagcagaattcatactagagtaaatttctacaaatgtgaagaatgtggaaaagcctttaactggtcctcaacccttactaaacataagagaattcatacgggagagaaaccttacaaatgtgaagaatgtggtaaagcctttaaccagtcctcaaaccttattaaacataagaaaattcatactggagagaaaccctacaaatgtgaagaatgtggcaaagcttttaaccgattctcaactcttactacccataagataattcatactggagagaaaccctacaaatgtaaagaatgtggtaaagcttttaaccgatcttcaacccttactacccatagaaaaattcatactggagagaaaccttacaaatgtgaagaatgtggcaaagcctttaagcagtcctcaaaccttactacacataagataattcatactggagagaaaccctacaaatgtaaaaaatgtggaaaagcctttaaccagtctgcacaccttaccacacatgaggtaattcatactggagagaaaccctacaaatgtgaaaaatgtggaaaagcctttaatcatttctcacaccttactacacataagataattcatactggagagaaaccttacaaatgtaaagaatgtggtaaagcttttaaacactcttcaacccttactaaacataagataattcatactggagagaagccttacaaatctaaagaatgtgaaaaagcttttaaccaatcctcaaaacttactgaacataagaaaattcatactggagagaaaccctatgaatgtgaaaaatgtggcaaagcttttaaccagtcctcaaatcttactagacataagaaaagtcatacagaagagaaaccttacaaatgtgaagaatgtggcaaaggttttaaatggccctcaacccttactatccataagataattcatactggagagaaaccatacaaatgtgaagaatgtggcaaagcttttaaccaatcctcaaaacttaccaaacataagaaaattcatactggagagaaaccctacacatgtgaagaatgtggcaaagcctttaaccagtcctcaaaccttactaaacataagagaattcatactggagaaaaaccttacaaatgtgaagaatgtgacaaagcttttaaatggtcctcagtccttactaaacataagataattcataccggagaaaaattacaaatatgaaaattatggcaaagctttaatcaatttacaagtcttactaaacataagaaaatttatactggagagaaactactaacctgaaagatgtgacaataattttgacaacacctcagacttataaaagtaatcatactggtgagaaattctaaaaatgtgaagactatggcaaagtctttggttgtcacactttaggtaagataattcatattggaacaaactacaagtgcaaacaatgtggcaaaacttaatttatgctcacaccttactgcacagaaaagaatttttagttgagaaaaagtatacaaatataaagaatgtggaaaagccgttaatatctgctcacatcttactcagcatcagaaagtacttaataaaagcattataaatggaaaaaaaaaaaaaaaaaaaaaaaaa

SEQ ID NO: 1241 - protein, 595 aa, Homo sapiens
MGPLTFRDVAIEFSLKEWQCLDTAQRNLYRNVMLENYRNLVFLGITVSKPDLITCLEQGKEAWSMKRHEIMVAKPTVMCSHFARDLWPEQNIKDSFQKVTLKRYGKCRHENLPLRKGCESMDECKMHKGGCNGLNQCLTATQSKIFQCDKYVKVAHKFSNSNRHEIRHTKKKPFKCTKCGKSFGMISCLTEHSRIHTRVNFYKCEECGKAFNWSSTLTKHKRIHTGEKPYKCEECGKAFNQSSNLIKHKKIHTGEKPYKCEECGKAFNRFSTLTTHKIIHTGEKPYKCKECGKAFNRSSTLTTHRKIHTGEKPYKCEECGKAFKQSSNLTTHKIIHTGEKPYKCKKCGKAFNQSAHLTTHEVIHTGEKPYKCEKCGKAFNHFSHLTTHKIIHTGEKPYKCKECGKAFKHSSTLTKHKIIHTGEKPYKSKECEKAFNQSSKLTEHKKIHTGEKPYECEKCGKAFNQSSNLTRHKKSHTEEKPYKCEECGKGFKWPSTLTIHKIIHTGEKPYKCEECGKAFNQSSKLTKHKKIHTGEKPYTCEECGKAFNQSSNLTKHKRIHTGEKPYKCEECDKAFKWSSVLTKHKIIHTGEKLQI

SEQ ID NO: 1242 - DNA, 1758 bp, Homo sapiens
atgtcccagcaacacacactgccagtgaccctctcccctgccctcagtcaggagctcctcaagactgttcctcctccagtcaatacccatcaggagcaaatgaaacagccaactccactgcctcccccatgccagaaggtgcctgtcgagctcccagtggaggtcccatcaaagcaagaggaaaagcacatgactgctgtaaagggactgcctgagcaagaatgtgagcaacagcagaaggagccacaggagcaggagctgcagcaacagcactgggaacagcatgaggaatatcagaaagcagaaaacccagagcagcagcttaagcaggagaaaacacaaagggatcagcagctaaacaaacagctggaagaagagaagaagctcttagaccagcaactggatcaagagctagtcaagagagatgagcaactgggaatgaagaaagagcaactgttggagctcccagagcagcaggaggggcacctgaagcacctagagcagcaggagggacagctgaagcacccggagcagcaggaggggcagctggagctcccagagcagcaggaggggcagctggagctcccagagcagcaggaggggcagctggagctcccagagcagcaggaggggcagctggagctcccagagcagcaggaggggcagctggagctcccacagcagcaggaggggcagctggagctctctgagcagcaggaggggcagctggagctctctgagcagcaggaggggcagctggagctctctgagcagcaggagggacagctgaagcacctggagcaccaggaggggcagctggaggtcccagaggagcagatggggcagctgaagtacctggaacagcaggaggggcagctgaagcacctggatcagcaggagaagcagccagagctcccagagcagcagatggggcagctgaagcacctggagcagcaggaggggcagcctaagcatctggagcagcaggaggggcaactggagcagctggaggagcaggaggggcagctgaagcacctggagcagcaggaggggcagctggagcacctggagcaccaggaagggcagctggggctcccagagcagcaggtgctgcagctgaagcagctagagaagcagcaggggcagccaaagcacctggaggaggaggaggggcagctgaagcacctggtgcagcaggaggggcagctgaagcatctggtgcagcaggaggggcagctggagcagcaggagaggcaggtggagcacctggagcagcaggtggggcagctgaagcacctagaggagcaggagggacagctgaagcatctggagcagcagcaggggcagttggaggtcccagagcagcaggtggggcagccaaagaacctggagcaggaggagaagcaactggagctcccagagcagcaagagggccaggtgaagcacctggagaagcaggaggcacagctggagctcccagagcagcaggtaggacagccaaagcacctggaacagcaggaaaagcacctagagcacccagagcagcaggacggacaactaaaacatctggagcagcaggaggggcagctgaaggacctggagcagcagaaggggcagctggagcagcctgtgtttgccccagctccaggccaggtccaagacattcaaccagccctgcccacaaagggagaagtattgcttcctgtagagcaccagcagcagaagcaggaggtgcagtggccacccaaacataaataa

SEQ ID NO: 1243 - protein, 585 aa, Homo sapiens
MSQQHTLPVTLSPALSQELLKTVPPPVNTHQEQMKQPTPLPPPCQKVPVELPVEVPSKQEEKHMTAVKGLPEQECEQQQKEPQEQELQQQHWEQHEEYQKAENPEQQLKQEKTQRDQQLNKQLEEEKKLLDQQLDQELVKRDEQLGMKKEQLLELPEQQEGHLKHLEQQEGQLKHPEQQEGQLELPEQQEGQLELPEQQEGQLELPEQQEGQLELPEQQEGQLELPQQQEGQLELSEQQEGQLELSEQQEGQLELSEQQEGQLKHLEHQEGQLEVPEEQMGQLKYLEQQEGQLKHLDQQEKQPELPEQQMGQLKHLEQQEGQPKHLEQQEGQLEQLEEQEGQLKHLEQQEGQLEHLEHQEGQLGLPEQQVLQLKQLEKQQGQPKHLEEEEGQLKHLVQQEGQLKHLVQQEGQLEQQERQVEHLEQQVGQLKHLEEQEGQLKHLEQQQGQLEVPEQQVGQPKNLEQEEKQLELPEQQEGQVKHLEKQEAQLELPEQQVGQPKHLEQQEKHLEHPEQQDGQLKHLEQQEGQLKDLEQQKGQLEQPVFAPAPGQVQDIQPALPTKGEVLLPVEHQQQKQEVQWPPKHK

SEQ ID NO: 1244 - DNA, 716 bp, Homo sapiens
ttctttctttgctgcgtctactgcgagaatgaagactattctcagcaatcagactgtcgacattccagaaaatgtcgacattactctgaagggacgcacagttatcgtgaagggccccagaggaaccctgcggagggacttcaatcacatcaatgtagaactcagccttcttggaaagaaaaaaaagaggctccgggttgacaaatggtggggtaacagaaaggaactggctaccgttcggactatttgtagtcatgtacagaacatgatcaagggtgttacactgggcttccgttacaagatgaggtctgtgtatgctcacttccccatcaacgttgttatccaggagaatgggtctcttgttgaaatccgaaatttcttgggtgaaaaatacatccgcagggttcggatgagaccaggtgttgcttgttcagtatctcaagcccagaaagatgaattaatccttgaaggaaatgacattgagcttgtttcaaattcagcggctttgattcagcaagccacaacagttaaaaacaaggatatcaggaaatttttggatggtatctatgtctctgaaaaaggaactgttcagcaggctgatgaataagatctaagagttacctggctacagaaagaagatgccagatgacacttaagacctacttgtgatatttaaatgatgcaataaaagacctattgatttggaccttcttctt

SEQ ID NO: 1245 - protein, 192 aa, Homo sapiens [sequence omitted]

SEQ ID NO: 1246 - DNA, 783 bp, Homo sapiens
  misc_feature (2)..(3): n is a, c, g, or t
  misc_feature (128)..(128): n is a, c, g, or t
  misc_feature (296)..(296): n is a, c, g, or t
  misc_feature (303)..(303): n is a, c, g, or t
  misc_feature (312)..(312): n is a, c, g, or t
  misc_feature (344)..(344): n is a, c, g, or t
  misc_feature (364)..(364): n is a, c, g, or t
  misc_feature (371)..(371): n is a, c, g, or t
  misc_feature (401)..(403): n is a, c, g, or t
  misc_feature (405)..(405): n is a, c, g, or t
  misc_feature (411)..(411): n is a, c, g, or t
  misc_feature (413)..(413): n is a, c, g, or t
  misc_feature (437)..(437): n is a, c, g, or t
  misc_feature (471)..(476): n is a, c, g, or t
  misc_feature (480)..(481): n is a, c, g, or t
  misc_feature (487)..(487): n is a, c, g, or t
  misc_feature (504)..(504): n is a, c, g, or t
  misc_feature (508)..(509): n is a, c, g, or t
  misc_feature (514)..(525): n is a, c, g, or t
  misc_feature (529)..(560): n is a, c, g, or t
  misc_feature (563)..(572): n is a, c, g, or t
  misc_feature (575)..(577): n is a, c, g, or t
  misc_feature (593)..(603): n is a, c, g, or t
  misc_feature (607)..(781): n is a, c, g, or t
  misc_feature (783)..(783): n is a, c, g, or t
tnncggtgaggggggcgaggggggcatcgcttctcggccttttggctaagatcaagtgtagtatctgttcttatcagtttaatatctgatacgtcctctatccgaggacaatatattaaatggatttngggagcagggagatggaataggagcttgctccgtccactccacgcatcgacctggtattgcagtacctccaggaacggtgcaccccctccggggatacaacgtgtttcctaaaagtagagagaggtaagagacggtagcacctgcggggcggcttgcacgccgagtgnctgtgangcgcccggnttgacttaactgcttccctgaagtaccgtgangttcctgatgtgcgggcggnagacggnaggcttatgcggaagctttcggttccaccnnngnttcttngntttgggaaggcaacaccccccctnggggggggccctaggctccaaattggaggggggnnnnnngggnncctttnaaggatgggcccccccngggnnccccnnnnnnnnnnnncccnnnnnnnnnnnnnnnnnnnnnnnnnnnnnnnnttnnnnnnnnnnggnnnaggggggggggggggnnnnnnnnnnnaatnnnnnnnnnnnnnnnnnnnnnnnnnnnnnnnnnnnnnnnnnnnnnnnnnnnnnnnnnnnnnnnnnnnnnnnnnnnnnnnnnnnnnnnnnnnnnnnnnnnnnnnnnnnnnnnnnnnnnnnnnnnnnnnnnnnnnnnnnnnnnnnnnnnnnnnnnnnnnnnnnnnnnnnnnnnnnnncn

SEQ ID NO: 1247 - DNA, 2069 bp, Homo sapiens
ggcacgaggccggagccggccttcgggaggcgcggcccgggaggaggcctgggcctgcgggccgggagcagcaggggcggcccgcgggagggagcggaagtcccgggacgggcgcgggcagcggcgcgagcagggcgggcgagttccgcgctccctccccatggccgggagcgggccgcggcgacggcggcggcgctgacaggccccgggcggggcggggcaggcggcctggacgggggcctggggctgtgggaagatgaacgccctcctagagcagaaggagcagcaggagaggctgcgggaggccgcggccttaggggacattcgggaggtgcagaaactggtggagagcggggtggatgtgaactcccaaaatgaggtcaacggctggacttgtttacactgggcatgtaaacgaaaccatggtcaggtggtctcttacctgttaaaatcaggagctgacaaagaaattcttaccacaaaaggagaaatgccagtccagttaacatcaaggagagaaatcaggaagattatgggagtggaagaagaagatgatgatgatgatgatgatgacaacctcccccagctgaagaaggagtcagaactgccctttgttcccaactatttggccaacccagccttcccttttatctatacacccacagcagaggattcagcccagatgcagaatgggggcccctccacaccccctgcatcaccccctgcagatggctcacctccattgcttccccctggggaacctcccctgttagggacctttccccgggaccacacctctttggcactagttcagaatggtgatgtgtcggccccctctgccatactcagaacaccagaaagcacaaaaccgggtcctgtttgtcagccaccagtgagtcagagccgctccctgttttcttctgtcccgtccaagccaccaatgtctctggagcctcaaaatgggacgtatgcaggaccagcgccagcattccagccatttttcttcactggagcatttccatttaatatgcaagagctggtactcaaggtgagaattcagaacccatctcttcgagaaaatgatttcattgaaattgaactggaccgacaggagctcacctaccaagagttgctcagagtgtgttgctgtgagctgggtgttaatccagatcaagtggagaagatcagaaagttacccaatactctgttaaggaaggacaaggatgttgctcgactccaagatttccaggagctggaactggttctgatgataagtgaaaataattttctgttcagaaatgctgcatccacactgactgaaaggccttgctataacaggagagcttcaaaactgacttactaatgcagcagggacttttatcactgagtattatgacagtgtgcatcacctctgggccaaggacaagccattgatctaaatgcctcagatgcccgggagggcctctggtgccactgcatagtatatactaacatcattctgccaaggtaggaagcccctgacccccaagcagtggtgccactcttccaagcctcttggtgcacagtaaacctattgcttgaagctttgaacagctgagaagtggtctggagaggcagaagctgaaggttctatatccagtgtgttttatgtccagaatgtaagagagttgtctaagcagcagctgagagagagcggagcctatttctagccactcctgttgacagtgcacctgaagggctgggatgcgtttttcttggtgttgcatgctcacaactctgctgacattgggaacttatgagagaggaagactcgggaaagcacagatactggacagatggattctggtgtggggaaagcacagatactggacagatggattctagtgtgacttgtgactgtgaggtttcctataacatatttataaatgttactcaggttaaaagtatttaagaatacagttaactaattgtaaatatgctgttaaccaaaagagctttccctccctcactttttcctttgtaaacactcatgactgctaaaaaaaaaaaaaaaaaaaaaaaaaaaaaaa

SEQ ID NO: 1248 - protein, 368 aa, Homo sapiens
MNALLEQKEQQERLREAAALGDIREVQKLVESGVDVNSQNEVNGWTCLHWACKRNHGQVVSYLLKSGADKEILTTKGEMPVQLTSRREIRKIMGVEEEDDDDDDDDNLPQLKKESELPFVPNYLANPAFPFIYTPTAEDSAQMQNGGPSTPPASPPADGSPPLLPPGEPPLLGTFPRDHTSLALVQNGDVSAPSAILRTPESTKPGPVCQPPVSQSRSLFSSVPSKPPMSLEPQNGTYAGPAPAFQPFFFTGAFPFNMQELVLKVRIQNPSLRENDFIEIELDRQELTYQELLRVCCCELGVNPDQVEKIRKLPNTLLRKDKDVARLQDFQELELVLMISENNFLFRNAASTLTERPCYNRRASKLTY

SEQ ID NO: 1249 - DNA, 582 bp, Homo sapiens
cagcttgacctgcggcagtgcagcccttgggacttccctcgccttccacctcctgctcgtctgcttcacaagctatcgctatggtgttcgtgcgcaggccgtggcccgccttgaccacagtgcttctggccctgctcgtctgcctaggggcgctggtcgacgcctaccccatcaaacccgaggctcccggcgaagacgcctcgccggaggagctgaaccgctactacgcctccctgcgccactacctcaacctggtcacccggcagcggtatgggaaaagagacggcccggacaggcttctttccaaaacgttcttccccgacggcgaggaccgccccgtcaggtcgcggtcggagggcccagacctgtggtgaggacccctgaggcctcctgggagatctgccaaccacgcccacgtcatttgcatacgcactcccgaccccagaaacccggattctgcctcccgacggcggcgtctgggcagggttcgggtgcggccctccgcccgcgtctcggtgcccccgccccctgggctggagggctgtgtgtggtccttccctggtcccaaaataaagagcaaat

SEQ ID NO: 1250 - protein, 97 aa, Homo sapiens
MVFVRRPWPALTTVLLALLVCLGALVDAYPIKPEAPGEDASPEELNRYYASLRHYLNLVTRQRYGKRDGPDRLLSKTFFPDGEDRPVRSRSEGPDLW

SEQ ID NO: 1251 - DNA, 1103 bp, Homo sapiens
gagtctcgtggagagattgaagatggcggcttctcaggcggtggaggaaatgcggagccgcgtggttctgggggagtttggggttcgcaatgtccatactactgactttcccggtaactattccggttatgatgatgcctgggaccaggaccgcttcgagaagaatttccgtgtggatgtagtacacatggatgaaaactcactggagtttgacatggtgggaattgacgcagccattgccaatgcttttcgacgaattctgctagctgaggtgccaactatggctgtggagaaggtcctggtgtacaataatacatccattgttcaggatgagattcttgctcaccgtctggggctcattcccattcatgctgatccccgtctttttgagtatcggaaccaaggagatgaagaaggcacggagatagatactctacagtttcgtctccaggtcagatgcactcggaacccccatgctgctaaagattcctctgaccccaacgaactgtacgtgaaccacaaagtgtataccaggcatatgacatggatccccctggggaaccaggctgatctctttccagagggcactatccgaccagtgcatgatgatatcctcatcgctcagctgcggcctggccaagaaattgacctgctcatgcactgtgtcaagggcattggcaaagatcatgccaagttttcaccagtggcaacagccagttacaggctcctgccagacatcaccctgcttgagcccgtggaaggggaggcagctgaggagttgagcaggtgcttctcacctggtgttattgaggtgcaggaagtccaaggtaaaaaggtggccagagttgccaacccccggctggataccttcagcagagaaatcttccggaatgagaagctaaagaaggttgtgaggcttgcccgggttcgagatcattatatctgtaagaaagatttgctggctgcggtggctcacacctgtaatcccagcactttgggaggccaaggcgagtggatcacggggtcaagagagcgagaccatcctggctaacatggtgaaaccccgtctctataaaaaaaaaaaaaaaaaaaaaaaaaaaaaa

SEQ ID NO: 1252 - protein, 342 aa, Homo sapiens
MAASQAVEEMRSRVVLGEFGVRNVHTTDFPGNYSGYDDAWDQDRFEKNFRVDVVHMDENSLEFDMVGIDAAIANAFRRILLAEVPTMAVEKVLVYNNTSIVQDEILAHRLGLIPIHADPRLFEYRNQGDEEGTEIDTLQFRLQVRCTRNPHAAKDSSDPNELYVNHKVYTRHMTWIPLGNQADLFPEGTIRPVHDDILIAQLRPGQEIDLLMHCVKGIGKDHAKFSPVATASYRLLPDITLLEPVEGEAAEELSRCFSPGVIEVQEVQGKKVARVANPRLDTFSREIFRNEKLKKVVRLARVRDHYICKKDLLAAVAHTCNPSTLGGQGEWITGSRERDHPG

SEQ ID NO: 1253 - DNA, 1470 bp, Homo sapiens
gctcgggcgaggtaggagcgatgtggcctgggaacgcctggcgcgccgcactcttctgggtgccccgcggccgccgcgcacagtcagcgctggcccagctgcgtggcattctggagggggagctggaaggcatccgcggagctggcacttggaagagtgagcgggtcatcacgtcccgtcaggggccgcacatccgcgtggacggcgtctccggaggaatccttaacttctgtgccaacaactacctgggcctgagcagccaccctgaggtgatccaggcaggtctgcaggctctggaggagtttggagctggcctcagctcggtccgctttatctgtggaacccagagcatccacaagaatctagaagcaaaaatagcccgcttccaccagcgggaggatgccatcctctatcccagctgttatgacgccaacgccggcctctttgaggccctgctgaccccagaggacgcagtcctgtcggacgagctgaaccatgcctccatcatcgacggcatccggctgtgcaaggcccacaagtaccgctatcgccacctggacatggccgacctagaagccaagctgcaggaggcccagaagcatcggctgcgcctggtggccactgatggggccttttccatggatggcgacatcgcacccctgcaggagatctgctgcctcgcctctagatatggtgccctggtcttcatggatgaatgccatgccactggcttcctggggcccacaggacggggcacagatgagctgctgggtgtgatggaccaggtcaccatcatcaactccaccctggggaaggccctgggtggagcatcagggggctacacgacagggcctgggcccctggtgtccctgctgcggcagcgcgcccggccatacctcttctccaacagtctgccacctgctgtcgttggctgcgcctccaaggccctagatctgctgatggggagtaacaccattgtccagtctatggctgccaagacccagaggttccgtagtaagatggaagctgctggcttcactatctcgggagccagtcaccccatctgccctgtgatgctgggtgatgcccggctggcctctcgcatggcggatgacatgctgaagagaggcatctttgtcatcgggttcagctaccccgtggtccccaagggcaaggcccggatccgggtacagatctcagcagtgcatagcgaggaagacattgaccgctgcgtggaggccttcgtggaagtggggcgactgcacggggcactgccctgagctctgggtaaggacgagaagagccaaggtccgcctactgccacagggtcaaaggaggttttcgatcagcccagaccagaggctctgagccctgaaccaaagtcccagagctgggctgggacgtgacctgtgctgagggctgtgagaatgtgaaacaacagtgtgaaaattggctgtgaaaaaaaaaaaa

SEQ ID NO: 1254 - protein, 419 aa, Homo sapiens
MWPGNAWRAALFWVPRGRRAQSALAQLRGILEGELEGIRGAGTWKSERVITSRQGPHIRVDGVSGGILNFCANNYLGLSSHPEVIQAGLQALEEFGAGLSSVRFICGTQSIHKNLEAKIARFHQREDAILYPSCYDANAGLFEALLTPEDAVLSDELNHASIIDGIRLCKAHKYRYRHLDMADLEAKLQEAQKHRLRLVATDGAFSMDGDIAPLQEICCLASRYGALVFMDECHATGFLGPTGRGTDELLGVMDQVTIINSTLGKALGGASGGYTTGPGPLVSLLRQRARPYLFSNSLPPAVVGCASKALDLLMGSNTIVQSMAAKTQRFRSKMEAAGFTISGASHPICPVMLGDARLASRMADDMLKRGIFVIGFSYPVVPKGKARIRVQISAVHSEEDIDRCVEAFVEVGRLHGALP

SEQ ID NO: 1255 - DNA, 2847 bp, Homo sapiens
ttgggggttgggagaaaggtggcggtgctttcggagggaataaaatggaaggagaatcaagcagatttgaaatccacactccagtttctgacaagaaaaagaaaaagtgttctatacataaggaaagacctcagaaacattcccacgaaattttcagagactcctccctggtgaatgaacagtctcaaataactaggaggaaaaagaggaaaaaagatttccagcatctcatttcttctcctttgaaaaaatccagaatctgtgatgagactgcaaatgccacttccacactcaaaaagagaaaaaagagaagatatagtgctttggaggtggacgaggaagcaggtgttacagttgtccttgtggataaagaaaatattaacaacacaccaaagcattttagaaaggatgttgatgttgtttgtgttgatatgagcatagaacagaagttaccaagaaagcctaaaacagacaaatttcaggtacttgctaagtcacatgcacataaatcagaagccctgcacagtaaagttagggagaaaaagaataaaaagcatcagaggaaagctgcatcctgggagagccagcgggcaagggacaccctgcctcagtcagaatcccaccaggaggagtcctggctttctgtgggtccagggggtgaaattacagaactaccagcatctgctcataaaaacaagtctaagaaaaaaaagaaaaagtccagtaaccgggaatatgagacactggccatgcctgaaggatcgcaagcaggcagagaggccgggactgatatgcaggaatcccagcctactgtgggcttggatgatgaaactccacaactactaggacctactcacaaaaaaaagtctaagaaaaaaaagaagaaaaagtccaatcaccaggaatttgaggcattggccatgcctgaaggatcacaagtgggcagtgaggttggggctgatatgcaggaatcccggcctgctgtgggcctgcatggtgaaactgcaggaataccagcacctgcttataaaaacaagtctaagaaaaaaaagaaaaagtccaatcaccaggaatttgaggcagtggccatgcctgagagcctcgagagtgcataccctgaaggatcacaggtgggcagtgaggttgggactgtggaaggcagtacagctcttaaagggttcaaggaatccaacagtacaaagaagaagtctaagaaaaggaagcttacgtctgtcaaaagggcacgagtgtctggtgatgatttttcagtgcccagtaagaactctgagagcacactctttgattcagtagaaggtgatggcgccatgatggaagaaggtgtgaaatctaggccccgacaaaagaaaacccaggcctgtttggcaagcaagcacgtgcaagaggcgccaaggttagaacctgcaaatgaagaacacaatgtggaaacagctgaagattccgaaataagatacttatctgcagattcaggagatgccgatgattcagatgcggatttgggttctgccgtgaaacagcttcaggagttcattcctaacatcaaggacagggccaccagcacaatcaagcggatgtaccgggacgacttggaacggtttaaggaatttaaagcacaaggtgtcgctattaaatttggcaagttttctgtaaaggaaaataagcagttagagaaaaatgtggaagactttctagccctgacaggcattgagagtgcagacaagctcctgtacacggacagatatcctgaggaaaaatctgtgatcaccaacttaaaaaggagatactcgtttagattacacattggtaggaacattgcccggccctggaaacttatatactatcgagcaaagaagatgttcgatgtcaacaattacaaaggcaggtatagcgaaggagatactgagaagttaaagatgtaccattctctccttgggaatgactggaagacgattggtgagatggtggcccgacgtagcctctccgtggccctcaagttctcacagatcagcagtcaaagaaatcgtggtgcttggagtaagtctgaaacccggaaactaatcaaggctgtcgaagaagtgattctgaagaagatgtctccccaggagttaaaagaggtggattccaaactccaagaaaatcctgaaagttgcctatcaattgttcgggaaaaactctacaagggcatatcttgggtagaagtagaagctaaagtgcaaaccagaaattggatgcagtgtaaaagtaagtggacagaaattctaaccaagaggatgactaatggtcggcgtatatactatggcatgaatgccctgcgggccaaggtcagccttattgaaaggttgtatgaaataaatgtggaagatactaatgaaatagactgggaagatcttgctagtgccataggtgatgttcctccatcttacgttcaaactaaattttctaggctgaaagctgtctatgttccattttggcagaaaaagacttttccagagatcatcgactacctttatgagacgactctacctttgctgaaggaaaagttagaaaaaatgatggagaaaaaaggcactaaaatccagactcctgcagcacccaagcaagttttcccatttcgagacatcttttattatgaagacgatagtgaaggaggaggacatagaaaaagaaagcgaaggggaattccgtaaagcctagaatcaaaagaaaacaaaacccatagtcaagccacagacaagcccagaataatatggccaggggatcaatccgattagccgactggcccagatccagcaggcaaaaaaggagaaggagccagagtacacgctcctc

SEQ ID NO: 1256 - protein, 886 aa, Homo sapiens [sequence omitted]

SEQ ID NO: 1257 - DNA, 4163 bp, Homo sapiens
gcaccgcggctgaggagcgggaggccgtccgggcagcgcggccggcggcgagaggggccccgccgctctccggaggcagaagttgtggatcggccggcgggggcgagcgggcccgggggccggggccgcgctgcccgggccgcgaggacgaggcggcgccgccgggctgtggaggcagcagcccagacgcggcacagagagggcctgggagcttgctgcagcttcagacagggagccaggatgggaaccacggactgacctgacctgcgtcctcggggccactgcactgggtgattcacgtgtgcccaggccctgaggtgggccggacctgggagtggcagccacacccactcgcccgggtctatggccacggtcggagagtggtcctgtgtgcgctgcaccttcctgaacccggccggccagcgccagtgctccatctgcgaggctccccggcacaagcccgacctcaaccacatcctgcggctcagcgtggaggagcagaaatggccctgcgcccgctgcaccttccgcaacttcctgggcaaggaggcctgcgaggtgtgcggcttcaccccggagcctgcgcctggggctgccttcctgccagtcctcaacggggtcctccccaagccacccgccatcctgggggagcccaagggcagctgccaggaggaagcaggtccagtgaggactgcggggctggtggccacggagcccgccagggggcagtgcgaggacaaggacgaggaggagaaggaggagcaggaggaggaggagggagcggcggagcccagagggggctgggcgtgtccgcgttgcacgctgcacaacacgcccgtggccagctcctgctccgtctgcgggggcccacgcaggctctcgctgccacggatccctcctgaggccctggtggtcccggaagtggtggccccggccggcttccacgtcgtgcctgccgcgcctccacctggcctccccggggaaggtgccgaggccaaccccccagccaccagccagggcccagctgccgaaccagagccgcccagggtcccgcccttcagccccttctcgtccaccctgcagaacaaccccgtgccgcgcagccgacgcgaggttcccccccagctgcagccaccggtgcctgaggctgcccagccgtcaccctctgccggctgcaggggagccccccagggctcgggctgggctggggcctcccgcctagcagagttgctgtctggcaagcggctgagtgtgctggaggaagaggccacggagggtggcaccagccgcgtagaggccggcagctccacctcgggcagtgacatcattgacctggccggagacaccgtgcgttacacgcccgccagcccctccagccccgacttcaccacctggtcatgtgccaagtgcacgctcagaaaccccacagtggcccccaggtgctcggcctgcggctgctccaaactgcacggcttccaggagcatggcgagccccccacccactgccccgactgtggggccgacaagcccagcccctgcggcagaagctgcggacgggtgtcctcggcccagaaggccgcccgcgtcctgcccgagcgcccgggccagtgggcctgccctgcctgtaccctgctcaacgcactgcgggccaagcactgcgccgcctgccacacgcctcagctcctggtggcccagcggcggggggccgcgcccctgaggcgcagggagagcatgcacgtggagcagcggcggcagacagacgagggcgaggccaaggcactctgggagaacatcgtggccttctgccgggagaacaatgtgagcttcgtggatgacagcttccctcccgggcccgagtctgtcggcttccccgcgggtgacagcgtgcagcagcgtgtgaggcagtggctgcgaccccaggagatcaactgctccgtcttcagggaccacagggccacgtggtctgtgttccacacactgcggccctcagacatcctgcaggggctgctggggaactgctggttcctgagcgccctggcggtgctggcggagcggccggacctggtggagcgggtgatggtcacgcgcagcctgtgtgcagagggcgcctaccaggtgcggctgtgcaaggacggcacgtggaccacggtgctggtggacgacatgctgccctgtgatgaggccggctgcctcctcttctcacaggcgcagcggaagcagctgtgggtggccctcatcgagaaggcgctggccaagctgcacggctcctactttgcgctccaggcgggccgcgccatcgaaggcctggccacgctcaccggcgccccctgtgagagcctggcgctgcagctcagctccactaacccccgcgaggagcccgttgacactgacctcatctgggccaaaatgctgagttctaaggaggctgggttcctcatgggtgcctcctgtggcgggggcaacatgaaggtggacgattcggcctacgagagcctgggcctgcgcccccggcatgcctactccatcctggatgtccgagatgtccagggcaccaggcttctgcggctccgaaacccgtggggccgtttctcctggaacggcagctggtccgacgagtggccacactggccggggcacctgcgtggcgagctcatgccgcacggcagcagtgagggtgtcttctggatggagtacggcgactttgtcaggtacttcgactccgtggacatctgtaaggtgcactcggactggcaggaggcgcgggtgcagggctgctttcccagctcggccagcgcgcccgtgggggtaacagcgctcacggtgctggagcgggcctcgctggagttcgcgctcttccaggagggcagcaggcgctcggacgccgtggacagccacctgctggacctgtgcatcctggtgttccgggccacgttcggcagcggcggccacctcagcctgggccgcctcctggcccacagtaagcgcgcggtcaagaagttcgtcagctgcgacgtcatgctggagcctggcgagtacgctgtggtgtgctgcgccttcaaccactgggggccgcccctgccgggcacccctgccccccaggcctccagcccctcggcaggggtcccgagagcctccccagagccgccgggccacgtgctggctgtgtacagctcgaggctggtcatggtggagcccgtggaagcccagccgaccacgctggccgacgccatcatcctgctcaccgagagccgcggagagcggcacgagggccgtgagggcatgacctgctactacctgacacacggttgggcggggctcatcgtggtggtggagaaccgacaccccaaggcctacctgcacgtgcagtgtgactgcaccgacagcttcaacgtggtgtccacacgcggcagcctgcgtacccaggatagcgtgccacccctgcacaggcaggtcctggtgatcttgtcccagctagagggcaacgccggcttctctatcacccaccgcctggcacatcgcaaggcagcccaggccttcctcagtgactggacagcctccaaggggacccacagccccccactcacgccagaggtcgccggtctgcatgggccccgaccgctgtgaccaccatgcctggggcaggggctgtgcacagacggaccccccacccccacacgcactttatgagggagaccccgacagaggacgcttgagccagaatctcaggaccccgcccagggagctgccagcccagggctcagcttcccatgggccccccgcccccctccttcccctccctgaaccccacagtccgcctggccagacctcctggccgccacgcagaatacctcgaaccaggcgggctgtgaaccagccccgctcacctgccagccccaacacccgacgggggccgaggccaggctgcccctccctgtgggctcagggtctcctgcgggctaggcagccaggagctctgtccgcaaaaccaaatctgggtgtcagaggccaagaccctggggtgggatcagggaccacccctcacggggcataaggtcagttttcccccagagcccgggtccctgtcccccacagggcaggcggggtccctggagccctggtgtggagcggcgagtcccggggcggtgcctgtctcagaagaaggg

SEQ ID NO: 1258 - protein, 1086 aa, Homo sapiens
MATVGEWSCVRCTFLNPAGQRQCSICEAPRHKPDLNHILRLSVEEQKWPCARCTFRNFLGKEACEVCGFTPEPAPGAAFLPVLNGVLPKPPAILGEPKGSCQEEAGPVRTAGLVATEPARGQCEDKDEEEKEEQEEEEGAAEPRGGWACPRCTLHNTPVASSCSVCGGPRRLSLPRIPPEALVVPEVVAPAGFHVVPAAPPPGLPGEGAEANPPATSQGPAAEPEPPRVPPFSPFSSTLQNNPVPRSRREVPPQLQPPVPEAAQPSPSAGCRGAPQGSGWAGASRLAELLSGKRLSVLEEEATEGGTSRVEAGSSTSGSDIIDLAGDTVRYTPASPSSPDFTTWSCAKCTLRNPTVAPRCSACGCSKLHGFQEHGEPPTHCPDCGADKPSPCGRSCGRVSSAQKAARVLPERPGQWACPACTLLNALRAKHCAACHTPQLLVAQRRGAAPLRRRESMHVEQRRQTDEGEAKALWENIVAFCRENNVSFVDDSFPPGPESVGFPAGDSVQQRVRQWLRPQEINCSVFRDHRATWSVFHTLRPSDILQGLLGNCWFLSALAVLAERPDLVERVMVTRSLCAEGAYQVRLCKDGTWTTVLVDDMLPCDEAGCLLFSQAQRKQLWVALIEKALAKLHGSYFALQAGRAIEGLATLTGAPCESLALQLSSTNPREEPVDTDLIWAKMLSSKEAGFLMGASCGGGNMKVDDSAYESLGLRPRHAYSILDVRDVQGTRLLRLRNPWGRFSWNGSWSDEWPHWPGHLRGELMPHGSSEGVFWMEYGDFVRYFDSVDICKVHSDWQEARVQGCFPSSASAPVGVTALTVLERASLEFALFQEGSRRSDAVDSHLLDLCILVFRATFGSGGHLSLGRLLAHSKRAVKKFVSCDVMLEPGEYAVVCCAFNHWGPPLPGTPAPQASSPSAGVPRASPEPPGHVLAVYSSRLVMVEPVEAQPTTLADAIILLTESRGERHEGREGMTCYYLTHGWAGLIVVVENRHPKAYLHVQCDCTDSFNVVSTRGSLRTQDSVPPLHRQVLVILSQLEGNAGFSITHRLAHRKAAQAFLSDWTASKGTHSPPLTPEVAGLHGPRPL

SEQ ID NO: 1259 - DNA, 5507 bp, Homo sapiens
ggccaggttatcaggggcttcactgtgaaacctgcaaagagggcttttacctaaattacacttctgggctctgtcagccatgtgactgtagtccacatggagctctcagcataccgtgcaacagttctgggaaatgccagtgcaaagtgggtgtcattggctctatatgtgaccgatgccaagatggatattatggctttagtaagaatggctgcttgccctgccaatgcaataatcggtctgccagttgcgatgccctcacaggtgcttgtttaaactgccaggaaaatagcaaaggaaatcactgtgaagaatgtaaagaaggattttatcagagtcctgatgccactaaagaatgtcttcgctgcccttgttcagcagtgacatctacaggcagctgctctataaaatcgagtgaattggaacctgaatgtgaccagtgtaaagatggttacataggcccgaactgcaataaatgtgaaaatggctattacaattttgacagcatctgtagaaagtgccaatgtcacggccatgtggacccagttaaaactccaaagatttgtaagcccgagagtggtgagtgcatcaactgcctccataacaccactgggttttggtgtgagaactgcctagaaggttatgttcacgacctcgagggaaattgcatcaagaaagaagttattcttccaacacctgaaggttctaccattttggtttccaatgcctctttgaccacatcagtgcccacccctgttataaatagtacttttacccctacaaccctgcagactatcttttcagtaagcacttctgaaaacagcacttcagctttagctgatgtatcatggacccaatttaacatcatcattttgacagtcatcatcattgttgtggtgctgctaatgggatttgtgggggctgtatatatgtaccgcgagtaccaaaaccggaaactcaatgcccccttttggaccatcgagctgaaagaagacaatatcagtttcagcagctaccatgacagcattcccaatgcagatgtttcgggattgttggaagatgatggcaatgaagtggctcccaatgggcagctgaccctgacgacgcccatacataactacaaagcctaaggagctagaactgttctgaattgttaaaccacagtgcttgctaagacagagtcagcccctgggccagacaaagcctggctagagtttgctgagaaagcaaaggcaaatagtgcatctgaaattttcaggtacaaatttgtaatgcgcttagcctatctattgctcttagttttcccatgaagatctgaagcgttcactgtcattaggacttgaagtaaagtatatttttgtaccaaaccacatgggagtatggaaaggctgaaccccatagtgcagcccaaaaccactttgacctccagatagactcctggggaagcattcaccaagccagtggtaacaagatgatgaatgtggagggggaaaagactgctggaagacttcatctccattcctgaaacattttttttaaaacagtgtcagggattatattcgttttactatacaaaaggacatcattgaggaaaagcttgtttctaggctgtatcacagtaaataatcttgattgtttctagaacaggggtagaaaagtcccaagatcttcagaagggcttggttttttcctcccaggattcttgctcagtgatgagttgaaagcacaggataagcttctaagggaggaaggcagcattggggagcaggaggctgatggtcctcctcagggtctcagtgtaaatgataaattgtctaaaaataaggaatattcctgcctctagagaaataaggtgtacatagttaatgtagcatatctggtcgacgttgtatttgtatctatttgtaaaaaaaaaatcatgtcatattttatcatctggaatttatttgtacagcagttaatggtgttgtaaaaagaaaaatatggggattgcttaaaatactgtaaaatagatggcaatattgctagagctgggactctggtgagcatccgtcatttttagtccttcttgaggacattgctgaaatttataagaggtcgaatgtttctttctttcctttctcagtctaaaagtagagttatatgctctttgacttactatgattcaagcaatagattttgaagtcagtaatcgttaagctgggacataggatgcattctccaaaaacattaatctaattagacattagccaccctatatattttacatagattaatataaaacatatcctcattaaaaaatgtttttcttgaatgtaaaagatagtcttccaaaggatagaaatattttagttccaagagaaaagccatcatattacttgggatctgtagttttcatgcctatgaaatatttataatcctccctcaccccaaataaaaaatctcctacatgtgaacatagcctgtcactcatttgccatgaggtatgtgccatctccctgcagtgctatagttctcccattgtcttcctgtctggttaatgagcagctttgtagatgggtgtgtctagttagttcttgctttttgatggagttttttcctagaggccaactactgttgctctcgtttattatgatattgacattttgggttaagcaaggtgggtgggaaaggtggtcagatgttaaatataacttattaggaggaacagtgaactgtgaagtggttagaaaaaaaataaaaacttcttattagattagacctaggaaattcaagctgacccctttgcctaacttccctagagaaaaacctagaacttggtcatccctttataggagacccctaagttgttctcagggtttggagatgatgttctggagggagtacaagcaaataatctacttctggtaatctgagggtgctttgcgtatttggccattgctcagaagaatagaggttacattatattacattatatgaaaattatttagtttttctatagccctttgtagtttgcaaagcacttttccatatgtgtgtcctctcttccacaccatagccccctgaggaagtaattgttgtccccattttatagatgaaaaggctgaggcacagaggagctaaatatcttgttcaaggctatacaatgtgtgtgattattaggcttggaatcagggcctctaactctaaagcacatgttttttcaactatatgcagaaattgcctagccatggacacaagaaagctgggaggaagagttctacttgtggatgtttttaattttttttaaatatcaggagcaatccagggccatacagctatgaagcacttagtgaaaagaacacaagaagatttactaactgaagttagtattagtgattagaaaacaaaactgccagtttgtgcttcattaaggtgaactcatctctccaagcaggaagggaaaatttgctttccctagcagttgctgcatatgtgtgtacagactgcacaattctaagaaattgtgcaaaatggcatacctgtctttctcccagatacaccgccccctgccccccccaaaaaaggtcaggattaaaggtggtgagaagtgaacatttattaaacagaagttaaaccaatagagagaaaggaggtttgttggagtctaagaggattttgaccatgtagaaattccttgaaacagaccttaaaaggtattgaaaaattgaatcacaaagaaagtttacctttaaatacttgttaatggctcctagatcatggttataatttttctcaatgggaaaaaaagtcttaaaatttgttttaaataagatcctctaatgtctcgagctttttgattctggaaataatttgctttaaaatataaatcaatcagaaagtgatctaccactgaaatcattctaggaaactagcatgggatgcactgcacaatgttctttcctctaaaggcatgggccccataaactgtggcatctggcagcaggatgccatcagtcctttagaaagcctaattttgggccgggtgcggtggctcacgcctgtaatcccagcactttgggaggccgaggcgggtggatcacaaggtcaggagttcgagaccagcctggtcaacatggcgaaatcccgtctctactaaaaacacaaaaattagccgggtgtacgtgcctgtggtctcagctgcttgggaggctgaggcaggagaatcgcttgaacctgggaggcggaggttacagtgggccgagatggcgccatttcactccagcctgggcgacagagcaagactctgtctcaaaaaaaaggaagaaaaagaaagcctaatattgggagaatgtttgtgtaaggattggaaatctgtttatttttaaataagatagcactgatgtgaatcttgtttggaaattacagatactgccattaagcgatgcttttatcttcattaattcattttggtaagcgcctatgcatttctgatggttaggtgccctaggtagtgttaagtatgtccgtgtcctcccttactcccctctcgctccctctaccctctatcccctagggttcttttattaatggaatttctccagttatagagaaaaaaatgacatttgaaaactaaagctcatttatattaatactaaggtcctgtgggcctagtgcgttactcttcccagtgatacctagattttaagagtagagaacagaggaaacatgggatgagaggagagaggttttttagacaacatttgtagacacctcaaattatatcactgttctctagcgccaatattcccaggtaaattgaccattaaagcaatactcactgacctactagtttattttggtcagctgagtaccatcaggatatttaaccctttaagtgctgttttgggagtagaaaactaaagcaacaatacttcctcttgacagctttgattggaatggggttattagatcattcaccttggtcctacactttttaggatgcttggtgaacataacaccacttataatgaacatccctggttcctatattttgggctatgtgggtaggaattgttacttgttgctgcagcagcagccctagaaagtaagcccagggcttcagatctaagttagtccaaaagctaaatgatttaaagtcaagttgtaatgctaggcataagcactctataatacattaaattataggccgagcaattagggaatgtttctgaaacattaaacttgtatttatgtcactaaaattctaacacaaacttaaaaaatgtgtctcatacatatgctgtactaggcttcatcatgcatttctaaatttgtgtatgatttgaatatatgaaagaatttatacaagagtgttatttaaaattattaaaaataaatgtatataatttgtacctattgtagatttgttgtttacttttttgtgtggtcagagttgtttcatgtcttcaaatacatgccaaggatcatttactttcagcccacttcataaaaatctttgaactctt

SEQ ID NO: 1260 - protein, 375 aa, Homo sapiens
PGYQGLHCETCKEGFYLNYTSGLCQPCDCSPHGALSIPCNSSGKCQCKVGVIGSICDRCQDGYYGFSKNGCLPCQCNNRSASCDALTGACLNCQENSKGNHCEECKEGFYQSPDATKECLRCPCSAVTSTGSCSIKSSELEPECDQCKDGYIGPNCNKCENGYYNFDSICRKCQCHGHVDPVKTPKICKPESGECINCLHNTTGFWCENCLEGYVHDLEGNCIKKEVILPTPEGSTILVSNASLTTSVPTPVINSTFTPTTLQTIFSVSTSENSTSALADVSWTQFNIIILTVIIIVVVLLMGFVGAVYMYREYQNRKLNAPFWTIELKEDNISFSSYHDSIPNADVSGLLEDDGNEVAPNGQLTLTTPIHNYKA

SEQ ID NO: 1261 - DNA, 2409 bp, Homo sapiens
gtggttggggaggggggggtggggggactctagacagctgaggcgcgaaagcgatgagtcctcggctcttcctcctccttctccgggacccgctctctgcctccctctccaacgcccggatgatctgagccgcgagggcgccgacagccgggggcccggacgcagcccggctcctcccctcctccgccccttccccagcctgacctggcccgccgctgcagcggtgacccctcccccggctgccgccgtcgccgccgcggtgaccccctccccggctgccgccgccgccgcctcggccgaccagggacctgcccgcctgcggctgctccggacctagaggatcaagacataatgggagcatttttagacaagccaaagatggaaaagcataatgcccaggggcagggtaatgggttgcgatatgggctaagcagcatgcaaggctggcgtgttgaaatggaggatgcacatacggctgtgatcggtttgccaagtggacttgaatcgtggtcattctttgctgtgtatgatgggcatgctggttctcaggttgccaaatactgctgtgagcatttgttagatcacatcaccaataaccaggattttaaagggtctgcaggagcaccttctgtggaaaatgtaaagaatggaatcagaacaggttttctggagattgatgaacacatgagagttatgtcagagaagaaacatggtgcagatagaagtgggtcaacagctgtaggtgtcttaatttctccccaacatacttatttcattaactgtggagactcaagaggtttactttgtaggaacaggaaagttcatttcttcacacaagatcacaaaccaagtaatccgctggagaaagaacgaattcagaatgcaggtggctctgtaatgattcagcgtgtgaatggctctctggctgtatcgagggcccttggggattttgattacaaatgtgtccatggaaaaggtcctactgagcagcttgtctcaccagagcctgaagtccatgatattgaaagatctgaagaagatgatcagttcattatccttgcatgtgatggtatctgggatgttatgggaaatgaagagctctgtgattttgtaagatccagacttgaagtcactgatgaccttgagaaagtttgcaatgaagtagtcgacacctgtttgtataagggaagtcgagacaacatgagtgtgattttgatctgttttccaaatgcacccaaagtatcgccagaagcagtgaagaaggaggcagagttggacaagtacctggaatgcagagtagaagaaatcataaagaagcagggggaaggcgtccccgacttagtccatgtgatgcgcacattagcgagtgagaacatccccagcctcccaccagggggtgaattggcaagcaagaggaatgttattgaagccgtttacaatagactgaatccttacaaaaatgacgacactgactctacatcaacagatgatatgtggtaaaactgctcatctagccatggagtttaccttcacctccaaaggagagtacagctcaactttgttgaaacttttaacatccatcctcaactttaaggaaggggatatgacatgggtgagaatgattacatcagagaacttcagcagtacaacagctagcccagaactgatttttttttttttttttgtaaatttgagacttatgtaagcgtgatttcaaaccataattcgtgttgtaaatcagactccagcaatttttgttgtatgattttgtttttttgtaaagtgtaattgtccttgtacaaaatgctcatatttaattatgaactgctttaaatcactatcaaagttacaagaaatgtttggcttattgtgtgatgcaacagatatatagccctttcaagtcatgttgtgtttggacttggggttggaacagggagagcagcagccatgtcagctacacgctcaaatgtgcagatgattatggaaaataacctcaaaatcttacaaagctgaacatccaaggagttattgaaaactatcttaaatgttcttggtaggggagttggcattgttgataaagccagtcccttcatttaactgtctttcaggatgttccttcgttgtttccatgagtattgcaggtaataatacagtgtattcataagaatctcaatcttggggctaaatgccttgtttctttgcacctcttttcaagtccttacatttaattactaattgataagcagcagcttcctacatatagtaggaaactgccacatttttgctatcatgattggctgggcctgctgctgttcctagtaagatattctgaattccattttatcaataaagcttgatttaacaaacaagaaaaaaaaaaaaaaaaaaaaaaaaaaaaaaaaaaaaaaa

SEQ ID NO: 1262 - protein, 382 aa, Homo sapiens
MGAFLDKPKMEKHNAQGQGNGLRYGLSSMQGWRVEMEDAHTAVIGLPSGLESWSFFAVYDGHAGSQVAKYCCEHLLDHITNNQDFKGSAGAPSVENVKNGIRTGFLEIDEHMRVMSEKKHGADRSGSTAVGVLISPQHTYFINCGDSRGLLCRNRKVHFFTQDHKPSNPLEKERIQNAGGSVMIQRVNGSLAVSRALGDFDYKCVHGKGPTEQLVSPEPEVHDIERSEEDDQFIILACDGIWDVMGNEELCDFVRSRLEVTDDLEKVCNEVVDTCLYKGSRDNMSVILICFPNAPKVSPEAVKKEAELDKYLECRVEEIIKKQGEGVPDLVHVMRTLASENIPSLPPGGELASKRNVIEAVYNRLNPYKNDDTDSTSTDDMW

SEQ ID NO: 1263 - DNA, 3737 bp, Homo sapiens
acccacgcgtccggccgccgaaggggactgtttgctcctacgggctgtagatggagctgtccggccccggagagggggaaggcgcctggaaaacgttcttcttctccctggccgacccgagcggggaacagcactcccaggatgcagtttgtgtcaacacggccgcagcctcagcagctgggcatccagggcctggggctggacagcgggagctggagctgggcccaggctctgcccccggagcaggtctgccaccaggagccggcgctgcgcggggaaatggccgagggaatgccgcccatgcaggctcaagaatgggacatggacgcccggcggccaatgccttttcagttcccaccctttccagatagggcacctgtcttccccgaccgcatgatgcgagagccccagttgcccacagcagagatctcactctggactgtggtggctgccattcaggctgtggagaggaaggtggatgcccaggccagccagctgctgaacctggaggggcgcacggggacagccgagaagaagctggccgactgtgaaaagacggccgtggaatttgggaaccacatggagagcaagtgggccgtgctggggaccctgctgcaggagtacgggctgctgcagaggcggctggagaacttggagaacttgctgcgcaacaggaacttctgggtcctgcggctgcccccgggcagcaagggggaggcccccaaggttccagtgacttttgtcgacattgctgtgtacttctccgaagacgagtggaagaacttggacgaatggcagaaggagctttataacaaccttgttaaggagaactacaaaaccctcatgtccctggacgcggagggctcagtccccaagccagatgctccagtccaggctgagcccagggaagaaccttgtgtgtgggagcagcgccaccccgaagagagagaaatcccaatggatcccgaagcaggagcagagcccctggtgcctgcgcaggatgcgtcctcccaggtgaagcgtgaggacaccctgtgtgtccggggtcagcggggcctggaggaaagagccatccctacggaatccattaccgactccccaatttctgcccaggacctcttgtcccggattaaacaggaggagcatcagtgcgtgtgggatcagcaggatttggcagacagagatattcccacggatcccaattcagagtctctcatctcagcacatgacattttgtcatggatcaagcaggaggagcagccatacccatggggaccacgcgactcaatggacggagagcttggattagactctggccctagtgacagcctgctgatggtgaagaacccacccccggccccgccacagccccagccccagcgccagccaccgcagccgcagctgcagtcgcagccccagccccagagcctgccccccatcgcggtggccgagaacccgggcggccccccgagccgagggctgctggacgacggtttccaggtgctgcccggggagcgtggctccggcgaggcgccgccgggtggggaccgcagcaccgggggcggcgggggcgatgggggcggtgggggcggcggcgcggaggcggggacgggggcaggcggcggctgtggcagctgctgccctggcgggctgcggcggagcctcctcctgcacggcgcccgcagcaagccctactcgtgccccgagtgcggcaagagcttcggcgtgcgcaagagcctcatcatccaccaccgcagccacaccaaggagcggccctacgagtgcgctgagtgcgagaagagcttcaactgccactcgggcctcatccgccaccagatgacgcaccgcggcgagcggccctacaagtgctcggagtgcgagaagacctacagccgtaaggagcacctgcagaaccaccagcggctgcacacgggcgagcggcctttccaatgtgcactgtgcggcaagagcttcatccgcaagcagaacctgctcaagcaccagcgcatccacacgggcgagcgcccctacacgtgcggcgagtgcggcaagagcttccgctacaaggagtcgctcaaggaccacctgcgcgtgcacagcggcggcccgggccccggcgccccacggcagctcccgccgcctcctgagcgagactagggctgggctgggggagggcagggccggacggagtggatcgggggcggcctgagcaccaaccaccttgccgggtgtcctcagccaccgtctggaaatcggcaacaggcattgcactccggttgggggtcccccagggtggggcagggatcccccagatctgtctggtctgaatggacgcccagctcatctagggtggacccagctgctggggaagagccagggggaccgcgaggagccgagcgtcctcgggcaccgccctcacacctcctcgagtgccctgggaccactgggccacagatggtcatcaggggaagccaccagggagtcccgaagcccttctgagatcaggaaatcaggtcccaaggttaggagacgccctgaaaaaaagtgaaggccgagggatgtgctaagggtaacaccttcatgatgacaacactgcctcgcgtttcaatagcgctttatacttttttaagtgttttctatccgttatccatttcacccttggcctatccctctcagataggtggggtaggattttcctggtgaccgagtaaagtgagaggcaggtgagacggttcacccaatcacacgggaaggggcgcgcgctgcccaaccgcgctctccgcctacctcgctgctcgggaagctgctggcctggccctcctggtctctcttcctttctggtctctcttcctttccttgctctcacccacggataaaaccagaagcgacaggaggccagctcctggggttcctgggaccgggaacagattggctacggaacgccccaggttgtacattcagagggctctttctccatgggagctcctggtgccgccttcggccccagcctgtccccagcccctcaatctggtgcagcagcatcttgtcactgcacaacagtggcctggtcccccacaggcagttagggccccaggtcagacctcaccatgatgatttgttccagttctcccagggcagaggggcgagggagaggcttttgctgtgagagtagccgtcacgtgtctcttcccagcagcgccgggcaagtgggtgctagagtctgagcctcaggctctcctgccctgggcctcccaattggtgctatctgttactgcccgtgctcacggacatggatacagaccctgctgtgctccacaccctgcaggcgcctcgggaagcgcccaaaggattccccttcacgttggtgcacctgctccatagctccgggcgctgcgtcccgaggggccacagtctccatttcagcgtcttgcatggcctggcaccgggtggggtggtatgcccccttgtttgtgtcaaaaatgactttccctgcccttgccgtgggtccggcgttcctcccagccgggatcacagtgggcagccggcacccggcaccactttggcgagcgtcctgcttccgccctcgccctcatctacgctgctccgctttcctcagacccctttttgccgtgcaaaggaattcttgacattaaataaaaggtatccagattgcagactgcatgttcacagagctgggggttctccagcttgcctacagtaaagcctcaatgaactgg

SEQ ID NO: 1264 - protein, 718 aa, Homo sapiens [sequence omitted]

SEQ ID NO: 1265 - DNA, 3669 bp, Homo sapiens
cggcgtctggaactctattttaagaacctctcaaaacgaaacaagcaaatcatggagaagaatggaaataaccgaaagctgcgggtttgtgttgctacttgtaaccgtgcagattattctaaacttgccccgatcatgtttggcattaaaaccgaacctgagttctttgaacttgatgttgtggtacttggctctcacctgatagatgactatggaaatacatatcgaatgattgaacaagatgactttgacattaacaccaggctacacacaattgtgaggggagaagatgaggcagccatggtggagtcagtaggcctggccctagtgaagctgccagatgtccttaatcgcctgaagcctgatatcatgattgttcatggagacaggtttgatgccctggctctggccacatctgctgccttgatgaacatccgaatccttcacattgaaggtggggaagtcagtgggaccattgatgactctatcagacatgccataacaaaactggctcattatcatgtgtgctgcacccgcagtgcagagcagcacctgatatccatgtgtgaggaccatgatcgcatccttttggcaggctgcccttcctatgacaaacttctctcagccaagaacaaagactacatgagcatcattcgcatgtggctaggtgatgatgtaaaatctaaagattacattgttgcactacagcaccctgtgaccactgacattaagcattccataaaaatgtttgaattaacattggatgcacttatctcatttaacaagcggaccctagtcctgtttccaaatattgacgcagggagcaaagagatggttcgagtgatgcggaagaagggcattgagcatcatcccaactttcgtgcagttaaacacgtcccatttgaccagtttatacagttggttgcccatgctggctgtatgattgggaacagcagctgtggggttcgagaagttggagcttttggaacacctgtgatcaacctgggaacacgtcagattggaagagaaacaggggagaatgttcttcatgtccgggatgctgacacccaagacaaaatattgcaagcactgcaccttcagtttggtaaacagtacccttgttcaaagatatatggggatggaaatgctgttccaaggattttgaagtttctcaaatctatcgatcttcaagagccactgcaaaagaaattctgctttcctcctgtgaaggagaatatctctcaagatattgaccatattcttgaaactctaagtgccttggccgttgatcttggcgggacgaacctccgagttgcaatagtcagcatgaagggtgaaatagttaagaagtatactcagttcaatcctaaaacctatgaagagaggattaatttaatcctacagatgtgtgtggaagctgcagcagaagctgtaaaactgaactgcagaattttgggagtaggcatttccacaggtggccgtgtaaatcctcgggaaggaattgtgctgcattcaaccaaactgatccaagagtggaactctgtggaccttaggacccccctttctgacactttgcatctccctgtgtgggtagacaatgatggcaactgtgctgccctggcggaaaggaaatttggccaaggaaagggactggaaaactttgttacacttatcacaggcacaggaatcggtggtggaattatccatcagcatgaattgatccacggaagctccttctgtgctgcagaactgggccaccttgttgtgtctctggatgggcctgattgttcctgtggaagccatgggtgcattgaagcatacgcctctggaatggccttgcagagggaggcaaaaaagctccatgatgaggacctgctcttggtggaagggatgtcagtgccaaaagatgaggctgtgggtgcgctccatctcatccaagctgcgaaacttggcaatgcgaaggcccagagcatcctaagaacagctggaacagctttgggtcttggggttgtgaacatcctccataccatgaatccctcccttgtgatcctctccggagtcctggccagtcactatatccacattgtcaaagacgtcattcgccagcaggccttgtcctccgtgcaggacgtggatgtggtggtttcggatttggttgaccccgccctgctgggtgctgccagcatggttctggactacacaacacgcaggatctactagacctccaggaacagacatggaccttctctccagagctcctgagtggaatcaagttcttgtctttaggatgaccgtttcttaacaatcaaatctggtattgaactgcaggtgactttggcagagaaatgttttcacttttggtctcctcttccagagtcacctttccccactcctatttttgtagatgctattctttctgatgtcttcttactaggggtcattttagctcaaaccctgtaagttacagtcacaattttctgtgccaaagcagctacaataatagagaggaagccttcttagaactctgcttactaatgtattaataccactgagaccttcaggccttgctgggatatcacttcatcctgaagtttgcattaataatccttccaggccgggcacagtggctcacgcctgtaatcccagcactttgggaggccgaggcgggcggatcacgaggtcaggagatcgagaccgccctggctaacatggtgaaacatggtgaaaccccgtctctactaaaaatacaaaaaattagctgggtgtggtggcgggtccagctactcgggaggctgaggcaggagaatggcatgaaccccaggctggagtgcagtggctcaatgcaacctctgccccccgggttcggtgattctcctgcctcagcctcttgagtggctgggattgcgggcacatgcaccacgcccggctgatttttttttgtatttttagtggacagggtttcaccatgttggccaggctggtcttgaactcctgacctcaggtgatccgcccgcctctgcctcccaaggtgctggattacaggtgtaagccatcacacctggccctagtgacaggtttttatgggtacttttagatgatctaagaaatcatgtgcatatatctttcagatttctattttggaaaatgaaggtttctacaacatattgtttcagtgttcaaataaactgaaggactcaacattacatttgaactatatccttcctagtgggttagtgtgaaaaagagtttggctgattcctaaaactctgccagccctgcagtaatctccaggcctggttattgttcagacattccatggtgattcctgggaaggaagcttggctgctcagtttctgagtctggggtgagataatgttctggaaggacatctgttctttggtgtaatctctcatggtgaaatctgctctgtacatcagacaattgcattgctaccaagtttcataccaaatatttgaaaggatggtattgaatctaaaccaaatattaggtttttattaaactcatgggaaggctaatatattccaacgtaaattattacatatggttaagtaattgcatgttaatttattttaatgtaaatatttttgttactgttctgagccaaattctaaagaaaaaataaatacatttccttgttgaaaaaaaaaa

SEQ ID NO: 1266 - protein, 722 aa, Homo sapiens
MEKNGNNRKLRVCVATCNRADYSKLAPIMFGIKTEPEFFELDVVVLGSHLIDDYGNTYRMIEQDDFDINTRLHTIVRGEDEAAMVESVGLALVKLPDVLNRLKPDIMIVHGDRFDALALATSAALMNIRILHIEGGEVSGTIDDSIRHAITKLAHYHVCCTRSAEQHLISMCEDHDRILLAGCPSYDKLLSAKNKDYMSIIRMWLGDDVKSKDYIVALQHPVTTDIKHSIKMFELTLDALISFNKRTLVLFPNIDAGSKEMVRVMRKKGIEHHPNFRAVKHVPFDQFIQLVAHAGCMIGNSSCGVREVGAFGTPVINLGTRQIGRETGENVLHVRDADTQDKILQALHLQFGKQYPCSKIYGDGNAVPRILKFLKSIDLQEPLQKKFCFPPVKENISQDIDHILETLSALAVDLGGTNLRVAIVSMKGEIVKKYTQFNPKTYEERINLILQMCVEAAAEAVKLNCRILGVGISTGGRVNPREGIVLHSTKLIQEWNSVDLRTPLSDTLHLPVWVDNDGNCAALAERKFGQGKGLENFVTLITGTGIGGGIIHQHELIHGSSFCAAELGHLVVSLDGPDCSCGSHGCIEAYASGMALQREAKKLHDEDLLLVEGMSVPKDEAVGALHLIQAAKLGNAKAQSILRTAGTALGLGVVNILHTMNPSLVILSGVLASHYIHIVKDVIRQQALSSVQDVDVVVSDLVDPALLGAASMVLDYTTRRIY

SEQ ID NO: 1267 - DNA, 1955 bp, Homo sapiens
  misc_feature (1903)..(1903): n is a, c, g, or t
ggtcgcgcagctgtgttcgcggactcaggtggaaggaatttcttctcttcgttgacgttgctggtgttcactgtttggaattagtcaagtttcgggaatcaccgtcgctgccatcaacatgtcggtcccaagcgctctcatgaagcaaccgcccattcagtctacggctggggccgtcccagttcgcaatgagaaaggtgagatttcaatggaaaaagtgaaggtaaagcgttatgtgtccggaaaaaggccagactatgcccctatggagtcctcagatgaggaggatgaagaatttcagttcattaagaaagccaaagaacaagaagcagagcctgaggaacaggaggaggattcatccagtgacccccggctacggcgtttacagaaccgtattagtgaagatgtggaagagagattggctcgacatcgaaaaatagtggaacctgaagtggtaggagagagtgactcagaagtagaaggagatgcttggcgcatggaacgagaagacagcagtgaagaagaggaggaggaaattgatgatgaggaaatagagcggcggcgtggcatgatgcgtcagcgagcacaggagagaaaaaatgaagagatggaagtcatggaagtggaagatgagggtcgttctggagaggagtcagaatcagagtctgagtatgaagagtacacagacagtgaagatgagatggagcctcgccttaagccagtcttcattcgaaagaaggaccgagtgacagttcaagaacgtgaagccgaagcattgaaacagaaggagctggagcaggaagccaaacgcatggctgaggaaaggcgccagtacacactccagattgtcggagaggaaaccccaaaagagctggaagagaacaagcgatccctggctgcattggatgcactcaatactgatgatgaaaatgatgaggaggaatatgaggcatggaaagttcgagagctaaaaagaatcaagagggacagagaagatcgagaagcgcttgagaaggagaaagcagaaattgaacgcatgcgaaacctgactgaggaagagaggagagctgaacttcgggcaaacggcaaagtcattaccaacaaagctgttaagggcaaatacaagttcttacagaagtattatcaccggggtgccttcttcatggatgaggatgaagaagtatacaagagagatttcagcgctcctaccctggaggatcatttcaataaaaccattcttcctaaagtcatgcaggtcaagaactttggacgctcaggtcgcaccaaatacactcaccttgtggatcaagataccacctcctttgactcagcttggggccaagagagtgcccagaacacaaagttcttcaaacaaaaggcagctggggtacgagatgtatttgagcggccatctgccaagaagcggaaaactacctagggtccaactgcttattcttccaactgtggaacacaaggggagtctcagcatctggtccttgattgggttttttcattgtttccttggcccctgtatccagatattggacttactgctatacttgtgatactgggtagcccagactttgaaggtgctttgtgaggtttggactcatgctgagaaacccacaggaaagcactgtccaggtaggattagaggcttcccacttaaaactatttctgagaaatcttaggttttatcactgctatggtttcccatatttacttgggactgttctgactttctttttccagcccttagcttgggttagaaaagtggacatgtaagtgaacaatgcattacttctaccttaggtttaggagtaatatacccggaaatctaagctcatggaaacatgttttccatttggggttggagtccgtttttctagttgtacatacttgnggatccatatatgtgtgcatgtcawgaaataaaagaatcacacaacaaaaaa

SEQ ID NO: 1268 - protein, 439 aa, Homo sapiens
MSVPSALMKQPPIQSTAGAVPVRNEKGEISMEKVKVKRYVSGKRPDYAPMESSDEEDEEFQFIKKAKEQEAEPEEQEEDSSSDPRLRRLQNRISEDVEERLARHRKIVEPEVVGESDSEVEGDAWRMEREDSSEEEEEEIDDEEIERRRGMMRQRAQERKNEEMEVMEVEDEGRSGEESESESEYEEYTDSEDEMEPRLKPVFIRKKDRVTVQEREAEALKQKELEQEAKRMAEERRQYTLQIVGEETPKELEENKRSLAALDALNTDDENDEEEYEAWKVRELKRIKRDREDREALEKEKAEIERMRNLTEEERRAELRANGKVITNKAVKGKYKFLQKYYHRGAFFMDEDEEVYKRDFSAPTLEDHFNKTILPKVMQVKNFGRSGRTKYTHLVDQDTTSFDSAWGQESAQNTKFFKQKAAGVRDVFERPSAKKRKTT

SEQ ID NO: 1269 - DNA, 4452 bp, Homo sapiens
cgccggtgaggtaggggcgggaggcggggggagacatggctcggcgcggctggcggcgggcacccctccgccgtggcgtcggcagcagtccccgagcccgcaggctcatgcggcccctttggttgctcctcgcagtgggcgtctttgactgggcaggggcttcggacggcggcggcggagaggctagagccatggacgaggagatcgtgtccgagaagcaagccgaggagagccaccggcaggacagcgccaacctgctcatcttcatcctgctgctcaccctcaccattctcacaatctggctcttcaagcaccgccgggcccgcttcctgcacgaaaccggcctggctatgatttatggtcttttggtgggccttgtgcttcggtatggcattcatgttccgagtgatgtaaataatgtgaccctgagctgtgaagtgcagtcaagtccaactaccttactggttacttttgatccagaagtatttttcaacatattacttcctcctatcatattttatgcaggttatagcctgaaaaggagacatttttttcgaaatcttgggtctatcctagcatacgcttttcttggaacagcaatttcttgtttcgttattgggtcaataatgtatggctgtgtaacgctgatgaaggtaacgggacaacttgcaggagatttttactttacagattgcctactgtttggtgccattgtatcagcaactgatccagtgactgttcttgctatattccacgagcttcaagttgatgttgaactctatgcacttctttttggtgaaagtgtcctcaatgatgctgttgccatagtgctgtcctcctcaatagtggcataccagccagctggagacaacagtcacacctttgatgtcacagcgatgttcaagtctattgggatcttccttggaatcttcagtggatcttttgcaatgggtgctgctactggagtggtgacagctttagtgacaaagttcaccaaattacgggagttccagttgttggagacaggcctgttcttcttgatgtcctggagtaccttcctcttggctgaagcatggggcttcacaggtgtagttgcagtattgttttgtggcatcacacaagcacattatacgtataataatttgtccacggagtctcagcatagaactaaacagttgtttgagcttctcaatttcttggcagagaatttcatcttctcctacatggggctgacactgttcaccttccagaaccatgtctttaacccaacatttgtagtaggagcatttgttgctattttcttgggaagagctgccaatatttaccccttgtccctcttacttaatttgggtagaagaagtaagattggatcaaattttcaacacatgatgatgtttgctggccttcgtggtgcaatggcatttgccttggccattcgagatactgccacttatgcacggcaaatgatgttcagcaccacgcttctgattgtgttttttaccgtgtgggtatttggtggtggcaccactgcaatgctgtcatgcttgcatatcagggttggtgttgattcagaccaagaacacttgggtgttcctgaaaatgaaaggagaactaccaaagcagagagtgcttggcttttccggatgtggtacaactttgatcataactatctgaagcctctgctgacccacagcgggcctccgctgacaacaacactccctgcctgctgtggacccatcgccaggtgcctcaccagcccccaggcttacgaaaaccaggaacagttgaaagatgatgattctgatcttattctcaatgatggtgacatcagtttgacatatggagattctactgtgaacactgaaccggccacatccagcgccccaaggagatttatgggaaacagttctgaagatgccttggatcgggagcttgcatttggggaccatgaactggtcattcgaggaacacgcctggttcttccaatggatgattctgaacccccgctaaatttgttagataatacgagacatggtccagcctaagcttactaatactcacttagtgatttgtaaaatttgcacatgtgattgtgaagaaatttgtactacctaaaagtcccagtgcatgtctctgaatgtgtaagctatataaatgctatttatatggcatagaaagaatataaatatcctgtacacggcagattgtgaacaaactatattcctttaagttttcctggttgcactctgtagactggatctgttttaggaagttactttcacagtgatgttgtgtgttctgttagttttatgtctcagttaaagtgtaaaaagtgacggattttctctttcttaaacttacctgacacttaaccagagtaccagttctcgtgatgtgaattaatttttttgtgtgctaggggagggagagtgaggagggagtgttatttccttgggaacctagggaggagaggttcctttgttgggaaacttttgttgatagctgctgcctttgtcctgatcgttttctttcccttttctctggtggcctgttgtggtgcaacgagctgatggcatttgatcttgccccattcaggttggggagtgaagtgtggggacccttttcccccgcttgctgtgaaagcacagattcattgactacagtacactgttgttcagaaaagaaggctgcaaatgacttctgagactttatgtcttttcttccagaccaagaccgtagaaggagtcacatctagccggcttagccaaagtacaggtgtatatagttcagggcacttgatttagatttggaggggctggggtgggcagagagcaagaggcgagtaaagagaatggtggtttcagagatctctcttcccaaatgtgtaaatattctataccagataagtttaaataagaaatttaattgctgcttaatttttgattatgtactttatctgtatagcaggctttgtcgtcagaagtttttatatcgatttaaattgctgctctttagcagccaaacaggagcaaaatgtaaaatttttgaacttactgtgtctaatcatcatttgttagtctgtagttaatgtcaacagttaatttatgaacccacgatcgttccacactgcaccaaagtcagtcataagagaaatcgaatattctggagcactgattgcagcagggtggctcctttgtgtgcagcaggtgtagtagtcttcattttcatggtacgttttaatattaattacctaagctgccatgcattttttttttacagttctcaaggaagagcacagaacaatttctcatttcatatttggagtatgaaagtagattctattttgtaatgctgataatacctaaagatgcattgaatgcttggaagaatgctttttgatgttgattttgacctgttcatgattcagaagaaaaacaaacttttttggattttttttccctcaggtctgagtagcattgccttaaatcttatccagttagaacattgatttatttacatgatgttcagattttccagtgaaaaatacccttctgaacaaaacatgtacttactctccgaaaggcatctatctgtgctattgcaaacactccttgagattttaggggaattctaatgttgtaccctttcgtggcagctttgactgttggcatagccatttgttatgtagtggtagcgactttcctgctatgcaggaatccctcccatgacgtgtatgttttacatgatgtgtgcctcttcacgcagtaaatagtttcttgttaatgtatgtttgaggagtttgaacgtcagtgtcacttacccacaaagttattcaagttgtaaaaggttataaataatttaacaactaccttttttattctgtcgggttactgacctcactttatgtaaatacttcgcatgacaaattcagtaactcgtctatttcagcatgcataagacttttcactagggaaactgataaagcttgagtcaactaaatctgccttcatactttatcaaggggaaccaagcctgctgtgcttacatcagcatctggaagactttcctctcctctaatctgtgtacacatctccaagcaaggaagaaaaaacaaactctgctcagacgcctatgaaacacctgaatgaactttgatgaagtacagtctgagttaccatcatgcacaagtagaactgctcttggacttgttttcctgttgtttgtggaacctacgcgtttgaatggcttgaacgttgcatcttttaaagttattttttaaggtttcttggcatttatcctagttgtccgtgtttggcaatgtgctgttaaagtaatagacttttaatctttatgtattttttgttttctctggagtacttggacagatgttatagtggtttcttttaggaaaatctgtcattaaaaaagttatagccttgcaaataaccactc

SEQ ID NO: 1270 - protein, 669 aa, Homo sapiens
MARRGWRRAPLRRGVGSSPRARRLMRPLWLLLAVGVFDWAGASDGGGGEARAMDEEIVSEKQAEESHRQDSANLLIFILLLTLTILTIWLFKHRRARFLHETGLAMIYGLLVGLVLRYGIHVPSDVNNVTLSCEVQSSPTTLLVTFDPEVFFNILLPPIIFYAGYSLKRRHFFRNLGSILAYAFLGTAISCFVIGSIMYGCVTLMKVTGQLAGDFYFTDCLLFGAIVSATDPVTVLAIFHELQVDVELYALLFGESVLNDAVAIVLSSSIVAYQPAGDNSHTFDVTAMFKSIGIFLGIFSGSFAMGAATGVVTALVTKFTKLREFQLLETGLFFLMSWSTFLLAEAWGFTGVVAVLFCGITQAHYTYNNLSTESQHRTKQLFELLNFLAENFIFSYMGLTLFTFQNHVFNPTFVVGAFVAIFLGRAANIYPLSLLLNLGRRSKIGSNFQHMMMFAGLRGAMAFALAIRDTATYARQMMFSTTLLIVFFTVWVFGGGTTAMLSCLHIRVGVDSDQEHLGVPENERRTTKAESAWLFRMWYNFDHNYLKPLLTHSGPPLTTTLPACCGPIARCLTSPQAYENQEQLKDDDSDLILNDGDISLTYGDSTVNTEPATSSAPRRFMGNSSEDALDRELAFGDHELVIRGTRLVLPMDDSEPPLNLLDNTRHGPA

SEQ ID NO: 1271 - DNA, 720 bp, Homo sapiens
cctgcgagctccgtcctgcctgcagcagcacaaccctgcacacccaccatggatgtcttcaagaagggcttctccatcgccaaggagggcgtggtgggtgcggtggaaaagaccaagcagggggtgacggaagcagctgagaagaccaaggagggggtcatgtatgtgggagccaagaccaaggagaatgttgtacagagcgtgacctcagtggccgagaagaccaaggagcaggccaacgcggtgagcgaggctgtggtgagcagcgtcaacactgtggccaccaagaccgtggaggaggcggagaacatcgcggtcacctccggggtggtgcgcaaggaggacttgaggccatctgccccccaacaggagggtgtggcatccaaagagaaagaggaagtggcagaggaggcccagagtgggggagactagagggctacaggccagcgtggatgacctgaagagcgctcctctgccttggacaccatcccctcctagcacaaggagtgcccgccttgagtgacatgcggctgcccacgctcctgccctcgtcttcctggccacccttggcctgtccacctgtgctgctgcaccaacctcactgccctccctcggccccacccaccctctggtccttctgaccccacttatgctgctgtgaattttttttttaaatgattccaaataaaacttgagcccactcctaaaaaaaaaaaaaaa

SEQ ID NO: 1272 - protein, 127 aa, Homo sapiens
MDVFKKGFSIAKEGVVGAVEKTKQGVTEAAEKTKEGVMYVGAKTKENVVQSVTSVAEKTKEQANAVSEAVVSSVNTVATKTVEEAENIAVTSGVVRKEDLRPSAPQQEGVASKEKEEVAEEAQSGGD

SEQ ID NO: 1273 - DNA, 1988 bp, Homo sapiens
catgctgcgccgctacctagcctcggaccccgactgccgctggtgcccggccccggactgcggttatgctgttattgcctatggctgtgccagctgcccgaagctaacttgtgagagggaaggttgccagactgagttctgctaccactgcaagcagatatggcatccaaatcagacatgcgatatggcccgtcaacagagggcccagactttacgagttcggaccaaacacacttcaggtctcagttatgggcaagaatctggaccagcagatgacgtcaagccatgcccacgatgcagtgcatacattatcaagatgaatgatggaagctgtaatcacatgacctgtgcagtgtgtggctgtgaattctgttggctttgtatgaaagagatctcagacttgcattacctcagcccctctggctgtacattctggggcaagaagccatggagccgtaagaagaaaattctttggcagctgggcacgttgattggtgctccagtggggatttctctcattgctggcattgccattcctgccatggtcattggcattcctgtttatgttggaaggaagattcacagcaggtatgagggaaggaaaacctccaaacacaagaggaatttggctatcactggaggagtgactttgtcggtcattgcatccccagttattgctgcagttagtgttggtattggtgtccccattatgctggcatatgtttatggggttgtgcccatttctctttgtcgtggaggcggctgtggagttagcacagccaacggaaaaggagtgaaaattgaatttgatgaagatgatggtccaatcacagtggcagatgcctggagagccctcaagaatcccagcattggggaaagcagcattgaaggcctgactagtgtattgagcactagtggaagccctacagatggacttagtgttatgcaaggtccttacagcgaaacggccagctttgcagccctctcagggggcacgctgagtggcggcattctctccagtggcaagggaaaatatagcaggttagaagttcaagccgatgtccaaaaggaaattttccccaaagacacagccagtcttggtgcaattagtgacaacgcaagcactcgtgctatggccggttccataatcagttcctacaacccacaggacagagaatgcaacaatatggaaatccaagtggacattgaagccaaaccaagccactatcagctggtgagtggaagcagcacggaggactcgctccatgttcatgctcagatggcagagaatgaagaagaaggtagtggtggcggaggcagtgaagaggatcccccctgcagacaccaaagctgtgaacagaaagactgcctggccagcaaaccttgggacatcagcctggcccagcctgaaagcatccgcagtgacctagagagttctgatgcacagtcagacgatgtgccagacatcacctcagatgagtgtggctccccccgctcccatactgcagcctgcccctcgacccccagagcccaaggtgcaccgagcccaagtgcccatatgaacctctctgccctagccgagggacaaactgtcttgaagccagaaggtggagaagccagagtatgaagtggaatgaatgctcctgttctgagaagcacacttgtaactgcatcttttggaattttttttttttttttttccaaggggtagagatttatgtattttatttcacagattctctggtcacaggtttttgcccagggaaattctgagaaattcacaatttcttaccagataaaacatgaaaagtttgccgttagttcccctcccctcccctccctctttttagttttaatttattggttaaactgatggcagcaatccatgaggtgtgtcaaagagtgtacatatgtatgtgtgtatattgaatgctaaacatattactgaaagacacattttaataaagatttctgtcataattcaactt

SEQ ID NO: 1274 - protein, 541 aa, Homo sapiens
MLRRYLASDPDCRWCPAPDCGYAVIAYGCASCPKLTCEREGCQTEFCYHCKQIWHPNQTCDMARQQRAQTLRVRTKHTSGLSYGQESGPADDVKPCPRCSAYIIKMNDGSCNHMTCAVCGCEFCWLCMKEISDLHYLSPSGCTFWGKKPWSRKKKILWQLGTLIGAPVGISLIAGIAIPAMVIGIPVYVGRKIHSRYEGRKTSKHKRNLAITGGVTLSVIASPVIAAVSVGIGVPIMLAYVYGVVPISLCRGGGCGVSTANGKGVKIEFDEDDGPITVADAWRALKNPSIGESSIEGLTSVLSTSGSPTDGLSVMQGPYSETASFAALSGGTLSGGILSSGKGKYSRLEVQADVQKEIFPKDTASLGAISDNASTRAMAGSIISSYNPQDRECNNMEIQVDIEAKPSHYQLVSGSSTEDSLHVHAQMAENEEEGSGGGGSEEDPPCRHQSCEQKDCLASKPWDISLAQPESIRSDLESSDAQSDDVPDITSDECGSPRSHTAACPSTPRAQGAPSPSAHMNLSALAEGQTVLKPEGGEARV

SEQ ID NO: 1275 - DNA, 1349 bp, Homo sapiens
cggccgcccgcgagcggcgtgccacgtacggctccggccgaagcgacggcctctgctagggcacaagagagacgggcgctcgcgtctcgcagtcctcttccgtcagtgtcttttgcttcgactcccggcggagcgcgcaacgtggagtgacgtgcaggggccaagtgcaacccaggcagccacggctgtttcggagctcaggactctaaaatggcagagcagctttctccaggaaaggcggtggatcaggtgtgcaccttccttttcaaaaagcctgggcggaaaggggctgctggacgcagaaagcgcccggcctgcgacccagagcccggagaaagcggcagcagtagcgacgaaggctgcactgtggttcgaccggaaaagaagcgggtgacccacaatccaatgatacagaagacccgtgacagtggtaaacagaaggcggcttacggcgacttgagcagcgaagaggaagaggaaaatgagcccgagagtctcggcgtggtttataaatccacccgttcggcgaaacccgtgggaccagaggatatgggagcgacagctgtctatgagctggacacagagaaagagcgcgatgcacaagccatctttgagcgcagccagaagatccaggaggagctgaggggcaaggaggatgacaagatctatcggggaatcaacaattatcagaaatacatgaagcccaaggatacgtctatgggcaatgcctcttccgggatggtgaggaagggccccatccgagcgcccgagcatctacgtgccaccgtgcgctgggattaccagcccgacatctgtaaggactacaaagagactggcttctgcggcttcggagacagctgcaaattcctccatgaccgttcagattacaagcatgggtggcagatcgaacgtgagcttgatgagggtcgctatggtgtctatgaggatgaaaactatgaagtgggaagcgatgatgaggaaataccattcaagtgtttcatctgtcgccagagcttccaaaacccagttgtcaccaagtgcaggcattatttctgcgagagctgtgcactgcagcatttccgcaccaccccgcgctgctatgtctgtgaccagcagaccaatggcgtcttcaatccagcgaaagaattgattgctaaactagagaagcatcgagctacaggagagggtggtgcttccgacttgccagaagaccccgatgaggatgcaattcccattacttaggtttcccataattcttaaatttaaaaaataaacgttttgttcttttggaagtcttacttcgtgtccttcctttgtagagaaagtgacagagcaggcgggtggtgaag

SEQ ID NO: 1276 - protein, 343 aa, Homo sapiens
MAEQLSPGKAVDQVCTFLFKKPGRKGAAGRRKRPACDPEPGESGSSSDEGCTVVRPEKKRVTHNPMIQKTRDSGKQKAAYGDLSSEEEEENEPESLGVVYKSTRSAKPVGPEDMGATAVYELDTEKERDAQAIFERSQKIQEELRGKEDDKIYRGINNYQKYMKPKDTSMGNASSGMVRKGPIRAPEHLRATVRWDYQPDICKDYKETGFCGFGDSCKFLHDRSDYKHGWQIERELDEGRYGVYEDENYEVGSDDEEIPFKCFICRQSFQNPVVTKCRHYFCESCALQHFRTTPRCYVCDQQTNGVFNPAKELIAKLEKHRATGEGGASDLPEDPDEDAIPIT

SEQ ID NO: 1277 - DNA, 1500 bp, Homo sapiens
ggtcgcggtccccccctcaacatggcggcagcggtgctctaggcgccggaagggggcgtgaatcggtgcgaccgcgcgcgtgcgcagtaccgggtccgcgcctgtccccgaaacttcgcaccccgtcgaactctcgcgagagcggtatctgcgtgtcgggacgtgcggaggctctcactttccgtcatggcgctgaaggtagcgaccgtcgccggcagcgccgcgaaggcggtgctcgggccagcccttctctgccgtccctgggaggttctaggcgcccacgaggtcccctcgaggaacatcttttcagaacaaacaattcctccgtccgctaagtatggcgggcggcacacggtgaccatgatcccaggggatggcatcgggccagagctcatgctgcatgtcaagtccgtcttcaggcacgcatgtgtaccagtggactttgaagaggtgcacgtgagttccaatgctgatgaagaggacattcgcaatgccatcatggccatccgccggaaccgcgtggccctgaagggcaacatcgaaaccaaccataacctgccaccgtcgcacaaatctcgaaacaacatccttcgcaccagcctggacctctatgccaacgtcatccactgtaagagccttccaggcgtggtgacccggcacaaggacatagacatcctcattgtccgggagaacacagagggcgagtacagcagcctggagcatgagagtgtggcgggagtggtggagagcctgaagatcatcaccaaggccaagtccctgcgcattgccgagtatgccttcaagctggcgcaggagagcgggcgcaagaaagtgacggccgtgcacaaggccaacatcatgaaactgggcgatgggcttttcctccagtgctgcagggaggtggcagcccgctaccctcagatcaccttcgagaacatgattgtggataacaccaccatgcagctggtgtcccggccccagcagtttgatgtcatggtgatgcccaatctctatggcaacatcgtcaacaatgtctgcgcgggactggtcgggggcccaggccttgtggctggggccaactatggccatgtgtacgcggtgtttgaaacagctacgaggaacaccggcaagagtatcgccaataagaacatcgccaaccccacggccaccctgctggccagctgcatgatgctggaccacctcaagctgcactcctatgccacctccatccgtaaggctgtcctggcatccatggacaatgagaatatgcacactccggacatcgggggccagggcacaacatctgaagccatccaggacgtcatccgccacatccgcgtcatcaacggccgggccgtggaggcctaggctggccctaggaccttcttggtttgctccttggattccccttcccactccagcaccccagccagcctggtacgcagatcccagaataaagcaccttctccctagaaaaaaaaaaaaaaaaaaaaaaaaaaa

SEQ ID NO: 1278 - protein, 393 aa, Homo sapiens
MALKVATVAGSAAKAVLGPALLCRPWEVLGAHEVPSRNIFSEQTIPPSAKYGGRHTVTMIPGDGIGPELMLHVKSVFRHACVPVDFEEVHVSSNADEEDIRNAIMAIRRNRVALKGNIETNHNLPPSHKSRNNILRTSLDLYANVIHCKSLPGVVTRHKDIDILIVRENTEGEYSSLEHESVAGVVESLKIITKAKSLRIAEYAFKLAQESGRKKVTAVHKANIMKLGDGLFLQCCREVAARYPQITFENMIVDNTTMQLVSRPQQFDVMVMPNLYGNIVNNVCAGLVGGPGLVAGANYGHVYAVFETATRNTGKSIANKNIANPTATLLASCMMLDHLKLHSYATSIRKAVLASMDNENMHTPDIGGQGTTSEAIQDVIRHIRVINGRAVEA

SEQ ID NO: 1279 - DNA, 1723 bp, Homo sapiens
ggtcgcggtccccccctcaacatggcggcagcggtgctctaggcgccggaagggggcgtgaatcggtgcgaccgcgcgcgtgcgcagtaccgggtccgcgcctgtccccgaaacttcgcaccccgtcgaactctcgcgagagcggtatctgcgtgtcgggacgtgcggaggctctcactttccgtcatggcgctgaaggtagcgaccgtcgccggcagcgccgcgaaggcggtgctcgggccagcccttctctgccgtccctgggaggttctaggcgcccacgaggtcccctcgaggaacatcttttcagaacaaacaattcctccgtccgctaagtatggcgggcggcacacggtgaccatgatcccaggggatggcatcgggccagagctcatgctgcatgtcaagtccgtcttcaggcacgcatgtgtaccagtggactttgaagaggtgcacgtgagttccaatgctgatgaagaggacattcgcaatgccatcatggccatccgccggaaccgcgtggccctgaagggcaacatcgaaaccaaccataacctgccaccgtcgcacaaatctcgaaacaacatccttcgcaccagcctggacctctatgccaacgtcatccactgtaagagccttccaggcgtggtgacccggcacaaggacatagacatcctcattgtccgggagaacacagagggcgagtacagcagcctggagcatgagagtgtggcgggagtggtggagagcctgaagatcatcaccaaggccaagtccctgcgcattgccgagtatgccttcaagctggcgcaggagagcgggcgcaagaaagtgacggccgtgcacaaggccaacatcatgaaactgggcgatgggcttttcctccagtgctgcagggaggtggcagcccgctaccctcagatcaccttcgagaacatgattgtggataacaccaccatgcagctggtgtcccggccccagcagtttgatgtcatggtgatgcccaatctctatggcaacatcgtcaacaatgtctgcgcgggactggtcgggggcccaggccttgtggctggggccaactatggccatgtgtacgcggtgtttgaaacagctacgaggaacaccggcaagagtatcgccaataagaacatcgccaaccccacggccaccctgctggccagctgcatgatgctggaccacctcaagctgcactcctatgccacctccatccgtaaggctgtcctggcatccatggacaatgagaatgtgaggttcccctcgcaccctaccctgctgccccgcccagtctccccctgcagcctcctgtagcccgcctcatgcactgaccacagcccccaggggaggatggtactggatctggccccatcttctggcccttagctggtgccacttccctcctgtggcaatcccagtcctgcacgtcacaggagacagcggggggtggcagggcctggtgtgtgccgagcctgcctgtgtcctacagatgcacactccggacatcgggggccagggcacaacatctgaagccatccaggacgtcatccgccacatccgcgtcatcaacggccgggccgtggaggcctaggctggccctaggaccttcttggtttgctccttggattccccttcccactccagcaccccagccagcctggtacgcagatcccagaataaagcaccttctccctagaaaaaaaaaaaa

SEQ ID NO: 1280 - protein, 380 aa, Homo sapiens
MALKVATVAGSAAKAVLGPALLCRPWEVLGAHEVPSRNIFSEQTIPPSAKYGGRHTVTMIPGDGIGPELMLHVKSVFRHACVPVDFEEVHVSSNADEEDIRNAIMAIRRNRVALKGNIETNHNLPPSHKSRNNILRTSLDLYANVIHCKSLPGVVTRHKDIDILIVRENTEGEYSSLEHESVAGVVESLKIITKAKSLRIAEYAFKLAQESGRKKVTAVHKANIMKLGDGLFLQCCREVAARYPQITFENMIVDNTTMQLVSRPQQFDVMVMPNLYGNIVNNVCAGLVGGPGLVAGANYGHVYAVFETATRNTGKSIANKNIANPTATLLASCMMLDHLKLHSYATSIRKAVLASMDNENVRFPSHPTLLPRPVSPCSLL

SEQ ID NO: 1281 - DNA, 3496 bp, Homo sapiens
gaattctatggagtgtaattttgtgtatgaattatatttttaaaacattgaagagttttcagaaagaaggctagtagagttgattactgatactttatgctaagcagtacttttttggtagtacaatattttgttaggcgtttctgataacactagaaaggacaagttttatcttgtgataaattgattaatgtttacaacatgactgataattatagctgaatagtccttaaatgatgaacaggttatttagtttttaaatgcagtgtaaaaagtgtgctgtggaaattttatggctaactaagtttatggagaaaataccttcagttgatcaagaataatagtggtatacaaagttaggaagaaagtcaacatgatgctgcaggaaatggaaacaaatacaaatgatatttaacaaagatagagtttacagtttttgaactttaagccaaattcatttgacatcaagcactatagcaggcacaggttcaacaaagcttgtgggtattgacttcccccaaaagttgtcagctgaagtaatttagcccacttaagtaaatactatgatgataagctgtgtgaacttagcttttaaatagtgtgaccatatgaaggttttaattacttttgtttattggaataaaatgagattttttgggttgtcatgttaaagtgcttatagggaaagaagcctgcatataattttttaccttgtggcataatcagtaattggtctgttattcaggcttcatagcttgtaaccaaatataaataaaaggcataatttaggtattctatagttgcttagaattttgttaatataaatctctgtgaaaaatcaaggagttttaatattttcagaagtgcatccacctttcagggctttaagttagtattactcaagattatgaacaaatagcacttaggttacctgaaagagttactacaaccccaaagagttgtgttctaagtagtatcttggaaattcagagagatactcatcctacctgaatataaactgagataaatccagtaaagaaagtgtagtaaattctacataagagtctatcattgatttcttttggtggtaaaaatcttagttcatgtgaagaaatttcatgtgaatgttttagctatcaaacagcactgtcacctactcatgcacaaaactgcctcccaaagacttttcccaggtccctcgtatcaaaacattaagagtataatggaagatagcacgatcttgtcagattggacaaacagcaacaaacaaaaaatgaagtatgacttttcctgtgaactctacagaatgtctacatattcaactttccccgccggggtgcctgtctcagaaaggagtcttgctcgtgctggtttttattatactggtgtgaatgacaaggtcaaatgcttctgttgtggcctgatgctggataactggaaactaggagacagtcctattcaaaagcataaacagctatatcctagctgtagctttattcagaatctggtttcagctagtctgggatccacctctaagaatacgtctccaatgagaaacagttttgcacattcattatctcccaccttggaacatagtagcttgttcagtggttcttactccagcctttctccaaaccctcttaattctagagcagttgaagacatctcttcatcgaggactaacccctacagttatgcaatgagtactgaagaagccagatttcttacctaccatatgtggccattaacttttttgtcaccatcagaattggcaagagctggtttttattatataggacctggagatagggtagcctgctttgcctgtggtgggaagctcagtaactgggaaccaaaggatgatgctatgtcagaacaccggaggcattttcccaactgtccatttttggaaaattctctagaaactctgaggtttagcatttcaaatctgagcatgcagacacatgcagctcgaatgagaacatttatgtactggccatctagtgttccagttcagcctgagcagcttgcaagtgctggtttttattatgtgggtcgcaatgatgatgtcaaatgcttttgttgtgatggtggcttgaggtgttgggaatctggagatgatccatgggtagaacatgccaagtggtttccaaggtgtgagttcttgatacgaatgaaaggccaagagtttgttgatgagattcaaggtagatatcctcatcttcttgaacagctgttgtcaacttcagataccactggagaagaaaatgctgacccaccaattattcattttggacctggagaaagttcttcagaagatgctgtcatgatgaatacacctgtggttaaatctgccttggaaatgggctttaatagagacctggtgaaacaaacagttcaaagtaaaatcctgacaactggagagaactataaaacagttaatgatattgtgtcagcacttctaaatgctgaagatgaaaaaagagaggaggagaaggaaaaacaagctgaagaaatggcatcagatgatttgtcattaattcggaagaacagaatggctctctttcaacaattgacatgtgtgcttcctatcctggataatcttttaaaggccaatgtaattaataaacaggaacatgatattattaaacaaaaaacacagatacctttacaagcgagagaactgattgataccattttggttaaaggaaatgctgcggccaacatcttcaaaaactgtctaaaagaaattgactctacattgtataagaacttatttgtggataagaatatgaagtatattccaacagaagatgtttcaggtctgtcactggaagaacaattgaggaggttgcaagaagaacgaacttgtaaagtgtgtatggacaaagaagtttctgttgtatttattccttgtggtcatctggtagtatgccaggaatgtgccccttctctaagaaaatgccctatttgcaggggtataatcaagggtactgttcgtacatttctctcttaaagaaaaatagtctatattttaacctgcataaaaaggtctttaaaatattgttgaacacttgaagccatctaaagtaaaaagggaattatgagtttttcaattagtaacattcatgttctagtctgctttggtactaataatcttgtttctgaaaagatggtatcatatatttaatcttaatctgtttatttacaagggaagatttatgtttggtgaactatattagtatgtatgtgtacctaagggagtagtgtcactgcttgttatgcatcatttcaggagttactggatttgttgttctttcagaaagctttgaatactaaattatagtgtagaaaagaactggaaaccaggaactctggagttcatcagagttatggtgccgaattgtctttggtgcttttcacttgtgttttaaaataaggatttttctcttatttctccccctagtttgtgagaaacatctcaataaagtgcttt

SEQ ID NO: 1282 - protein, 618 aa, Homo sapiens
MHKTASQRLFPGPSYQNIKSIMEDSTILSDWTNSNKQKMKYDFSCELYRMSTYSTFPAGVPVSERSLARAGFYYTGVNDKVKCFCCGLMLDNWKLGDSPIQKHKQLYPSCSFIQNLVSASLGSTSKNTSPMRNSFAHSLSPTLEHSSLFSGSYSSLSPNPLNSRAVEDISSSRTNPYSYAMSTEEARFLTYHMWPLTFLSPSELARAGFYYIGPGDRVACFACGGKLSNWEPKDDAMSEHRRHFPNCPFLENSLETLRFSISNLSMQTHAARMRTFMYWPSSVPVQPEQLASAGFYYVGRNDDVKCFCCDGGLRCWESGDDPWVEHAKWFPRCEFLIRMKGQEFVDEIQGRYPHLLEQLLSTSDTTGEENADPPIIHFGPGESSSEDAVMMNTPVVKSALEMGFNRDLVKQTVQSKILTTGENYKTVNDIVSALLNAEDEKREEEKEKQAEEMASDDLSLIRKNRMALFQQLTCVLPILDNLLKANVINKQEHDIIKQKTQIPLQARELIDTILVKGNAAANIFKNCLKEIDSTLYKNLFVDKNMKYIPTEDVSGLSLEEQLRRLQEERTCKVCMDKEVSVVFIPCGHLVVCQECAPSLRKCPICRGIIKGTVRTFLS

SEQ ID NO: 1283 - DNA, 6060 bp, Homo sapiens
cgtgtcgtcgctgctggcacttcaggctctgcctctcccactaggtctggatggaggataccttaaagtgaaatgacagaccaggagaataacaacaacatctcaagtaacccctttgctgctctttttggctccctggctgatgccaaacagtttgcggcaatccaaaaagagcagctgaagcaacaatctgatgaactcccagctagcccagatgactcggataatagcgtgtcagagagcctggatgaattcgattactctgtggctgagattagccgctcattccgatcacagcaggaaatatgtgagcaactcaacatcaatcacatgatccaaaggatcttccttattactctggacaacagtgatcccagcttgaaaagcgggaatggcatccctagccgttgtgtgtatttggaagaaatggcagtagagctagaagatcaagactggcttgatatgagcaatgttgagcaggccctcttcgctcgcttattacttcaagatccaggcaaccacttaattaacatgacttcttctacaacgctaaatctctctgctgatcgagatgcaggagagaggcacattttttgttacctttactcctgcttccagagagccaaggaagagattaccaaagttccagagaacctgctaccctttgcagtgcagtgcagaaacctcactgtgtccaatacccgaacagttcttctcaccctagagatctatgttgaccaaaacatccatgagcaactggtagatttgatgttagaagccatccagggagcccgtgagtacatgaacaagatctattttgaagatgtaactgagtttctggaagaggtcattgaagccttgatattggatgaggaagttagaacatttccagaagtcatgattccagtgtttgatattttattgggccgaataaaagatctagagctctgtcagatccttttgtatgcatatctggatattcttctctatttcactaggcaaaaagatatggcaaaggtttttgtagaatacattcagcccaaggaccctaccaatgggcaaatgtaccagaagaccttgctgggagtaattctgagtatctcctgcttattaaagactccgggtgttgtagaaaatcatggctactttttgaatccatctcgttccagcccccaggagatcaaagtacaggaggccaacatccatcagttcatggctcagttccacgaaaagatctaccagatgctgaagaacttactccagctctctccagaaaccaaacactgtatcttgtcctggcttggaaactgtttgcatgcaaatgcaggccgcaccaagatttgggccaatcagatgccagaaatctttttccaaatgtatgcctcagatgctttctttctgaatctgggtgctgctctcctgaagctatgccagccattttgcaaacccagatcctctcggctcctcacctttaatcccacatactgtgccctcaaggagttgaatgatgaagaacgaaaaattaaaaatgtacacatgagaggtttggacaaagaaacctgtttgatcccagctgtgcaggagccgaagtttccacagaactacaaccttgtaacagagaaccttgctctgacagagtacaccttgtacttgggatttcacaggttgcatgatcagatggtaaaaatcaaccaaaatctgcatcggctgcaggttgcctggcgggatgctcagcaaagttctagccctgctgctgacaatcttcgtgagcagtttgaacgactgatgaccatctatctttctaccaagactgccatgacagagccacaaatgctacaaaactgcctaaacttgcaggtgtccatggctgttctactggttcaactggccataggcaatgagggctcacagccaatagagctaacctttcctttgccagatggctacagctctttggcttatgtgccagaattttttgcagataacctgggtgattttctcatttttctccgccgctttgccgatgacattttggagacatcagcagattccctggagcatgtccttcactttatcaccattttcactggaagcatagaaagaatgaagaatccccacctgagggccaaactagcagaggtgttggaagcagtgatgccccacctggatcagaccccaaatcccttggtatccagtgtgttccaccggaaacgtgtgttctgcaactttcagtatgcaccccaacttgcagaggctctaatcaaggtttttgtggacatcgaatttacaggagacccccatcaatttgaacagaagtttaattaccgccgtcccatgtatcctatcctaagatacatgtgggggacagatacctatcgggagagcattaaggatttggctgactatgcctctaagaatttagaagccatgaatcccccacttttcctccgctttcttaacctgctaatgaatgatgccatcttccttttggatgaagccatacagtatttgagcaagataaagattcagcaaattgagaaggatcgaggtgaatgggatagtctgactccagaagcccgccgagaaaaggaggctggcctacagatgtttggacagctggcacgtttccataacatcatgtccaatgaaacaatcggtacccttgcctttctcacatcagagatcaagtcactctttgtgcatcccttcctggctgagcgcatcatctccatgttgaactacttcctgcaacacctggttggccccaagatgggtgccttaaaagtcaaggacttcagcgaatttgacttcaaaccccagcagcttgtatcagatatctgcactatctacttaaatcttggggatgaggagaatttctgtgccactgtgcccaaggatggacgttcctattccccaactctctttgcacagacagttcgagtcttgaagaaaataaataagcctgggaatatgattatggctttcagcaacttggcagagagaatcaagtctcttgcagacctccaacaacaggaagaggaaacctatgcagatgcctgtgatgagttcctggatcccattatgagcacactgatgtgtgaccctgtggtgctgccatcttccagagtcactgtggatagatccaccattgcaagacatttgctcagtgaccaaacagatccctttaaccgtagtcccctcaccatggaccagatccggccaaacacagaactaaaagaaaaaatccaacggtggcttgcagagaggaaacaacaaaaggagcaacttgaatagatactgtgaactaaccaaaccaaaaccaaccccagagtgcagataaacaattgtttgtggtttctctctttctggttctgttccttttctttcttcttttctttttctttttttttttttttttactaaattagagaactgctcttgctgaaattatgatagttaagattcctaagaacttgacaatgctcccctggcttgcaggaaattatacttattatagcatcaccaagtttagaaatcatcactaattttcaccctctgttgtctcttcatattcttcttccttttcctaaatgaaattatattatttcaactactaaaacttcccgccaccctgctatttctcttccaattactgttcaaacatttttggtgagtgctgcttttataaatatgtgatgtcacatatttcagtgacagctgatgttatcagaaaaatcctgttatcctgtgtatttactagtcctcatgatctagacttaaccccttttctgtgttacagagtaacttcacataaaagcagatacctttaagtttgtgtagacttctgaataagatgatagacgagaatttttttaaaaaaaggaatttaaaggaatcttgtgcaacttctgttgatagctcttaattttgttatacagtctttttaatgaggattggtagggcaatcctaccaattgatgggggtgaggagactgttgggcccttattctcttatgaaaatctgtttctacaaggactaggcctaagtagatttaggcaacgggtatcatatccatgaaaaatgtcattttaagacactaatatcaacagtatatctcagtgtgtgagatatataaatacacatacaccccatgtgcttttttgttggtttagtgtaaactgagtaccactttatattttctcttccatagtgagatgtatgcagtatgtggccatgtttactaacatactcattcttcacaaaattctgagattataaaatgtatatagttaatatttgtttgagcttgtaacctgacttctaagagctacttctaacacagccttaggtcttcaattaacaaagtaggaagttgagcacaaccttgtccacagccattttaaatatccacttagccctgtgtagttggtaggtggacaccactttcataagtgaacttgagctcactactcaattgtgcagcttaatatgctgactagggacattcccctatggattatctttatatcactgtctttctaagcccagagatgtcataagtgacaagaaaagtgataggatcaagaaatgggtgtcactgcttcatttggaacatgttattaactatggtctctttcaaataaatagtagttttatatttcaacacaagttgctataagcagtccttgatgggtttttgattgcatcagctggaaagcctcaaatctaagagggcttcccatcctagatataaaataggtgttgcctattgctgtgcttataaaatgaaaaaggaaattgaggacacttttgcaaatgccagaatgtaagattcattcagtgtgctccctgggcctttatggcatgggttgacaggatttgtttattttctaaaattagcttcattcaatatttatcatcctcctttccctctctgagaatgaactatgtataaaataagcttctgcctatttgcatttatcttccaaacccaatctagtaggatgttctcattttaaaaacgaggggaaaagaccagagtttttcaggagaaaactggaggaaaatgggcacaaaaactcagaaggcagctattcccagcagcttcctagttaacaacccccatgctgcctccagtctttgtctgtattcttctgtatttaaccttcagattgtaagccttttctggcaagcttttcttctttttttaaactcttttcctgaaactttttatgaatggctatggcaccattaatgctgctgaatatctttaaactctgcacaagcaagtgtgtagcttaaggccactactggtaaggaaaccaagtgtcctctgtgccttttttctttctgtgaagtaatttaagaatatccaaaaaaattagactttaaaaagttatcttggtacaacaccgtgtgtatatacacttggaagcttaaaaaggtgttttgtctggaacttagaagcagctctaaatctagtagagcagactttctaacatacctagttttgtgtattggctttgctggagtatgatagcaaaatgaagactcttttactcagctctggtattgctcataacttaccaagaggctaatactaaacttggaaaattgtttaagtatgttttatcaagcagtctgggttttgttttttaatatactttttaatggatatgtgaaaactgaaggaaatgttaaaggttttttaatggtgcaagtgaaggtgccagttgctatttgatatcacactctacaaaagcttcattactttatttgatggtggttgctaagcagccattgcacagagcataagtctactgggtgcctttacatgccagaggctgatgctgcactgttgatgtcatgtgaggaaataatgcacatgctctaactgctcaacaggaaatgaacctagaaacagaaaatgaaaaggttgattgaaataaaacttgatcaacgcgactgtattttgaaacattccaggaaggttacttcttgtcaaacttgcctggcagtgtttgttcaaaacttgtatttaataaatgaacatctgactt

SEQ ID NO: 1284 - protein, 1073 aa, Homo sapiens
MTDQENNNNISSNPFAALFGSLADAKQFAAIQKEQLKQQSDELPASPDDSDNSVSESLDEFDYSVAEISRSFRSQQEICEQLNINHMIQRIFLITLDNSDPSLKSGNGIPSRCVYLEEMAVELEDQDWLDMSNVEQALFARLLLQDPGNHLINMTSSTTLNLSADRDAGERHIFCYLYSCFQRAKEEITKVPENLLPFAVQCRNLTVSNTRTVLLTLEIYVDQNIHEQLVDLMLEAIQGAREYMNKIYFEDVTEFLEEVIEALILDEEVRTFPEVMIPVFDILLGRIKDLELCQILLYAYLDILLYFTRQKDMAKVFVEYIQPKDPTNGQMYQKTLLGVILSISCLLKTPGVVENHGYFLNPSRSSPQEIKVQEANIHQFMAQFHEKIYQMLKNLLQLSPETKHCILSWLGNCLHANAGRTKIWANQMPEIFFQMYASDAFFLNLGAALLKLCQPFCKPRSSRLLTFNPTYCALKELNDEERKIKNVHMRGLDKETCLIPAVQEPKFPQNYNLVTENLALTEYTLYLGFHRLHDQMVKINQNLHRLQVAWRDAQQSSSPAADNLREQFERLMTIYLSTKTAMTEPQMLQNCLNLQVSMAVLLVQLAIGNEGSQPIELTFPLPDGYSSLAYVPEFFADNLGDFLIFLRRFADDILETSADSLEHVLHFITIFTGSIERMKNPHLRAKLAEVLEAVMPHLDQTPNPLVSSVFHRKRVFCNFQYAPQLAEALIKVFVDIEFTGDPHQFEQKFNYRRPMYPILRYMWGTDTYRESIKDLADYASKNLEAMNPPLFLRFLNLLMNDAIFLLDEAIQYLSKIKIQQIEKDRGEWDSLTPEARREKEAGLQMFGQLARFHNIMSNETIGTLAFLTSEIKSLFVHPFLAERIISMLNYFLQHLVGPKMGALKVKDFSEFDFKPQQLVSDICTIYLNLGDEENFCATVPKDGRSYSPTLFAQTVRVLKKINKPGNMIMAFSNLAERIKSLADLQQQEEETYADACDEFLDPIMSTLMCDPVVLPSSRVTVDRSTIARHLLSDQTDPFNRSPLTMDQIRPNTELKEKIQRWLAERKQQKEQLE

SEQ ID NO: 1285 - DNA, 6837 bp, Homo sapiens
ccgcgcgccatccgccaccctactggacacgggcgagagcgtcgccgccgtagcctccggagaagacaagggcatcgccgcctcagccgccgccgccgccgttttcgcctgcagctgctcaccggatcctcagtcttccacaatgaaccctgtttacagccccgtgcagcctggggctccttatggcaaccctaagaacatggcctacacgggttaccccacagcctatccagcagctgcccctgcctacaatcccagcctgtaccccaccaatagtcccagttatgctccagagtttcagttcctgcattcagcttatgcaactctgctgatgaaacaggcctggccacagaactcgtcttcctgtggcactgaaggcaccttccacctcccagtggacaccgggaccgagaaccgaacttaccaagcatcctctgcggctttcagatatactgcggggacaccatacaaggtcccaccgacccagagtaacactgctccacccccctactccccatcacccaacccctatcagacggccatgtatccaatcagaagtgcctacccccagcagaatctgtatgcccagggagcctactacacacagccggtgtatgctgcccagcctcatgtcatccaccacaccacggtcgtccagcccaacagcattccctctgctatctacccagcacctgttgccgccccgaggaccaacggtgtggccatgggcatggtggcaggcaccaccatggcaatgtcagcaggtaccctgctgactacaccccagcacacggcgattggggcacaccctgtctccatgccaacatatagggcccaaggaacccctgcgtacagctacgtgcccccacactggtaaagcctgcagcccatccaaatctggagtcacacattgtatgcaactactcaagtcttacaccggtgctggagcagttccctagcagcaccacctctatttgcaagaagagacaacggaagtgcaagggtcactttatgcatctttaatggttttgatttttatttttggtttttgtaaaagctgctttttctaatctcctgcctctccccaactgtccccctcttagcccctgcccttccagctctatccccttcctcctacctgaccaggccatgtcctctctgctcttccctaagtgtcctgtccctggggatcccagtctagaggcaagcagagagtagggtttattgcagtggttcatctgaaggctggattccatttgaagagcataaacagatgtggtccagggtaggaactcagagctgttgagcaggctacatctctaggggagtgttctggttgttttttcttaagcaagattagttcaggacattcccatgtcccagacacaaatgaaatgtctcctgagaaccattgcaacagaccaagaacaaaaccacctgagtatgtaggcgtgttattagcagcttaataccccaggctgagaacctggggaaaaaagtctttagaatttgggggagggtggggggagggagggcattgtggggaaggagagggaagaagggaggagcggtgcttgcctcatggctttggtttgaaaggtctctggccaaagcatctggccctggaccttctgatttgcacagtgatgttaactgacctggcacttcctcaaaaggtgattttgtccttagacctgccaagcggctgcagggtggtaggatcccagcatcccgaggccttggaaggccggatgccctgtgtcatccagacttcagcctctgagctgtcatggacccactctgatgaggagcttcctcctgattggagtgggaacctagggcatttctctcccttttcttttgcccttcccagtgccaggactcacctgtctgaccatagagcttgcaggcaggccaagctcttggttacctgtgccattcatggcccaagtgaaggaaccacattccaggtgggtgctggcagctctgaaggtgaggatagtgaaggaaaagcaatagcaataaacatttcatagactcatggaactgaagggaccttagcaatcatctcatccatttccctatttggcagatgaggaaactgaggcccagagaagcggaaaggacttccctagaccttacagtaaattagcattaaatgcagccttcctacctagtgggcaccttgcttacaaaaatttacctagggacggattggcttggttttgtaaaaatttaagtcggcagcgcccatacctggtgagtctggaatggtctctgggctcctgtttctgctcttttcctccacggactccaaaggcgggggttgaagactgggcagaggctacatgggggcggatggcaggaacagaaattgcaaatgaagaaatagcatttggaaattctgtgaagacatctggaacttccgtcctgtacctgactccacctccaggagaaggagcaggtggactggccgaaaaggagaggccatgcttttaggacagtagcccctcatcccgagaggagaggaagaggaggaagacagtgggagtcatcaggagaggagaatgaggatgaggcccaggagacaggctcatctgggagaagagggacccctgggacgaggaggtccctgctagtctcagccaggagcctggattgcccagcagcagcctccggcacccagcgcttggctgggccagcagcccctctgggggtggggcacgaacattttattgtgaaaaatgggatcattgacaacatttgggactttaaaaaactgctttcatttaaaattcatgcaaacttggacatatccttaccccaacctcccatgtctccctaagggagggaaaaatcaggaaacccttgggttggaaggagctcagaagctgtctagccattcccaggagggtaaagcccatcagcctccttggcctagagccaggagtttgggggcccaccttcctgggcttccaaggaactttaggaccagtaagaaaaaattcagctgttctaaattatctgttctgggtgctgatgaggtttcactttaaaacaatagaaagttttccagtgttaattcactttttgcaaatacctccttccaccctctttggttttgtaaaggtgggtgaaggttgttctagattatgtcatacgtgtttgaaaaatgccaaaataataataatgataataataatagaaacctttggatttgtcaggtgcatcacagaggtcaaagcacttcacggcctttcatgtactcgccctgagagggacagggttagagttattacagtcaattgacaaatgaggaaacaggttatggaagggaacaggcccacagtgagcagcatgctggtatccgccaggcttcccagaaccctgctgcctccatgtgggctggggtggaaccacagagaggagaaaggaagaagaggagacctaggaatgaccttgtaacttttgttctttcaacaccagtaagtaaaactaacagctggacctcacagttcacagaacagttgaacataaattatctggtttaacccgatgaaatagaggttatttctcctatttgatccataaggaaatcaaggcttggaaaagtcaagtgacttgctaataagtgacagagccactcgaatcccaggctgtctgctgtctcgttcccctccatctgatccccacacaggctcacgtactgaagcatctgtgctctgtgccctatcttagcacctactatgtaattcaagagcaaaggggggccccaaggtgaaaataaggcactgaaaggctgtggtctggaagagcccaggtccagcacccctttttcagtatgagccccagttcagccggcctcagcctcttgctgtgatggagatccacaagcctagccaagcttggggagtcactgcaaaaggactgagcccaggagagcggggacagtcatgtgcctccggtaggatgggcacagttactggtaaggtcacagagatctagtgggaggtaccataggtagatacctccaaagattctagatggcacggtggtcaagctagacaaaaagtcagagctggaagggccgtctcattgaaggcaggcaagcaagagaggacaagggatgtagccgcctgacagtgagctacagcactggccccaggatgcaaacccctctctcctcctcatgccactgcctctccccaagtgcaacacctatggccaggatcaggggtacagatggctcgttaccagccaacccttttgaattcttctacttctacctgaccccctctcctcactggcctggggtcaagaagtttgagtctgggagctggattgcctgcaaatagtgaaagcctgaaacataatggtttgccatgttttgaaaaaaaatgcatatttaatttcttcctcatgagataggacagttgctgttctttcttacctggcaatgaccctaaaatgtatatcctctttcctgaatatttagcagagacacacacacctgtccagagcgtttttggtatgcaaagtactttgacattggttgccaaagtcctccattttatagatgaaaaaactaaggctcaggaggcttgagacttgctaaaaggtcacacagcttggaagtgattcttcaaatcctctgctctttctgctgccacctgctgggtctcttggcaagcatggagggaggggctaactgtactttatagagctgggaagcccagtctctgagctgagcagatttgtatgaactgctttgggccaggacctgtaatgagccctggggagggacccagaggcacatctaactggcagcacaaggaggatgagaatttgcaactaaaggcctcacttggacaaaacactttggggtcacaatgcccaggaccgaagacatgttcaaggacagcacgaggcatctttctattgggagacccatgtccttggtaagcctgcacacctggcttcctaatccctgagagcctgcccactgtccagatccagtgagttggtacaaaacgtacagactgaagtccctgggcttgcttttcccatgggtgaggaccagaaccagactctgagcatccttacccctggccacccgaattgttccaagtttgaggtaccccgttcccagagatctgggggtccttctttggagggcttgctttgttctgatggccttcagaaaggaatcacatgaagtataaaaggacaggccccttggtcaccaagttttggctcctcatacagataggactcatccaggttcccagcgaggcactgactaagcgaggctcagagcttccatatcaaattcctcagctttgttctgtgcccagagggggtgggccccattctgggccctgtgaactttgtcttatatatcaccatctgtatcagaattcctcctcaattgcagttaagtgaaaatacgtggaagtctgcttttccatcctgtattctcccacatcactactggctgtgcggcccccgctgcttgccaagcttgggaatccagagaggggcagtagtagagtgggccagttgggacccacccgcagagctgaagaaacacgccagactaactgatgggattccacaccggagcctctgagcgcacaggcaggcatgccaagggggctgcagggtttgtcctttacttatctgcccctttcctagaaaactcctcgtttctgaaattaggcattatatggttccaggacccagccttcaaaattcctggcaggccagcttcaacattccatggccagccctgcctaagccagacttgggtcccagtccctcagtctctccagtggatatcttctgtggtgcatgctgttgagtccaacccaaaggccaaccgaggcacacaggagttgggactggctgccacaaagctagaaagggacaaaacagcacttgcttccctatggccacatggatagtccctggatatccttgctgtggtagaggtcctctacccattccagccactgatagcagggggattttccttcctaaggagaacagatgtaacagctttgcaaagtaccggcccataggaatcaaatgggtgagatcagctttgggcctgaccccagcaagaccagcatctccagaccccagcctttctcctcaggcctaagagagtcagggaaagagaggagactgtcccagagaccttctcctcgggtcagccagatagtctggatctatggtgtgactcaagctcctccttacccagggtgggtaaggccaggcctctagctacttggagttgtctgtaataatcttgaaaggcccaagggcctgtccccatcctgacttaaaggcatctgcttccctgtttcatatcacatgacggagaaacctgttctcatggcatgtaacatccctgtgaagagagcgttgtatatgattttgtattttttaattcattttaatctacaggttggaatctaatttttaaattttattggaactcacattttaaaaagaaataaaatttaaaataataataataataataataataataaacctttgaccagtgtcttccaagtagtttgatcaaagaatttataggtgttttcaaaacacagtccggagtgtaaagattggaaagccccatggccttgcctgtgtgtatgaagtgtaaatctggttttgttttgttgttttggattcttttgggtttttgttttgttttgaagatcagacagtgatcactctgaaagattgaagccaagaatttgtaactatggtatttactgtaagctgtagaacactcaataactattaaaaaaaaaattccccccc

SEQ ID NO: 1286 - protein, 291 aa, Homo sapiens
RAPSATLLDTGESVAAVASGEDKGIAASAAAAAVFACSCSPDPQSSTMNPVYSPVQPGAPYGNPKNMAYTGYPTAYPAAAPAYNPSLYPTNSPSYAPEFQFLHSAYATLLMKQAWPQNSSSCGTEGTFHLPVDTGTENRTYQASSAAFRYTAGTPYKVPPTQSNTAPPPYSPSPNPYQTAMYPIRSAYPQQNLYAQGAYYTQPVYAAQPHVIHHTTVVQPNSIPSAIYPAPVAAPRTNGVAMGMVAGTTMAMSAGTLLTTPQHTAIGAHPVSMPTYRAQGTPAYSYVPPHW

SEQ ID NO: 1287 - DNA, 1103 bp, Homo sapiens
cttcggtcctgctgtagtgccttctgcgccaggcccggttcaatcagcggccacaactgtctagggctcagacaccaccagccaatgagggagggcacgtggagccgcgtctgggctcgcggctcctgaccaatggggaagtggcatgtgggagggcgccggggttccccccgccaatggggagctacggcgcgcggccgggacttggaggcggtgcggcgcggcgggtgcggttcagtcggtcggcggcggcagcggaggaggaggaggaggaggaggatgaggaggatgaggaggatgtgggccacgcaggggctggcggtgcgcgtggctctgagcgtgctgccgggcagccgggcgctgcggccgggcgactgcgaagtttgtatttcttatctgggaagattttaccaggacctcaaagacagagatgtcacattctcaccagccactattgaaaacgaacttataaagttctgccgggaagcaagaggcaaagagaatcggttgtgctactatatcggggccacagatgatgcagccaccaaaatcatcaatgaggtatcaaagcctctggcccaccacatccctgtggagaagatctgtgagaagcttaagaagaaggacagccagatatgtgagcttaagtatgacaagcagatcgacctgagcacagtggacctgaagaagctccgagttaaagagctgaagaagattctggatgactggggggagacatgcaaaggctgtgcagaaaagtctgactacatccggaagataaatgaactgatgcctaaatatgcccccaaggcagccagtgcaccgaccgatttgtagtctgctcaatctctgttgcacctgagggggaaaaaacagttcaactgcttactcccaaaacagcctttttgtaatttattttttaagtgggctcctgacaatactgtatcagatgtgaagcctggagctttcctgatgatgctggccctacagtacccccatgaggggattcccttccttctgttgctggtgtactctaggacttcaaagtgtgtctgggatttttttattaaagaaaaaaaatttctagctgtcaaaaaaaaaaa

SEQ ID NO: 1288 - protein, 234 aa, Homo sapiens
MGKWHVGGRRGSPRQWGATARGRDLEAVRRGGCGSVGRRRQRRRRRRRRMRRMRRMWATQGLAVRVALSVLPGSRALRPGDCEVCISYLGRFYQDLKDRDVTFSPATIENELIKFCREARGKENRLCYYIGATDDAATKIINEVSKPLAHHIPVEKICEKLKKKDSQICELKYDKQIDLSTVDLKKLRVKELKKILDDWGETCKGCAEKSDYIRKINELMPKYAPKAASAPTDL

SEQ ID NO: 1289 - DNA, 993 bp, Homo sapiens
attccacgttcttaactgttccattttccgtatctgcttcgggcttccacctcatttttttcgctttgcccattctgtttcagccagtcgccaagaatcatgaaagtcgccagtggcagcaccgccaccgccgccgcgggccccagctgcgcgctgaaggccggcaagacagcgagcggtgcgggcgaggtggtgcgctgtctgtctgagcagagcgtggccatctcgcgctgcgccgggggcgccggggcgcgcctgcctgccctgctggacgagcagcaggtaaacgtgctgctctacgacatgaacggctgttactcacgcctcaaggagctggtgcccaccctgccccagaaccgcaaggtgagcaaggtggagattctccagcacgtcatcgactacatcagggaccttcagttggagctgaactcggaatccgaagttggaacccccgggggccgagggctgccggtccgggctccgctcagcaccctcaacggcgagatcagcgccctgacggccgaggcggcatgcgttcctgcggacgatcgcatcttgtgtcgctgaagcgcctcccccagggaccggcggaccccagccatccagggggcaagaggaattacgtgctctgtgggtctcccccaacgcgcctcgccggatctgagggagaacaagaccgatcggcggccactgcgcccttaactgcatccagcctggggctgaggctgaggcactggcgaggagagggcgctcctctctgcacacctactagtcaccagagactttagggggtgggattccactcgtgtgtttctattttttgaaaagcagacattttaaaaaatggtcacgtttggtgcttctcagatttctgaggaaattgctttgtattgtatattacaatgatcaccgactgaaaatattgttttacaatagttctgtggggctgtttttttgttattaaacaaataatttagatggtgaaaaaaaaaa

SEQ ID NO: 1290 - protein, 154 aa, Homo sapiens [sequence omitted]

SEQ ID NO: 1291 - DNA, 645 bp, Homo sapiens
ctcctgcagcgtctggggtttccgttgcagtcctcggaaccaggacctcggcgtggcctagcgagttatggcgacgaaggccgtgtgcgtgctgaagggcgacggcccagtgcagggcatcatcaatttcgagcagaaggaaagtaatggaccagtgaaggtgtggggaagcattaaaggactgactgaaggcctgcatggattccatgttcatgagtttggagataatacagcaggctgtaccagtgcaggtcctcactttaatcctctatccagaaaacacggtgggccaaaggatgaagagaggcatgttggagacttgggcaatgtgactgctgacaaagatggtgtggccgatgtgtctattgaagattctgtgatctcactctcaggagaccattgcatcattggccgcacactggtggtccatgaaaaagcagatgacttgggcaaaggtggaaatgaagaaagtacaaagacaggaaacgctggaagtcgtttggcttgtggtgtaattgggatcgcccaataaacattcccttggatgtagtctgaggccccttaactcatctgttatcctgctagctgtagaaatgtatcctgataaacattaaacactgtaatcttaaaaaaaaaaaaaaaaaa

SEQ ID NO: 1292 - protein, 154 aa, Homo sapiens [sequence omitted]

SEQ ID NO: 1293 - DNA, 2929 bp, Homo sapiens
gcggcttgttgataatatggcggctggagctgcctgggcatcccgaggaggcggtggggcccactcccggaagaagggtcccttttcgcgctagtgcagcggcccctctggacccggaagtccgggccggttgctgaatgaggggagccgggccctccccgcgccagtccccccgcaccctccgtcccgacccgggccccgccatgtccttcttccggcggaaagtgaaaggcaaagaacaagagaagacctcagatgtgaagtccattaaagcttcaatatccgtacattccccacaaaaaagcactaaaaatcatgccttgctggaggctgcaggaccaagtcatgttgcaatcaatgccatttctgccaacatggactccttttcaagtagcaggacagccacacttaagaagcagccaagccacatggaggccgctcattttggtgacctgggcagatcttgtctggactaccagactcaagagaccaaatcaagcctttctaagacccttgaacaagtcttgcacgacactattgtcctcccttacttcattcaattcatggaacttcggcgaatggagcatttggtgaaattttggttagaggctgaaagttttcattcaacaacttggtcgcgaataagagcacacagtctaaacacagtgaagcagagctcactggctgagcctgtctctccatctaaaaagcatgaaactacagcgtcttttttaactgattctcttgataagagattggaggattctggctcagcacagttgtttatgactcattcagaaggaattgacctgaataatagaactaacagcactcagaatcacttgctgctttcccaggaatgtgacagtgcccattctctccgtcttgaaatggccagagcaggaactcaccaagtttccatggaaacccaagaatcttcctctacacttacagtagccagtagaaatagtcccgcttctccactaaaagaattgtcaggaaaactaatgaaaagtatagaacaagatgcagtgaatacttttaccaaatatatatctccagatgctgctaaaccaataccaattacagaagcaatgagaaatgacatcatagcaaggatttgtggagaagatggacaggtggatcccaactgtttcgttttggcacagtccatagtctttagtgcaatggagcaagagcactttagtgagtttctgcgaagtcaccatttctgtaaataccagattgaagtgctgaccagtggaactgtttacctggctgacattctcttctgtgagtcagccctcttttatttctctgagtacatggaaaaagaggatgcagtgaatatcttacaattctggttggcagcagataacttccagtctcagcttgctgccaaaaagggccaatatgatggacaggaggcacagaatgatgccatgattttatatgacaagtacttctccctccaagccacacatcctcttggatttgatgatgttgtacgattagaaattgaatccaatatctgcagggaaggtgggccactccccaactgtttcacaactccattacgtcaggcctggacaaccatggagaaggtctttttgcctggctttttgtccagcaatctttattataaatatttgaatgatctcatccattcggttcgaggagatgaatttctgggcgggaacgtgtcgctgactgctcctggctctgttggccctcctgatgagtctcacccagggagttctgacagctctgcgtctcagtccagtgtgaaaaaagccagtattaaaatactgaaaaattttgatgaagcgataattgtggatgcggcaagtctggatccagaatctttatatcaacggacatatgccgggaagatgacatttggaagagtcagtgacttggggcaattcatccgagaatctgagcctgaacctgatgtaaggaaatcaaaaggatccatgttctcacaagctatgaagaaatgggtgcaaggaaatactgatgaggcccaggaagagctagcttggaagattgctaaaatgatagtcagtgacattatgcagcaggctcagtatgatcaaccgttagagaaatctacaaagttatgactcaaaacttgagataaaggaaatctgcttgtgaaaaataagagaacttttttcccttggttggattcttcaacacagccaatgaaaacagcactatatttctgatctgtcactgttgtttccaggagagaatgggagacaatcctagacttccaccataatgcagttacctgtaggcataattgatgcacatgatgttcacacagtgagagtcttaaagatacaaaatggtattgtttacattactagaaaattattagttttccaatggcaataacccatttatgagagtgttttagcctactggaatagacagggaccacatcctctgggaagcagataagcatagaactgatacttgatgcacactcgtagtggtaactcatccctaatcagcattgtaaagcaggtgccagaggtggtttgctttgtccttccaaagcaggtgagtcagccccaccgagagccaggcagctttgagtggcagcgtggtgctagcagcttcagcggaacagggtgagagttaattatgcagtcttcttgacagcggcattaatttggaaggaaactgacaagtcatgggtcaagtttcagtgacttcctccttcctctgatggcagtatatagttttcacattttaattcctcctcctgagatgcactatacttaaaaccattctctcccctgctaacagaagggtgtgaatctggtttactttgagcattaggatttgcccctttggaattctgcactccagttacttaactttcccttcagaatacatgtggaaaaaaaaaaaaaaa

SEQ ID NO: 1294 - protein, 662 aa, Homo sapiens
MRGAGPSPRQSPRTLRPDPGPAMSFFRRKVKGKEQEKTSDVKSIKASISVHSPQKSTKNHALLEAAGPSHVAINAISANMDSFSSSRTATLKKQPSHMEAAHFGDLGRSCLDYQTQETKSSLSKTLEQVLHDTIVLPYFIQFMELRRMEHLVKFWLEAESFHSTTWSRIRAHSLNTMKQSSLAEPVSPSKKHETTASFLTDSLDKRLEDSGSAQLFMTHSEGIDLNNRTNSTQNHLLLSQECDSAHSLRLEMARAGTHQVSMETQESSSTLTVASRNSPASPLKELSGKLMKSIEQDAVNTFTKYISPDAAKPIPITEAMRNDIIARICGEDGQVDPNCFVLAQSIVFSAMEQEHFSEFLRSHHFCKYQIEVLTSGTVYLADILFCESALFYFSEYMEKEDAVNILQFWLAADNFQSQLAAKKGQYDGQEAQNDAMILYDKYFSLQATHPLGFDDVVRLEIESNICREGGPLPNCFTTPLRQAWTTMEKVFLPGFLSSNLYYKYLNDLIHSVRGDEFLGGNVSPTAPGSVGPPDESHPGSSDSSASQSSVKKASIKILKNFDEAIIVDAASLDPESLYQRTYAGKMTFGRVSDLGQFIRESEPEPDVRKSKGSMFSQAMKKWVQGNTDEAQEELAWKIAKMIVSDIMQQAQYDQPLEKSTKL

SEQ ID NO: 1295 - DNA, 330 bp, Homo sapiens
cttttctccagagcgaggggagctgcatcagtggcttccagggcatgaacctccccaccgaatctggagagctttggatcctgggtgatgtcttcatccgccagtactttaccgtcttcgacagggcaaacaaccaggtcggcctggcccccgtggcttaagcctaagtctcttcagccacctcccaggaagatctggcctctgtcctgtgcccactttagatgtatctaattctcctgactgttcttcccaggggagtgtggaggtcttggccctgttccctgtcctaccaataacgtagaataaaaacataacccactgaaacaggtt

SEQ ID NO: 1296 - protein, 49 aa, Homo sapiens
SEGSCISGFQGMNLPTESGELWILGDVFIRQYFTVFDRANNQVGLAPVA

SEQ ID NO: 1297 - DNA, 1552 bp, Homo sapiens
ggcacgaggcgcccccgcagctgccgccgccgccagggcccggactcggacgcgtggtagcctagagtcctggggagcttctgtccacctgtcctgcagaggagtcgtttccagcccggctgccccaggatgggtgagttcaacgagaagaagacaacatgtggcaccgtttgcctcaagtacctgctgtttacctacaattgctgcttctggctggctggcctggctgtcatggcagtgggcatctggacgctggccctcaagagtgactacatcagcctgctggcctcaggcacctacctggccacagcctacatcctggtggtggcgggcactgtcgtcatggtgactggggtcttgggctgctgcgccaccttcaaggagcgtcggaacctgctgcgcctgtacttcatcctgctcctcatcatctttctgctggagatcatcgctggtatcctcgcctacgcctactaccagcagctgaacacggagctcaaggagaacctgaaggacaccatgaccaagcgctaccaccagccgggccatgaggctgtgaccagcgctgtggaccagctgcagcaggagttccactgctgtggcagcaacaactcacaggactggcgagacagtgagtggatccgctcacaggaggccggtggccgtgtggtcccagacagctgctgcaagacggtggtggctctttgtggacagcgagaccatgcctccaacatctacaaggtggagggcggctgcatcaccaagttggagaccttcatccaggagcacctgagggtcattggggctgtggggatcggcattgcctgtgtgcaggtctttggcatgatcttcacgtgctgcctgtacaggagtctcaagctggagcactactgaccctgccttgggccttgctgctgctgcacccaactactgagctgagaccactgagtaccaggggctgggctccctgatgacacccaccctgtgccatcaccataacctctggggaccccaacctcagaggcagcttcaagtgccttttgctgcgcaccaatgcccagcaggggaggtgaggggggctggcggggcgaagtttggggggtgttttgtggggctccccggacatactctctgcctggtggtcagatgcaggttggaaggggccttgctgagtggcgcaaggccgagcgttcccagcagggggagaaacccttcacaccccaggcccttcaggaactggggctttgccttgcagccacatggccccatcccagttggggaagccaggtgagctctgacccttgggcctgggcctctgcccctcccaacccagccgtcgtctccctcgacagcgcccctgctgtcttccccaccgcagtcaccaccacccgaaatgccacgtggtcactgtgcactgccctgttcatgtgcctctgcggggcagggccttcctggttttgtacactgctgtacccagatgcctacaaccatccctgccacatacaggtgctcaataaacacttgtagagcagatggaaaaaaaaaaaaaaaaaaa

SEQ ID NO: 1298 - protein, 253 aa, Homo sapiens [sequence omitted]

SEQ ID NO: 1299 - DNA, 1490 bp, Homo sapiens
ggcacgaggcgcccccgcagctgccgccgccgccagggcccggactcggacgcgtggtagccccaggatgggtgagttcaacgagaagaagacaacatgtggcaccgtttgcctcaagtacctgctgtttacctacaattgctgcttctggctggctggcctggctgtcatggcagtgggcatctggacgctggccctcaagagtgactacatcagcctgctggcctcaggcacctacctggccacagcctacatcctggtggtggcgggcactgtcgtcatggtgactggggtcttgggctgctgcgccaccttcaaggagcgtcggaacctgctgcgcctgtacttcatcctgctcctcatcatctttctgctggagatcatcgctggtatcctcgcctacgcctactaccagcagctgaacacggagctcaaggagaacctgaaggacaccatgaccaagcgctaccaccagccgggccatgaggctgtgaccagcgctgtggaccagctgcagcaggagttccactgctgtggcagcaacaactcacaggactggcgagacagtgagtggatccgctcacaggaggccggtggccgtgtggtcccagacagctgctgcaagacggtggtggctctttgtggacagcgagaccatgcctccaacatctacaaggtggagggcggctgcatcaccaagttggagaccttcatccaggagcacctgagggtcattggggctgtggggatcggcattgcctgtgtgcaggtctttggcatgatcttcacgtgctgcctgtacaggagtctcaagctggagcactactgaccctgccttgggccttgctgctgctgcacccaactactgagctgagaccactgagtaccaggggctgggctccctgatgacacccaccctgtgccatcaccataacctctggggaccccaacctcagaggcagcttcaagtgccttttgctgcgcaccaatgcccagcaggggaggtgaggggggctggcggggcgaagtttggggggtgttttgtggggctccccggacatactctctgcctggtggtcagatgcaggttggaaggggccttgctgagtggcgcaaggccgagcgttcccagcagggggagaaacccttcacaccccaggcccttcaggaactggggctttgccttgcagccacatggccccatcccagttggggaagccaggtgagctctgacccttgggcctgggcctctgcccctcccaacccagccgtcgtctccctcgacagcgcccctgctgtcttccccaccgcagtcaccaccacccgaaatgccacgtggtcactgtgcactgccctgttcatgtgcctctgcggggcagggccttcctggttttgtacactgctgtacccagatgcctacaaccatccctgccacatacaggtgctcaataaacacttgtagagcagatggaaaaaaaaaaaaaaaaaaa

SEQ ID NO: 1300 - protein, 253 aa, Homo sapiens
MGEFNEKKTTCGTVCLKYLLFTYNCCFWLAGLAVMAVGIWTLALKSDYISLLASGTYLATAYILVVAGTVVMVTGVLGCCATFKERRNLLRLYFILLLIIFLLEIIAGILAYAYYQQLNTELKENLKDTMTKRYHQPGHEAVTSAVDQLQQEFHCCGSNNSQDWRDSEWIRSQEAGGRVVPDSCCKTVVALCGQRDHASNIYKVEGGCITKLETFIQEHLRVIGAVGIGIACVQVFGMIFTCCLYRSLKLEHY

SEQ ID NO: 1301 - DNA, 1877 bp, Homo sapiens
ggcacgaggcgcccccgcagctgccgccgccgccagggcccggactcggacgcgtggtagcctagagtcctggggagcttctgtccacctgtcctgcagaggagtcgtttccagcccggctgccccaggatgggtgagttcaacgagaagaagacaacatgtggcaccgtttgcctcaagtacctgctgtttacctacaattgctgcttctggctggctggcctggctgtcatggcagtgggcatctggacgctggccctcaagagtgactacatcagcctgctggcctcaggcacctacctggccacagcctacatcctggtggtggcgggcactgtcgtcatggtgactggggtcttgggctgctgcgccaccttcaaggagcgtcggaacctgctgcgcctggtcaggagggcgcagggccacggggtgggggtggtgcagatgggcccaaggaggttgtcgctgcaggctttgaacctgtgccttgctgtgctcacctgggggggggtcacggtccttccacacctgcctagtcctgtgggtccccacgttcctgctggaccagctgagggaagacaccagctccgcaagaaagcttcagggagggtggccgcccctcagcccccacctggagcctggggagccggggtggggactctgctctgaggtgcactaggtctaggcactaggcctcagaacaagggtgcccttgtgctgccccccccagtacttcatcctgctcctcatcatctttctgctggagatcatcgctggtatcctcgcctacgcctactaccagcagctgaacacggagctcaaggagaacctgaaggacaccatgaccaagcgctaccaccagccgggccatgaggctgtgaccagcgctgtggaccagctgcagcaggagttccactgctgtggcagcaacaactcacaggactggcgagacagtgagtggatccgctcacaggaggccggtggccgtgtggtcccagacagctgctgcaagacggtggtggctctttgtggacagcgagaccatgcctccaacatctacaaggtggagggcggctgcatcaccaagttggagaccttcatccaggagcacctgagggtcattggggctgtggggatcggcattgcctgtgtgcaggtctttggcatgatcttcacgtgctgcctgtacaggagtctcaagctggagcactactgaccctgccttgggccttgctgctgctgcacccaactactgagctgagaccactgagtaccaggggctgggctccctgatgacacccaccctgtgccatcaccataacctctggggaccccaacctcagaggcagcttcaagtgccttttgctgcgcaccaatgcccagcaggggaggtgaggggggctggcggggcgaagtttggggggtgttttgtggggctccccggacatactctctgcctggtggtcagatgcaggttggaaggggccttgctgagtggcgcaaggccgagcgttcccagcagggggagaaacccttcacaccccaggcccttcaggaactggggctttgccttgcagccacatggccccatcccagttggggaagccaggtgagctctgacccttgggcctgggcctctgcccctcccaacccagccgtcgtctccctcgacagcgcccctgctgtcttccccaccgcagtcaccaccacccgaaatgccacgtggtcactgtgcactgccctgttcatgtgcctctgcggggcagggccttcctggttttgtacactgctgtacccagatgcctacaaccatccctgccacatacaggtgctcaataaacacttgtagagcagatggaaaaaaaaaaaaaaaaaaa

SEQ ID NO: 1302 - DNA, 1066 bp, Homo sapiens
ggctgcagaggggaaggcggctaccagtgtaaagccagagctgaggttcttgatagtccacaatgggtgaaccacagcaagtgagtgcacttccaccacctccaatgcaatatatcaaggaatatacggatgaaaatattcaagaaggcttagctcccaagcctccccctccaataaaagacagttacatgatgtttggcaatcagttccaatgtgatgatcttatcatccgccctttggaaagtcagggcatcgaacggcttcatcctatgcagtttgatcacaagaaagaactgagaaaacttaatatgtctatccttattaatttcttggaccttttagatattttaataaggagccctgggagtataaaacgagaagagaaactagaagatcttaagctgctttttgtacacgtgcatcatcttataaatgaataccgaccccaccaagcaagagagaccttgagagtcatgatggaggtccagaaacgtcaacggcttgaaacagctgagagatttcaaaagcacctggaacgagtaattgaaatgattcagaattgcttggcttctttgcctgatgatttgcctcattcagaagcaggaatgagagtaaaaactgaaccaatggatgctgatgatagcaacaattgtactggacagaatgaacatcaaagagaaaattcaggtcataggagagatcagattatagagaaagatgctgccttgtgtgtcctaattgatgagatgaatgaaagaccatgaaagatgtttctttttctttttttccttttgataatagcatcatatattagttcattttcttttggacagtcttaagagaagtttcactaaaaatgtaaacagctttaatcttgactccaaatttttcaattatgagatgtcataggcagtaatttcgctgtataacaagcatagacaaatgagtgtccctgcactaagaagaatcactttaaaaagcaaagtgttagctgctgttgtatgggacattcctatgttttagagttgcagtaaaactttgatgataacctcaataatagcaaagt

SEQ ID NO: 1303 - protein, 233 aa, Homo sapiens
MGEPQQVSALPPPPMQYIKEYTDENIQEGLAPKPPPPIKDSYMMFGNQFQCDDLIIRPLESQGIERLHPMQFDHKKELRKLNMSILINFLDLLDILIRSPGSIKREEKLEDLKLLFVHVHHLINEYRPHQARETLRVMMEVQKRQRLETAERFQKHLERVIEMIQNCLASLPDDLPHSEAGMRVKTEPMDADDSNNCTGQNEHQRENSGHRRDQIIEKDAALCVLIDEMNERP

SEQ ID NO: 1304 - DNA, 1279 bp, Homo sapiens
tcctggggcccagcgcgggtggctgccgcggcccctcgggctgcgtggggagggggcttccgcccctgttgtcattgctcctgcagccttttcgctgggactgcgcgacaccgccccccgaccgggtgcccgctgtgtgccaggccgggtgctgggcacggtcccgcgagtgccctataaggactgccaggcaataatgaaggttcttttactgaaggatgcgaaggaagatgactgtggccaggatccgtatatcagggaattaggattatatggacttgaagccactttgatccctgttttatcgtttgagtttttgtctcttcccagtttctctgagaagctttctcatcctgaagattacgggggactcatttttaccagccccagagcagtggaagcagcagagttatgtttggagcaaaacaataaaactgaagtctgggaaaggtctctgaaagaaaaatggaatgccaagtcagtgtatgtggttggaaatgctactgcttctctagtgagtaaaattggcctggatacagaaggagaaacctgtggaaatgcagaaaagcttgcagaatatatttgttccagggagtcctcagcactgcctcttctatttccctgtggaaacctcaaaagagaaatcctgccaaaagcgctcaaggacaaagggattgccatggaaagcataactgtgtatcagacagttgcacacccaggaatccaagggaacctgaacagctactattcccagcagggggttccagccagcatcacattttttagtccctctggcctcacatacagtctcaagcacattcaggagttatctggtgacaatatcgatcaaattaagtttgcagccatcggccccactacggctcgcgcgctggccgcccagggccttcctgtaagctgcactgcagagagccccacgccacaagccctggccactggcatcaggaaggctctccagccccatggctgctgctgagtcagccacctagcgctggccccatgcagcctccctgggctgggctggctctggatggagccaggcatcggcaagggctctcgggagctgctgccgtcagactcctgcctcaagcctgagtggaagcacctgaggaccggggatcgggacctgacctggggctggcctcaggcccacgtgcacgtgactgccctctgtggaagccagcttaaaccctagccctgtgagagcttcctgtgcccagcaggaaggaagtcaaataaaccacactgactacctgtgctt

SEQ ID NO: 1305 - protein, 265 aa, Homo sapiens
MKVLLLKDAKEDDCGQDPYIRELGLYGLEATLIPVLSFEFLSLPSFSEKLSHPEDYGGLIFTSPRAVEAAELCLEQNNKTEVWERSLKEKWNAKSVYVVGNATASLVSKIGLDTEGETCGNAEKLAEYICSRESSALPLLFPCGNLKREILPKALKDKGIAMESITVYQTVAHPGIQGNLNSYYSQQGVPASITFFSPSGLTYSLKHIQELSGDNIDQIKFAAIGPTTARALAAQGLPVSCTAESPTPQALATGIRKALQPHGCC

SEQ ID NO: 1306 - DNA, 1347 bp, Homo sapiens
gtggacggagaaagtgaaaggtgaggcacggccctgcagattttccagcggatcccccggtggcctcatgtcgcgcagtggaaccgatcctcagcaacgccagcaggcgtcagaggcggacgccgcagcagcaaccttccgggcaaacgaccatcagcatatccgctacaacccgctgcaggatgagtgggtgctggtgtcagctcaccgcatgaagcggccctggcagggtcaagtggagccccagcttctgaagacagtgccccgccatgaccctctcaaccctctgtgtcctggggccatccgagccaacggagaggtgaatccccagtacgatagcaccttcctgtttgacaacgacttcccagctctgcagcctgatgcccccagtccaggacccagtgatcatccccttttccaagcaaagtctgctcgaggagtctgtaaggtcatgtgcttccacccctggtcggatgtaacgctgccactcatgtcggtccctgagatccgggctgttgttgatgcatgggcctcagtcacagaggagctgggtgcccagtacccttgggtgcagatctttgaaaacaaaggtgccatgatgggctgttctaacccccacccccactgccaggtatgggccagcagtttcctgccagatattgcccagcgtgaggagcgatctcagcaggcctataagagtcagcatggagagcccctgctaatggagtacagccgccaggagctactcaggaaggaacgtctggtcctaaccagtgagcactggttagtactggtccccttctgggcaacatggccctaccagacactgctgctgccccgtcggcatgtgcggcggctacctgagctgacccctgctgagcgtgatgatctagcctccatcatgaagaagctcttgaccaagtatgacaacctctttgagacgtcctttccctactccatgggctggcatggggctcccacaggatcagaggctggggccaactggaaccattggcagctgcacgctcattactaccctccgctcctgcgctctgccactgtccggaaattcatggttggctacgaaatgcttgctcaggctcagagggacctcacccctgagcaggctgcagagagactaagggcacttcctgaggttcattaccacctggggcagaaggacagggagacagcaaccatcgcctgaccacgccgaccacagggccttgaatccttttttgttttcaacagtcttgctgaattaagcagaaagggccttgaatcctggcctggaatttgggcagatatagcattaataaaactgtgcatctcaaaaaaaaaaaaaaa

SEQ ID NO: 1307 - protein, 379 aa, Homo sapiens
MSRSGTDPQQRQQASEADAAAATFRANDHQHIRYNPLQDEWVLVSAHRMKRPWQGQVEPQLLKTVPRHDPLNPLCPGAIRANGEVNPQYDSTFLFDNDFPALQPDAPSPGPSDHPLFQAKSARGVCKVMCFHPWSDVTLPLMSVPEIRAVVDAWASVTEELGAQYPWVQIFENKGAMMGCSNPHPHCQVWASSFLPDIAQREERSQQAYKSQHGEPLLMEYSRQELLRKERLVLTSEHWLVLVPFWATWPYQTLLLPVGHVRRLPELTPAERDDLASIMKKLLTKYDNLFETSFPYSMGWHGAPTGSEAGANWNHWQLHAHYYPPLLRSATVRKFMVGYEMLAQAQRDLTPEQAAERLRALPEVHYHLGQKDRETATIA

SEQ ID NO: 1308 - DNA, 2603 bp, Homo sapiens
gtggacggagaaagtgaaaggtgaggcacggccctgcagattttccagcggatcccccggtggcctcatgtcgcgcagtggaaccgatcctcagcaacgccagcaggcgtcagaggcggacgccgcagcagcaaccttccgggcaaacgaccatcagcatatccgctacaacccgctgcaggatgagtgggtgctggtgtcagctcaccgcatgaagcggccctggcagggtcaagtggagccccagcttctgaagacagtgccccgccatgaccctctcaaccctctgtgtcctggggccatccgagccaacggagaggtgaatccccagtacgatagcaccttcctgtttgacaacgacttcccagctctgcagcctgatgcccccagtccaggacccagtgatcatccccttttccaagcaaagtctgctcgaggagtctggtaactatggatttcccctcttacaactttcaaaccagagttggagactcagcattggggttcggccctgcccgtagcacagccaagccctacctctcggttatcttttctcccgtcaccacccagtaaggtcatgtgcttccacccctggtcggatgtaacgctgccactcatgtcggtccctgagatccgggctgttgttgatgcatgggcctcagtcacagaggagctgggtgcccagtacccttgggtgcagatctttgaaaacaaaggtgccatgatgggctgttctaacccccacccccactgccaggtatgggccagcagtttcctgccagatattgcccagcgtgaggagcgatctcagcaggcctataagagtcagcatggagagcccctgctaatggagtacagccgccaggagctactcaggaaggtgggagagagccaagccctgtgtccccaaggagtccctaactttcttatcccatgagagaggtgtgtaaaggagaaagctagaggtgaactagtagagagagacttgctaggaggccttagcaataatccagtaatctaaaggaaagatgatggtgacttagactcgggtggttagtggtagaggtggtgagaagacatcagatcctgggcacattcttttcttctgcttcccttgcctatttgctgaccacactccggctcctatgtcaccttgatgacttcctatccattctgtcttcctaggaacgtctggtcctaaccagtgagcactggttagtactggtccccttctgggcaacatggccctaccagacactgctgctgccccgtcggcatgtgcggcggctacctgagctgacccctgctgagcgtgatgatctagcctccatcatgaagaagctcttgaccaagtatgacaacctctttgagacgtcctttccctactccatgggctggcatggtgaggcttttcaagtacctatatttagccccaacaccatttctgggctcctggggctcagcctagtgaactgcaacctcaaaggagcaagccttgaaacagttgctgggggaagtggccagagtagagatgctgggactgagggtggagcagcaaacttggtgaaactacatctccaatgtgctttctaatctcctgccagctcttctcaagcaggggatcctgggagatgtagttttcagatacctggttgggtttgggagtaggtgctaacctggataactgtaaaagggctctctctccccactgtctctcttctttctgtcaggggctcccacaggatcagaggctggggccaactggaaccattggcagctgcacgctcattactaccctccgctcctgcgctctgccactgtccggaaattcatggttggctacgaaatgcttgctcaggctcagagggacctcacccctgagcaggtcaggactcagaacagtctggcgtctccagactctcacatgcagtatgtgcaggcacctgatacttctgttgcccttgtgctccagtcattgcacaaggcagaaaacagctctggcaggaagggactgccaaagttaggagccctagggcctggaaggagagtatggtcctcagatcccccttctctcctgcttcctccagggaacccaacagtcatgaccctgatagtttcccataacaacctgggcattccttgggactcaggagctgctaaactctttcatcccctggtggcttcagcagtccttatcaccagcctcacaatcccacaggcccacccccagtgggcctgtggcattcatatttcatattcatatttcaaaccacaatatccagcaaaatgtctcctgagcacccagaactccataccatcggccgggtgtggtggctcatgccttaatcccagcactttgggaggtcaagatgggaggattgcttgagcccagaagttcgagactagcctgggaaacataggaagccctcgtctctacaaaaaaaatttaaaaagttagccaggtatggtggcatatacttgtggtcccagatacttgggaggctgagataggatcacttgggcccaggagtttgaggctgcagtgagccatcatcatggcatcattgcattccagcctgggcaacagagcaagacctcgtctc

SEQ ID NO: 1309 - protein, 126 aa, Homo sapiens
MSRSGTDPQQRQQASEADAAAATFRANDHQHIRYNPLQDEWVLVSAHRMKRPWQGQVEPQLLKTVPRHDPLNPLCPGAIRANGEVNPQYDSTFLFDNDFPALQPDAPSPGPSDHPLFQAKSARGVW

SEQ ID NO: 1310 - DNA, 2222 bp, Homo sapiens
gtggacggagaaagtgaaaggtgaggcacggccctgcagattttccagcggatcccccggtggcctcatgtcgcgcagtggaaccgatcctcagcaacgccagcaggcgtcagaggcggacgccgcagcagcaaccttccgggcaaacgaccatcagcatatccgctacaacccgctgcaggatgagtgggtgctggtgtcagctcaccgcatgaagcggccctggcagggtcaagtggagccccagcttctgaagacagtgccccgccatgaccctctcaaccctctgtgtcctggggccatccgagccaacggagagatctttgaaaacaaaggtgccatgatgggctgttctaacccccacccccactgccaggtatgggccagcagtttcctgccagatattgcccagcgtgaggagcgatctcagcaggcctataagagtcagcatggagagcccctgctaatggagtacagccgccaggagctactcaggaaggtgggagagagccaagccctgtgtccccaaggagtccctaactttcttatcccatgagagaggtgtgtaaaggagaaagctagaggtgaactagtagagagagacttgctaggaggccttagcaataatccagtaatctaaaggaaagatgatggtgacttagactcgggtggttagtggtagaggtggtgagaagacatcagatcctgggcacattcttttcttctgcttcccttgcctatttgctgaccacactccggctcctatgtcaccttgatgacttcctatccattctgtcttcctaggaacgtctggtcctaaccagtgagcactggttagtactggtccccttctgggcaacatggccctaccagacactgctgctgccccgtcggcatgtgcggcggctacctgagctgacccctgctgagcgtgatgatctagcctccatcatgaagaagctcttgaccaagtatgacaacctctttgagacgtcctttccctactccatgggctggcatggtgaggcttttcaagtacctatatttagccccaacaccatttctgggctcctggggctcagcctagtgaactgcaacctcaaaggagcaagccttgaaacagttgctgggggaagtggccagagtagagatgctgggactgagggtggagcagcaaacttggtgaaactacatctccaatgtgctttctaatctcctgccagctcttctcaagcaggggatcctgggagatgtagttttcagatacctggttgggtttgggagtaggtgctaacctggataactgtaaaagggctctctctccccactgtctctcttctttctgtcaggggctcccacaggatcagaggctggggccaactggaaccattggcagctgcacgctcattactaccctccgctcctgcgctctgccactgtccggaaattcatggttggctacgaaatgcttgctcaggctcagagggacctcacccctgagcaggtcaggactcagaacagtctggcgtctccagactctcacatgcagtatgtgcaggcacctgatacttctgttgcccttgtgctccagtcattgcacaaggcagaaaacagctctggcaggaagggactgccaaagttaggagccctagggcctggaaggagagtatggtcctcagatcccccttctctcctgcttcctccagggaacccaacagtcatgaccctgatagtttcccataacaacctgggcattccttgggactcaggagctgctaaactctttcatcccctggtggcttcagcagtccttatcaccagcctcacaatcccacaggcccacccccagtgggcctgtggcattcatatttcatattcatatttcaaaccacaatatccagcaaaatgtctcctgagcacccagaactccataccatcggccgggtgtggtggctcatgccttaatcccagcactttgggaggtcaagatgggaggattgcttgagcccagaagttcgagactagcctgggaaacataggaagccctcgtctctacaaaaaaaatttaaaaagttagccaggtatggtggcatatacttgtggtcccagatacttgggaggctgagataggatcacttgggcccaggagtttgaggctgcagtgagccatcatcatggcatcattgcattccagcctgggcaacagagcaagacctcgtctc

SEQ ID NO: 1311 - protein, 162 aa, Homo sapiens
MSRSGTDPQQRQQASEADAAAATFRANDHQHIRYNPLQDEWVLVSAHRMKRPWQGQVEPQLLKTVPRHDPLNPLCPGAIRANGEIFENKGAMMGCSNPHPHCQVWASSFLPDIAQREERSQQAYKSQHGEPLLMEYSRQELLRKVGESQALCPQGVPNFLIP

SEQ ID NO: 1312 - DNA, 2438 bp, Homo sapiens
cccggcggcgccaaccgaagcgccccgcctgatccgtgtccgacatgctgcgccgcgctctgctgtgcctggccgtggccgccctggtgcgcgccgacgcccccgaggaggaggaccacgtcctggtgctgcggaaaagcaacttcgcggaggcgctggcggcccacaagtacctgctggtggagttctatgccccttggtgtggccactgcaaggctctggcccctgagtatgccaaagccgctgggaagctgaaggcagaaggttccgagatcaggttggccaaggtggacgccacggaggagtctgacctggcccagcagtacggcgtgcgcggctatcccaccatcaagttcttcaggaatggagacacggcttcccccaaggaatatacagctggcagagaggctgatgacatcgtgaactggctgaagaagcgcacgggcccggctgccaccaccctgcctgacggcgcagctgcagagtccttggtggagtccagcgaggtggctgtcatcggcttcttcaaggacgtggagtcggactctgccaagcagtttttgcaggcagcagaggccatcgatgacataccatttgggatcacttccaacagtgacgtgttctccaaataccagctcgacaaagatggggttgtcctctttaagaagtttgatgaaggccggaacaactttgaaggggaggtcaccaaggagaacctgctggactttatcaaacacaaccagctgccccttgtcatcgagttcaccgagcagacagccccgaagatttttggaggtgaaatcaagactcacatcctgctgttcttgcccaagagtgtgtctgactatgacggcaaactgagcaacttcaaaacagcagccgagagcttcaagggcaagatcctgttcatcttcatcgacagcgaccacaccgacaaccagcgcatcctcgagttctttggcctgaagaaggaagagtgcccggccgtgcgcctcatcaccctggaggaggagatgaccaagtacaagcccgaatcggaggagctgacggcagagaggatcacagagttctgccaccgcttcctggagggcaaaatcaagccccacctgatgagccaggagctgccggaggactgggacaagcagcctgtcaaggtgcttgttgggaagaactttgaagacgtggcttttgatgagaaaaaaaacgtctttgtggagttctatgccccatggtgtggtcactgcaaacagttggctcccatttgggataaactgggagagacgtacaaggaccatgagaacatcgtcatcgccaagatggactcgactgccaacgaggtggaggccgtcaaagtgcacagcttccccacactcaagttctttcctgccagtgccgacaggacggtcattgattacaacggggaacgcacgctggatggttttaagaaattcctggagagcggtggccaggatggggcaggggatgatgacgatctcgaggacctggaagaagcagaggagccagacatggaggaagacgatgatcagaaagctgtgaaagatgaactgtaatacgcaaagccagacccgggcgctgccgagacccctcgggggctgcacacccagcagcagcgcacgcctccgaagcctgcggcctcgcttgaaggagggcgtcgccggaaacccagggaacctctctgaagtgacacctcacccctacacaccgtccgttcacccccgtctcttccttctgcttttcggtttttggaaagggatccatctccaggcagcccaccctggtggggcttgtttcctgaaaccatgatgtactttttcatacatgagtctgtccagagtgcttgctaccgtgttcggagtctcgctgcctccctcccgcgggaggtttctcctctttttgaaaattccgtctgtgggatttttagacatttttcgacatcagggtatttgttccaccttggccaggcctcctcggagaagcttgtcccccgtgtgggagggacggagccggactggacatggtcactcagtaccgcctgcagtgtcgccatgactgatcatggctcttgcatttttgggtaaatggagacttccggatcctgtcagggtgtcccccatgcctggaagaggagctggtggctgccagccctggggcccggcacaggcctgggccttccccttccctcaagccagggctcctcctcctgtcgtgggctcattgtgaccactggcctctctacagcacggcctgtggcctgttcaaggcagaaccacgacccttgactcccgggtggggaggtggccaaggatgctggagctgaatcagacgctgacagttcttcaggcatttctatttcacaatcgaattgaacacattggccaaataaagttgaaattttaccaccaaaaaaaaaaaaaaaa

SEQ ID NO: 1313 - protein, 508 aa, Homo sapiens
  misc_feature (12)..(12): Xaa can be any naturally occurring amino acid
MLRRALLCLPWXALVRADAPEEEDHVLVLRKSNFAEALAAHKYPPVEFHAPWCGHCKALAPEYAKAAGKLKAEGSEIRLAKVDATEESDLAQQYGVRGYPTIKFFRNGDTASPKEYTAGREADDIVNWLKKRTGPAATTLPDGAAAESLVESSEVAVIGFFKDVESDSAKQFLQAAEAIDDIPFGITSNSDVFSKYQLDKDGVVLFKKFDEGRNNFEGEVTKENLLDFIKHNQLPLVIEFTEQTAPKIFGGEIKTHILLFLPKSVSDYDGKLSNFKTAAESFKGKILFIFIDSDHTDNQRILEFFGLKKEECPAVRLITLEEEMTKYKPESEELTAERITEFCHRFLEGKIKPHLMSQELPEDWDKQPVKVLVGKNFEDVAFDEKKNVFVEFYAPWCGHCKQLAPIWDKLGETYKDHENIVIAKMDSTANEVEAVKVHGFPTLGFFPASADRTVIDYNGERTLDGFKKFLESGGQDGAGDVDDLEDLEEAEEPDMEEDDDQKAVKDEL

SEQ ID NO: 1314 - DNA, 847 bp, Homo sapiens
acagcgagcggagccgcggtccggacggcagcgcgtgccccgagctctccgcctccccccgcccgccagccgaggcagctcgagcccagtccgcggccccagcagcagcgccgagagcagccccagtagcagcgccatggccgggtggaacgcctacatcgacaacctcatggcggacgggacctgtcaggacgcggccatcgtgggctacaaggactcgccctccgtctgggccgccgtccccgggaaaacgttcgtcaacatcacgccagctgaggtgggtgtcctggttggcaaagaccggtcaagtttttacgtgaatgggctgacacttgggggccagaaatgttcggtgatccgggactcactgctgcaggatggggaatttagcatggatcttcgtaccaagagcaccggtggggcccccaccttcaatgtcactgtcaccaagactgacaagacgctagtcctgctgatgggcaaagaaggtgtccacggtggtttgatcaacaagaaatgttatgaaatggcctcccaccttcggcgttcccagtactgacctcgtctgtcccttccccttcaccgctccccacagctttgcacccctttcctccccatacacacacaaaccattttattttttgggccattaccccataccccttattgctgccaaaaccacatgggctgggggccagggctggatggacagacacctccccctacccatatccctcccgtgtgtggttggaaaacttttgttttttggggttttttttttctgaataaaaaagattctactaacaaaaaaaaaaaaaaaaaaaaaaaaaaaaaaaaaaaaaaaaaa

SEQ ID NO: 1315 - protein, 140 aa, Homo sapiens
MAGWNAYIDNLMADGTCQDAAIVGYKDSPSVWAAVPGKTFVNITPAEVGVLVGKDRSSFYVNGLTLGGQKCSVIRDSLLQDGEFSMDLRTKSTGGAPTFNVTVTKTDKTLVLLMGKEGVHGGLINKKCYEMASHLRRSQY

SEQ ID NO: 1316 - DNA, 809 bp, Homo sapiens
atgcctgtcttcatcttgaaagaaaagctccaggtcccttctccagccacccagccccaagatggtgatgctgctgctgctgctttccgcactggctggcctcttcggtgcggcagagggacaagcatttcatcttgggaagtgccccaatcctccggtgcaggagaattttgacgtgaataagtatctcggaagatggtacgaaattgagaagatcccaacaacctttgagaatggacgctgcatccaggccaactactcactaatggaaaacggaaagatcaaagtgttaaaccaggagttgagagctgatggaactgtgaatcaaatcgaaggtgaagccaccccagttaacctcacagagcctgccaagctggaagttaagttttcctggtttatgccatcggcaccgtactggatcctggccaccgactatgagaactatgccctcgtgtattcctgtacctgcatcatccaactttttcacgtggattttgcttggatcttggcaagaaaccctaatctccctccagaaacagtggactctctaaaaaatatcctgacttctaataacattgatgtcaagaaaatgacggtcacagaccaggtgaactgccccaagctctcgtaaccaggttctacagggaggctgcacccactccatgttacttctgcttcgctttcccctaccccacccccccccataaagacaaaccaatcaaccacgacaaaggaagttgacctaaacatgtaaccatgccctaccctgttaccttgctagctgcaaaataaacttgttgctgacctgc

SEQ ID NO: 1317 - protein, 189 aa, Homo sapiens
MVMLLLLLSALAGLFGAAEGQAFHLGKCPNPPVQENFDVNKYLGRWYEIEKIPTTFENGRCIQANYSLMENGKIKVLNQELRADGTVNQIEGEATPVNLTEPAKLEVKFSWFMPSAPYWILATDYENYALVYSCTCIIQLFHVDFAWILARNPNLPPETVDSLKNILTSNNIDVKKMTVTDQVNCPKLS

SEQ ID NO: 1318 - DNA, 1514 bp, Homo sapiens
cggacccggaagtgcttggccacagtcgcagccccggcgccccgaagcgggaaaaaggctgggtgccgccgtcccccagctgcgcaaccctaggaactctcgggaacttggctgtgttgtcctgcctcagagacaaattcatctattgtaggcctagcccctgcctttgaaaacaaggaaaggttggtagaacatcaacacagcatggaatttccagggaggtctcatttcaaaacttcataaagaacaagaaccacctggacttctgtgagggcgatgattaaactggcctgagtttgaatgaaaggataatgtatgctcaacctgtgactaacaccaaggaggtcaagtggcagaaggtcttgtatgagcgacagccctttcctgataactatgtggaccggcgattcctggaagagctccggaaaaacatccatgctcggaaataccaatattgggctgtggtatttgagtccagtgtggtgatccagcagctgtgcagtgtttgtgtttttgtggttatctggtggtatatggatgagggtcttctggccccccattggcttttagggactggtctggcttcttcactgattgggtatgttttgtttgatctcattgatggaggtgaagggcggaagaagagtgggcagacccggtgggctgacctgaagagtgccctagtcttcattactttcacttatgggttttcaccagtgctgaagacccttacagagtctgtcagcactgacaccatctatgccatgtcagtcttcatgctgttaggccatctcatcttttttgactatggtgccaatgctgccattgtatccagcacactatccttgaacatggccatctttgcttctgtatgcttggcatcacgtcttccccggtccctgcatgccttcatcatggtgacatttgccattcagatttttgccctgtggcccatgttgcagaagaaactaaaggcatgtactccccggagctatgtgggggtcacactgctttttgcattttcagccgtgggaggcctactgtccattagtgctgtgggagccgtactctttgcccttctgctgatgtctatctcatgtctgtgtccattctacctcattcgcttgcagctttttaaagaaaacattcatgggccttgggatgaagctgaaatcaaggaagacttgtccaggttcctcagttaaattaggacatccattacattattaaagcaagctgatagattagcctcctaactagtatagaacttaaagacagagttccattctggaagcagcatgtcattgtggtaagagaatagagatcaaaaccaaaaaaaatgaaccaaaggcttgggtggtgagggtgcttatcctttctgttattttgtagatgaaaaaactttctggggacctcttgaattacatgctgtaacatatgaagtgatgtggtttctattaaaaaaataacacatccaaaaaaaaaaaaaaaaaaaaaaaaaaaaaaaaaaaaaa

SEQ ID NO: 1319 - protein, 297 aa, Homo sapiens
MYAQPVTNTKEVKWQKVLYERQPFPDNYVDRRFLEELRKNIHARKYQYWAVVFESSVVIQQLCSVCVFVVIWWYMDEGLLAPHWLLGTGLASSLIGYVLFDLIDGGEGRKKSGQTRWADLKSALVFITFTYGFSPVLKTLTESVSTDTIYAMSVFMLLGHLIFFDYGANAAIVSSTLSLNMAIFASVCLASRLPRSLHAFIMVTFAIQIFALWPMLQKKLKACTPRSYVGVTLLFAFSAVGGLLSISAVGAVLFALLLMSISCLCPFYLIRLQLFKENIHGPWDEAEIKEDLSRFLS

SEQ ID NO: 1320 - DNA, 1458 bp, Homo sapiens
agtaaactgagttgatttgactttatctcagtactactcttgacctttcacaactttcgtaggttcacagtctctctttttctaggaacttggctgtgttgtcctgcctcagagacaaattcatctattgtaggcctagcccctgcctttgaaaacaaggaaaggttggtagaacatcaacacagcatggaatttccagggaggtctcatttcaaaacttcataaagaacaagaaccacctggacttctgtgagggcgatgattaaactggcctgagtttgaatgaaaggataatgtatgctcaacctgtgactaacaccaaggaggtcaagtggcagaaggtcttgtatgagcgacagccctttcctgataactatgtggaccggcgattcctggaagagctccggaaaaacatccatgctcggaaataccaatattgggctgtggtatttgagtccagtgtggtgatccagcagctgtgcagtgtttgtgtttttgtggttatctggtggtatatggatgagggtcttctggccccccattggcttttagggactggtctggcttcttcactgattgggtatgttttgtttgatctcattgatggaggtgaagggcggaagaagagtgggcagacccggtgggctgacctgaagagtgccctagtcttcattactttcacttatgggttttcaccagtgctgaagacccttacagagtctgtcagcactgacaccatctatgccatgtcagtcttcatgctgttaggccatctcatcttttttgactatggtgccaatgctgccattgtatccagcacactatccttgaacatggccatctttgcttctgtatgcttggcatcacgtcttccccggtccctgcatgccttcatcatggtgacatttgccattcagatttttgccctgtggcccatgttgcagaagaaactaaaggcatgtactccccggagctatgtgggggtcacactgctttttgcattttcagccgtgggaggcctactgtccattagtgctgtgggagccgtactctttgcccttctgctgatgtctatctcatgtctgtgtccattctacctcattcgcttgcagctttttaaagaaaacattcatgggccttgggatgaagctgaaatcaaggaagacttgtccaggttcctcagttaaattaggacatccattacattattaaagcaagctgatagattagcctcctaactagtatagaacttaaagacagagttccattctggaagcagcatgtcattgtggtaagagaatagagatcaaaaccaaaaaaaatgaaccaaaggcttgggtggtgagggtgcttatcctttctgttattttgtagatgaaaaaactttctggggacctcttgaattacatgctgtaacatatgaagtgatgtggtttctattaaaaaaataacacatcc

SEQ ID NO: 1321 - DNA, 1830 bp, Homo sapiens
gggtctttaaatcttattttagtagctaatgcatgtttgaaataagatgtgttagaaattatatgactatattaaggttgtgtttatattaggtgaaaaattgcatgcaattggtgaatcatgcagctttggggacatttacactgccactcacacacaggctctgtctcaatccgtatgcatgattcacgtcctttcaaaagtcccttttcaacatttggtaaagtgaaaatgttattcatagtgctaatgagccaataaacaatgctgcgtttcttttttctaactgcagcatattgtggtaaattttctcccaaaactttatttttggagttattgttggcaataaatacaacaaattatttgttggcaagtgatacaatttactgtataacaacttaatagtacaaagcatgaagatgtgaaaatatcatcttaaccagtttcattctatgaacataatattctggcagctttttctataactgagaatggtatatctttttatacactgcctaaatcagtactactgccagtcacctgaggtcaggtctgcacaacactaaattgggcaataacatagaacatctaggcagtcttgacagtcaaccagtgtaatcactaggggaagaaaaagtaggcctacccttttacttattaacttaagtaataaaaattgtataaaaatatgaatgttggctgcagaggagcctttacatgcagataatttgaagcagtctttgaaaataacaaaaattattccatttaatgaagggtttgttttgtttagcttttctcttttattcagaaaacatacctgtgcttttgaaagggcttaatcccaaacaggtaatatgtgtggatcaatcatctctcctcccatgaaattaatcattcatggtaatatattaaggctggaacgtagctcttagtgacttaaaacatgacagtaagcatttacactgttggaaggtaatttcattgctatgttattaaaatgatgagaatcctatttatacatttatttatttatttatttacagaagattggttccttccagttcaatttaacagcttcagtgaagttagtataatgataagaaaaattgactgtagctattattccaagtgaaaatcatgcagctgagtcctgctgcatcctgggagcaaagcattaattcaaatgaggagtagtcagtcctagcactgtagacgccgactttaccaaccaagatattgtatgtgtgtgacattcagctaacattgatctaggcacttagtttgctaccacattgttcccttcattgattgaaactgtaaataacataacactttaaggcagctaagcaaatattttaataagccatgaaaggcaagatgccagagaaaatctgtatattcagctatttggagaactcgtgttttccacaaattaaactggagatgtcatttgaaattttcttcccttaaacatgctgtcacaacatggattccttctcatggatgtctttctaggcttataaatatatggtgtgattgctataattttgtgaaattttattcagcaattaatagtgatttcagcagtatgtactaagattccaaggcagaaataaatgtataaaggatttgagcctgtatgtgtaagaagaaactctctcttcagtcatatttcctaaattcagtgtaagtacctcgctgatttagcactggagttattccttgaatgtgtaaataatgatgttctattctgacctaatgaattcctgtaatgtgaatatttaaaataaaagaattcaatttaaatgcaaaaaaaaaaaaaaaaaaaac

SEQ ID NO: 1322 - DNA, 1676 bp, Homo sapiens
gaattccgccgctgaccgaggcgtgcaaagactccagaattggaggcatgatgaagactctgctgctgtttgtggggctgctgctgacctgggagagtgggcaggtcctgggggaccagacggtctcagacaatgagctccaggaaatgtccaatcagggaagtaagtacgtcaataaggaaattcaaaatgctgtcaacggggtgaaacagataaagactctcatagaaaaaacaaacgaagagcgcaagacactgctcagcaacctagaagaagccaagaagaagaaagaggatgccctaaatgagaccagggaatcagagacaaagctgaaggagctcccaggagtgtgcaatgagaccatgatggccctctgggaagagtgtaagccctgcctgaaacagacctgcatgaagttctacgcacgcgtctgcagaagtggctcaggcctggttggccgccagcttgaggagttcctgaaccagagctcgcccttctacttctggatgaatggtgaccgcatcgactccctgctggagaacgaccggcagcagacgcacatgctggatgtcatgcaggaccacttcagccgcgcgtccagcatcatagacgagctcttccaggacaggttcttcacccgggagccccaggatacctaccactacctgcccttcagcctgccccaccggaggcctcacttcttctttcccaagtcccgcatcgtccgcagcttgatgcccttctctccgtacgagcccctgaacttccacgccatgttccagcccttccttgagatgatacacgaggctcagcaggccatggacatccacttccacagcccggccttccagcacccgccaacagaattcatacgagaaggcgacgatgaccggactgtgtgccgggagatccgccacaactccacgggctgcctgcggatgaaggaccagtgtgacaagtgccgggagatcttgtctgtggactgttccaccaacaacccctcccaggctaagctgcggcgggagctcgacgaatccctccaggtcgctgagaggttgaccaggaaatacaacgagctgctaaagtcctaccagtggaagatgctcaacacctcctccttgctggagcagctgaacgagcagtttaactgggtgtcccggctggcaaacctcacgcaaggcgaagaccagtactatctgcgggtcaccacggtggcttcccacacttctgactcggacgttccttccggtgtcactgaggtggtcgtgaagctctttgactctgatcccatcactgtgacggtccctgtagaagtctccaggaagaaccctaaatttatggagaccgtggcggagaaagcgctgcaggaataccgcaaaaagcaccgggaggagtgagatgtggatgttgcttttgcaccttacgggggcatcttgagtccagctccccccaagatgagctgcagccccccagagagagctctgcacgtcaccaagtaaccaggccccagcctccaggcccccaactccgcccagcctctccccgctctggatcctgcactctaacactcgactctgctgctcatgggaagaacagaattgctcctgcatgcaactaattcaataaaactgtcttgtgagctgaaaaaaaaaaaaaaaaaaaaaaaaaaggaattc

SEQ ID NO: 1323 - protein, 449 aa, Homo sapiens
MMKTLLLFVGLLLTWESGQVLGDQTVSDNELQEMSNQGSKYVNKEIQNAVNGVKQIKTLIEKTNEERKTLLSNLEEAKKKKEDALNETRESETKLKELPGVCNETMMALWEECKPCLKQTCMKFYARVCRSGSGLVGRQLEEFLNQSSPFYFWMNGDRIDSLLENDRQQTHMLDVMQDHFSRASSIIDELFQDRFFTREPQDTYHYLPFSLPHRRPHFFFPKSRIVRSLMPFSPYEPLNFHAMFQPFLEMIHEAQQAMDIHFHSPAFQHPPTEFIREGDDDRTVCREIRHNSTGCLRMKDQCDKCREILSVDCSTNNPSQAKLRRELDESLQVAERLTRKYNELLKSYQWKMLNTSSLLEQLNEQFNWVSRLANLTQGEDQYYLRVTTVASHTSDSDVPSGVTEVVVKLFDSDPITVTVPVEVSRKNPKFMETVAEKALQEYRKKHREE

SEQ ID NO: 1324 - DNA, 2873 bp, Homo sapiens
gactaatggccctaactaagtattaacccctgccaagaaaagagctacttcctcttgaagtaaatgaagatagtgatgctttctcttaaactttacttataaaaagcatcaaaggggggaatgaagcaggaaatataaaaggaaaaacaagtaaagggaaaacaagtcctttcctgaccagtctgactcactccaaagtcctgctggagctatgataattatctgcaaggccaggcaggggctccgaaggagggctccaggagcagggatgagaaaaacaagttctccttatcagtttccctgtttgaaattctctccccataacattattctttgttctgctctcacaactatttttgtaactatttctgcaagtctgtaaagattttgtaagttcttgtttttctttctgtagcatggcaaggtcacaagacatgtttaagtaaggtaggctcatgttgcaaatcctgttgtaaaacctgtcaacggtatgattaactgcctttgttctgcttctgtaagactgctttctcacctcgcaggttttgcgccaaaaacccgacttgcccctgcctgatgcatgtataaaagtcaagccctgtctttgttccgggctcagcctttggatgttaatccgctgggccagtggccacctaaataaaaccttcctgttgcacccagtgatctctccggcctcctggttcccacaacatataagcattccttttctctgcaacctagcccgcatctgtcattgactttttgaacaataggcattctgactggatgagatggtatctcactgtggtttttctctgcatttttctaataattaacaacgtgaattttgttttcatgtgcttgtcagccacatgtatgtcttcttttgaaaagtatctgttcatgtttttgcttactttttaattaggtttttggttttctttttgttgttgttgttgttttctgagatggagtcttgctgtgtcaccaggatggagtgcagtggcatgatctcgactcactgcaacctccacctcccaggttcagatgattcttctgcttcagtctcctgagtagctgggatcacagggaccattgacatttatggatgtggccatagaattctctttggaggagtggcaatgcctggacactgcacagcagaatttatataggcatgtgatgtgagagaactacagaaacctggttttcttgggtgaaggtattgctgtctctaaggcagacctgattacctgtctggagcaaggaaaagagccctggaatatgaagagacatgagatggtagctaaacatttagttatgttttattattttgcccaacacctttggccagagcagaacataagagattctttccagaaagtgaccctaagaagatatagaaaatgtggatatgagaatttacagttaagaaaaggctgtaaaagtgtggttgagtgtaaacagcacaaaggagattatagtggacttaaccaatgtttgaaaactaccttgagcaaaatatttcaatgtaataaatatgtagaagttttccataaaatttcaaattcaaatagacacaagatgagacatactgaaaataaacattttaaatgtaaagaatgtcgcaaaacattttgcatgctttcacacctaactcaacataaaagaatccaaactagagtgaatttctacaaatgtgaagcatatggaagagcctttaactggtcctcaacccttaataaacataagagaattcatactggagaaaaaccttacaaatgtaaagaatgtggcaaagcctttaaccagacctcacaccttattagacataagagaattcatactgaagagaaaccctacaaatgtgaagaatgtggcaaagcctttaaccagtcatcgacccttactacacataatataattcatactggggaaattccctacaaatgtgagaaatgtgttagagcttttaaccaagcctcaaagcttactgaacataagttaattcataccggagagaaacgttatgaatgtgaagaatgcggcaaagcttttaaccgatcctcaaaacttactgaacataagtacattcatactggagagaagctgtacaaatgtgaagaatgtggtaaagcctttaaccagtcctcaacccttactacacataagagaattcatagtggagagaagccctacaaatgtgaagaatgtggcaaagcttttaaacaattttcaaatcttactgaccataaaaaaattcatactggagagaaaccctacaaatgtgaggaatgtggcaaagcttttaaccaactctcaaaccttactagacataaggtaattcatactggagagaaaccctacaaatgtggagaatgtggcaaagcctttaaccagtcctcagcccttaatacacataagataatccatactggagagaatccccacaaatgtagagaatctggcaaagttttccacctatcctcaaaacttagtacatgtaagaaaattcatactggagagaaactctacaaatgtgaagaatgtggcaaagcctttaactgatcttcaacccttattggacataagagaattcatactggagagaaaccctacaaatgtgaagaatgtggcaaagcttttaaccaatcttcaacacttactacacataagataattcatactgaagagaaacagtacaaatgtgatgaatgtggcaaagcttctacctgatcctcaaaactcattgaacacaagaaaattcatactggagagaaaccttacaagtgtgaagaatgtggcaaaacttctaaccatttctcaacctttactaaacataagatgattcatactggagagaagttacacaa

SEQ ID NO: 1325 - protein, 427 aa, Homo sapiens
MKRHEMVAKHLVMFYYFAQHLWPEQNIRDSFQKVTLRRYRKCGYENLQLRKGCKSVVECKQHKGDYSGLNQCLKTTLSKIFQCNKYVEVFHKISNSNRHKMRHTENKHFKCKECRKTFCMLSHLTQHKRIQTRVNFYKCEAYGRAFNWSSTLNKHKRIHTGEKPYKCKECGKAFNQTSHLIRHKRIHTEEKPYKCEECGKAFNQSSTLTTHNIIHTGEIPYKCEKCVRAFNQASKLTEHKLIHTGEKRYECEECGKAFNRSSKLTEHKYIHTGEKLYKCEECGKAFNQSSTLTTHKRIHSGEKPYKCEECGKAFKQFSNLTDHKKIHTGEKPYKCEECGKAFNQLSNLTRHKVIHTGEKPYKCGECGKAFNQSSALNTHKIIHTGENPHKCRESGKVFHLSSKLSTCKKIHTGEKLYKCEECGKAFN

SEQ ID NO: 1326 - DNA, 661 bp, Homo sapiens
agcatcccaaggcccgactccccgcaccactcagggtcctgtggacagctcacctagcggcaatggctgcaggaagaagcctatatcacaaaggaacagaagtattcattcctgcatgactcccagacctccttctgcttctcagactctattccgacatcctccaacatggaggaaacgcagcagaaatccaacttagagctgctccacatctccctgctgctcatcgagtcgcggctggagcccgtgcggttcctcaggagtaccttcaccaacaacctggtgtatgacacctcggacagcgatgactatcacctcctaaaggacctagaggaaggcatccaaatgctgatggggaggctggaagacggcagccacctgactgggcagaccctcaagcagacctacagcaagtttgacacaaactcgcacaaccatgacgcactgctcaagaactacgggctgctccactgcttcaggaaggacatggacaaggtcgagacattcctgcgcatggtgcagtgccgctctgtggagggcagctgtggcttctaggggcccgcgtggcatcctgtgacccctccccagtgcctctcctggccctgaaggtgccactccagtgcccaccagccttgtcttaataaaattaagttgtattgtt

SEQ ID NO: 1327 - protein, 18 aa, Homo sapiens
MAAGRSLYHKGTEVFIPA

SEQ ID NO: 1328 - DNA, 376 bp, Homo sapiens
agcatcccaaggcccgactccccgcaccactcagggtcctgtggacagctcacctagcggcaatggctgcagaggctggaagacggcagccacctgactgggcagaccctcaagcagacctacagcaagtttgacacaaactcgcacaaccatgacgcactgctcaagaactacgggctgctccactgcttcaggaaggacatggacaaggtcgagacattcctgcgcatggtgcagtgccgctctgtggagggcagctgtggcttctaggggcccgcgtggcatcctgtgacccctccccagtgcctctcctggccctgaaggtgccactccagtgcccaccagccttgtcttaataaaattaagttgtattgtt

SEQ ID NO: 1329 - protein, 23 aa, Homo sapiens
MAAEAGRRQPPDWADPQADLQQV

SEQ ID NO: 1330 - DNA, 837 bp, Homo sapiens
agcatcccaaggcccgactccccgcaccactcagggtcctgtggacagctcacctagcggcaatggctgcaggctcccggacgtccctgctcctggcttttgccctgctctgcctgccctggcttcaagaggctggtgccgtccaaaccgttcccttatccaggctttttaaagaggctatgctccaagcccatcgcgcacaccagctggccattgacacctaccaggagtttataagctcttggggaatggaagcctatatcacaaaggaacagaagtattcattcctgcatgactcccagacctccttctgcttctcagactctattccgacatcctccaacatggaggaaacgcagcagaaatccaacttagagctgctccacatctccctgctgctcatcgagtcgcggctggagcccgtgcggttcctcaggagtaccttcaccaacaacctggtgtatgacacctcggacagcgatgactatcacctcctaaaggacctagaggaaggcatccaaatgctgatggggaggctggaagacggcagccacctgactgggcagaccctcaagcagacctacagcaagtttgacacaaactcgcacaaccatgacgcactgctcaagaactacgggctgctccactgcttcaggaaggacatggacaaggtcgagacattcctgcgcatggtgcagtgccgctctgtggagggcagctgtggcttctaggggcccgcgtggcatcctgtgacccctccccagtgcctctcctggccctgaaggtgccactccagtgcccaccagccttgtcttaataaaattaagttgtattgtt

SEQ ID NO: 1331 - protein, 222 aa, Homo sapiens
MAAGSRTSLLLAFALLCLPWLQEAGAVQTVPLSRLFKEAMLQAHRAHQLAIDTYQEFISSWGMEAYITKEQKYSFLHDSQTSFCFSDSIPTSSNMEETQQKSNLELLHISLLLIESRLEPVRFLRSTFTNNLVYDTSDSDDYHLLKDLEEGIQMLMGRLEDGSHLTGQTLKQTYSKFDTNSHNHDALLKNYGLLHCFRKDMDKVETFLRMVQCRSVEGSCGF

SEQ ID NO: 1332 - DNA, 588 bp, Homo sapiens
agcatcccaaggcccgactccccgcaccactcagggtcctgtggacagctcacctagcggcaatggctgcagactctattccgacatcctccaacatggaggaaacgcagcagaaatccaacttagagctgctccacatctccctgctgctcatcgagtcgcggctggagcccgtgcggttcctcaggagtaccttcaccaacaacctggtgtatgacacctcggacagcgatgactatcacctcctaaaggacctagaggaaggcatccaaatgctgatggggaggctggaagacggcagccacctgactgggcagaccctcaagcagacctacagcaagtttgacacaaactcgcacaaccatgacgcactgctcaagaactacgggctgctccactgcttcaggaaggacatggacaaggtcgagacattcctgcgcatggtgcagtgccgctctgtggagggcagctgtggcttctaggggcccgcgtggcatcctgtgacccctccccagtgcctctcctggccctgaaggtgccactccagtgcccaccagccttgtcttaataaaattaagttgtattgtt

SEQ ID NO: 1333 - protein, 139 aa, Homo sapiens
MAADSIPTSSNMEETQQKSNLELLHISLLLIESRLEPVRFLRSTFTNNLVYDTSDSDDYHLLKDLEEGIQMLMGRLEDGSHLTGQTLKQTYSKFDTNSHNHDALLKNYGLLHCFRKDMDKVETFLRMVQCRSVEGSCGF

SEQ ID NO: 1334 - DNA, 865 bp, Homo sapiens
ctcaaacaccgcctgctaaaaatacccgactggaggagcataaaagcgcagccgagcccagcgccccgcacttttctgagcagacgtccagagcagagtcagccagcatgaccgagcgccgcgtccccttctcgctcctgcggggccccagctgggaccccttccgcgactggtacccgcatagccgcctcttcgaccaggccttcgggctgccccggctgccggaggagtggtcgcagtggttaggcggcagcagctggccaggctacgtgcgccccctgccccccgccgccatcgagagccccgcagtggccgcgcccgcctacagccgcgcgctcagccggcaactcagcagcggggtctcggagatccggcacactgcggaccgctggcgcgtgtccctggatgtcaaccacttcgccccggacgagctgacggtcaagaccaaggatggcgtggtggagatcaccggcaagcacgaggagcggcaggacgagcatggctacatctcccggtgcttcacgcggaaatacacgctgccccccggtgtggaccccacccaagtttcctcctccctgtcccctgagggcacactgaccgtggaggcccccatgcccaagctagccacgcagtccaacgagatcaccatcccagtcaccttcgagtcgcgggcccagcttgggggcccagaagctgcaaaatccgatgagactgccgccaagtaaagccttagcctggatgcccacccctgctgccgccactggctgtgcctcccccgccacctgtgtgttcttttgatacatttatcttctgtttttctcaaataaagttcaaagcaaccacctgtaaaaaaaaaaaaaaaaaa

SEQ ID NO: 1335 - protein, 205 aa, Homo sapiens
MTERRVPFSLLRGPSWDPFRDWYPHSRLFDQAFGLPRLPEEWSQWLGGSSWPGYVRPLPPAAIESPAVAAPAYSRALSRQLSSGVSEIRHTADRWRVSLDVNHFAPDELTVKTKDGVVEITGKHEERQDEHGYISRCFTRKYTLPPGVDPTQVSSSLSPEGTLTVEAPMPKLATQSNEITIPVTFESRAQLGGPEAAKSDETAAK

SEQ ID NO: 1336 - DNA, 700 bp, Homo sapiens
gcggcgtgagaagccatgagcagcaaagtctctcgcgacaccctgtacgaggcggtgcgggaagtcctgcacgggaaccagcgcaagcgccgcaagttcctggagacggtggagttgcagatcagcttgaagaactatgatccccagaaggacaagcgcttctcgggcaccgtcaggcttaagtccactccccgccctaagttctctgtgtgtgtcctgggggaccagcagcactgtgacgaggctaaggccgtggatatcccccacatggacatcgaggcgctgaaaaaactcaacaagaataaaaaactggtcaagaagctggccaagaagtatgatgcgtttttggcctcagagtctctgatcaagcagattccacgaatcctcggcccaggtttaaataaggcaggaaagttcccttccctgctcacacacaacgaaaacatggtggccaaagtggatgaggtgaagtccacaatcaagttccaaatgaagaaggtgttatgtctggctgtagctgttggtcacgtgaagatgacagacgatgagcttgtgtataacattcacctggctgtcaacttcttggtgtcattgctcaagaaaaactggcagaatgtccgggccttatatatcaagagcaccatgggcaagccccagcgcctatattaaggcacatttgaataaattctattaccagttc

SEQ ID NO: 1337 - protein, 217 aa, Homo sapiens
MSSKVSRDTLYEAVREVLHGNQRKRRKFLETVELQISLKNYDPQKDKRFSGTVRLKSTPRPKFSVCVLGDQQHCDEAKAVDIPHMDIEALKKLNKNKKLVKKLAKKYDAFLASESLIKQIPRILGPGLNKAGKFPSLLTHNENMVAKVDEVKSTIKFQMKKVLCLAVAVGHVKMTDDELVYNIHLAVNFLVSLLKKNWQNVRALYIKSTMGKPQRLY

SEQ ID NO: 1338 - DNA, 2767 bp, Homo sapiens
gggcgggcgcattgcagactgcggagtcagacggtgctatgtacgccctcttcctcctggccagcctcctgggcgcggctctagccggcccggtccttggactgaaagaatgcaccaggggctcggcagtgtggtgccagaatgtgaagacggcgtccgactgcggggcagtgaagcactgcctgcagaccgtttggaacaagccaacagtgaaatcccttccctgcgacatatgcaaagacgttgtcaccgcagctggtgatatgctgaaggacaatgccactgaggaggagatccttgtttacttggagaagacctgtgactggcttccgaaaccgaacatgtctgcttcatgcaaggagatagtggactcctacctccctgtcatcctggacatcattaaaggagaaatgagccgtcctggggaggtgtgctctgctctcaacctctgcgagtctctccagaagcacctagcagagctgaatcaccagaagcagctggagtccaataagatcccagagctggacatgactgaggtggtggcccccttcatggccaacatccctctcctcctctaccctcaggacggcccccgcagcaagccccagccaaaggataatggggacgtttgccaggactgcattcagatggtgactgacatccagactgctgtacggaccaactccacctttgtccaggccttggtggaacatgtcaaggaggagtgtgaccgcctgggccctggcatggccgacatatgcaagaactatatcagccagtattctgaaattgctatccagatgatgatgcacatgcaacccaaggagatctgtgcgctggttgggttctgtgatgaggtgaaagagatgcccatgcagactctggtccccgccaaagtggcctccaagaatgtcatccctgccctggaactggtggagcccattaagaagcacgaggtcccagcaaagtctgatgtttactgtgaggtgtgtgaattcctggtgaaggaggtgaccaagctgattgacaacaacaagactgagaaagaaatactcgacgcttttgacaaaatgtgctcgaagctgccgaagtccctgtcggaagagtgccaggaggtggtggacacgtacggcagctccatcctgtccatcctgctggaggaggtcagccctgagctggtgtgcagcatgctgcacctctgctctggcacgcggctgcctgcactgaccgttcacgtgactcagccaaaggacggtggcttctgcgaagtgtgcaagaagctggtgggttatttggatcgcaacctggagaaaaacagcaccaagcaggagatcctggctgctcttgagaaaggctgcagcttcctgccagacccttaccagaagcagtgtgatcagtttgtggcagagtacgagcccgtgctgatcgagatcctggtggaggtgatggatccttccttcgtgtgcttgaaaattggagcctgcccctcggcccataagcccttgttgggaactgagaagtgtatatggggcccaagctactggtgccagaacacagagacagcagcccagtgcaatgctgtcgagcattgcaaacgccatgtgtggaactaggaggaggaatattccatcttggcagaaaccacagcattggtttttttctacttgtgtgtctgggggaatgaacgcacagatctgtttgactttgttataaaaatagggctcccccacctcccccatttctgtgtcctttattgtagcattgctgtctgcaagggagcccctagcccctagcccctggcagacatagctgcttcagtgccccttttctctctgctagatggatgttgatgcactggaggtcttttagcctgcccttgcatggcgcctgctggaggaggagagagctctgctggcatgagccacagtttcttgactggaggccatcaaccctcttggttgaggccttgttctgagccctgacatgtgcttgggcactggtgggcctgggcttctgaggtggcctcctgccctgatcagggaccctccccgctttcctgggcctctcagttgaacaaagcagcaaaacaaaggcagttttatatgaaagattagaagcctggaataatcaggctttttaaatgatgtaattcccactgtaatagcatagggattttggaagcagctgctggtggcttgggacatcagtggggccaagggttctctgtccctggttcaactgtgatttggctttcccgtgtctttcctggtgatgccttgtttggggttctgtgggtttgggtgggaagagggccatctgcctgaatgtaacctgctagctctccgaagccctgcgggcctggcttgtgtgagcgtgtggacagtggtggccgcgctgtgcctgctcgtgttgcctacatgtccctggctgttgaggcgctgcttcagcctgcacccctcccttgtctcatagatgctccttttgaccttttcaaataaatatggatggcgagctcctaggcctctggcttcctggtagagggcggcatgccgaagggtctgtctgggtgtggattggatgctgggggtgtgggggttggaagctgtctgtggcccacttgggcacccacgcttctgtccacttctggttgccaggagacagcaagcaaagccagcaggacatgaagttgctattaaatggacttcgtgatttttgttttgcactaaagtttctgtgatttaacaataaaattctgttagcccccccg

SEQ ID NO: 1339 - protein, 524 aa, Homo sapiens
MYALFLLASLLGAALAGPVLGLKECTRGSAVWCQNVKTASDCGAVKHCLQTVWNKPTVKSLPCDICKDVVTAAGDMLKDNATEEEILVYLEKTCDWLPKPNMSASCKEIVDSYLPVILDIIKGEMSRPGEVCSALNLCESLQKHLAELNHQKQLESNKIPELDMTEVVAPFMANIPLLLYPQDGPRSKPQPKDNGDVCQDCIQMVTDIQTAVRTNSTFVQALVEHVKEECDRLGPGMADICKNYISQYSEIAIQMMMHMQPKEICALVGFCDEVKEMPMQTLVPAKVASKNVIPALELVEPIKKHEVPAKSDVYCEVCEFLVKEVTKLIDNNKTEKEILDAFDKMCSKLPKSLSEECQEVVDTYGSSILSILLEEVSPELVCSMLHLCSGTRLPALTVHVTQPKDGGFCEVCKKLVGYLDRNLEKNSTKQEILAALEKGCSFLPDPYQKQCDQFVAEYEPVLIEILVEVMDPSFVCLKIGACPSAHKPLLGTEKCIWGPSYWCQNTETAAQCNAVEHCKRHVWN

SEQ ID NO: 1340 - DNA, 1983 bp, Homo sapiens
cgagtaaagtttgcaaagaggcgcgggaggcggcagccgcagcgaggaggcggcggggaagaagcgcagtctccgggttgggggcgggggcggggggggcgccaaggagccgggtggggggcggcggccagcatgcggccccgcagcgccctgccccgcctgctgctgccgctgctgctgctgcccgccgccgggccggcccagttccacggggagaagggcatctccatcccggaccacggcttctgccagcccatctccatcccgctgtgcacggacatcgcctacaaccagaccatcatgcccaaccttctgggccacacgaaccaggaggacgcaggcctagaggtgcaccagttctatccgctggtgaaggtgcagtgctcgcccgaactgcgcttcttcctgtgctccatgtacgcacccgtgtgcaccgtgctggaacaggccatcccgccgtgccgctctatctgtgagcgcgcgcgccagggctgcgaagccctcatgaacaagttcggttttcagtggcccgagcgcctgcgctgcgagcacttcccgcgccacggcgccgagcagatctgcgtcggccagaaccactccgaggacggagctcccgcgctactcaccaccgcgccgccgccgggactgcagccgggtgccgggggcaccccgggtggcccgggcggcggcggcgctcccccgcgctacgccacgctggagcaccccttccactgcccgcgcgtcctcaaggtgccatcctatctcagctacaagtttctgggcgagcgtgattgtgctgcgccctgcgaacctgcgcggcccgatggttccatgttcttctcacaggaggagacgcgtttcgcgcgcctctggatcctcacctggtcggtgctgtgctgcgcttccaccttcttcactgtcaccacgtacttggtagacatgcagcgcttccgctacccagagcggcctatcatttttctgtcgggctgctacaccatggtgtcggtggcctacatcgcgggcttcgtgctccaggagcgcgtggtgtgcaacgagcgcttctccgaggacggttaccgcacggtggtgcagggcaccaagaaggagggctgcaccatcctcttcatgatgctctacttcttcagcatggccagctccatctggtgggtcatcctgtcgctcacctggttcctggcagccggcatgaagtggggccacgaggccatcgaggccaactctcagtacttccacctggccgcctgggccgtgccggccgtcaagaccatcaccatcctggccatgggccagatcgacggcgacctgctgagcggcgtgtgcttcgtaggcctcaacagcctggacccgctgcggggcttcgtgctagcgccgctcttcgtgtacctgttcatcggcacgtccttcctcctggccggcttcgtgtcgctcttccgcatccgcaccatcatgaagcacgacggcaccaagaccgaaaagctggagcggctcatggtgcgcatcggcgtcttctccgtgctctacacagtgcccgccaccatcgtcatcgcttgctacttctacgagcaggccttccgcgagcactgggagcgctcgtgggtgagccagcactgcaagagcctggccatcccgtgcccggcgcactacacgccgcgcatgtcgcccgacttcacggtctacatgatcaaatacctcatgacgctcatcgtgggcatcacgtcgggcttctggatctggtcgggcaagacgctgcactcgtggaggaagttctacactcgcctcaccaacagccgacacggtgagaccaccgtgtgagggacgcccccaggccggaaccgcgcggcgctttcctccgcccggggtggggcccctacagactccgtattttatttttttaaataaaaaacgatcgaaaccatttcacttttaggttgctttttaaaagagaactctctgcccaacaccccc

SEQ ID NO: 1341 - protein, 565 aa, Homo sapiens
MRPRSALPRLLLPLLLLPAAGPAQFHGEKGISIPDHGFCQPISIPLCTDIAYNQTIMPNLLGHTNQEDAGLEVHQFYPLVKVQCSPELRFFLCSMYAPVCTVLEQAIPPCRSICERARQGCEALMNKFGFQWPERLRCEHFPRHGAEQICVGQNHSEDGAPALLTTAPPPGLQPGAGGTPGGPGGGGAPPRYATLEHPFHCPRVLKVPSYLSYKFLGERDCAAPCEPARPDGSMFFSQEETRFARLWILTWSVLCCASTFFTVTTYLVDMQRFRYPERPIIFLSGCYTMVSVAYIAGFVLQERVVCNERFSEDGYRTVVQGTKKEGCTILFMMLYFFSMASSIWWVILSLTWFLAAGMKWGHEAIEANSQYFHLAAWAVPAVKTITILAMGQIDGDLLSGVCFVGLNSLDPLRGFVLAPLFVYLFIGTSFLLAGFVSLFRIRTIMKHDGTKTEKLERLMVRIGVFSVLYTVPATIVIACYFYEQAFREHWERSWVSQHCKSLAIPCPAHYTPRMSPDFTVYMIKYLMTLIVGITSGFWIWSGKTLHSWRKFYTRLTNSRHGETTV

SEQ ID NO: 1342 - DNA, 3581 bp, Homo sapiens
atacgtggctgccgtctgtccccgctgaggaggtgcagcagccggagatggcggcggtgctgaacgcagagcgactcgaggtgtccgtcgacggcctcacgctcagcccggacccggaggagcggcctggggcggagggcgccccgctgctgccgccaccgctgccaccgccctcgccacctggatccggtcgcggcccgggcgcctcaggggagcagcccgagcccggggaggcggcggctgggggcgcggcggaggaggcgcggcggctggagcagcgctggggtttcggcctggaggagttgtacggcctggcactgcgcttcttcaaagaaaaagatggcaaagcatttcatccaacttatgaagaaaaattgaagcttgtggcactgcataagcaagttcttatgggcccatataatccagacacttgtcctgaggttggattctttgatgtgttggggaatgacaggaggagagaatgggcagccctgggaaacatgtctaaagaggatgccatggtggagtttgtcaagctcttaaataggtgttgccatctcttttcaacatatgttgcgtcccacaaaatagagaaggaagagcaagaaaaaaaaaggaaggaggaagaggagcgaaggcggcgtgaagaggaagaaagagaacgtctgcaaaaggaggaagagaaacgtaggagagaagaagaggaaaggcttcgacgggaggaagaggaaaggagacggatagaagaagaaaggcttcggttggagcagcaaaagcagcagataatggcagctttaaactcccagactgccgtgcagttccagcagtatgcagcccaacagtatccagggaactacgaacagcagcaaattctcatccgccagttgcaggagcaacactatcagcagtacatgcagcagttgtatcaagtccagcttgcacagcaacaggcagcattacagaaacaacaggaagtagtagtggctgggtcttccttgcctacatcatcaaaagtgaatgcaactgtaccaagtaatatgatgtcagttaatggacaggccaaaacacacactgacagctccgaaaaagaactggaaccagaagctgcagaagaagccctggagaatggaccaaaagaatctcttccagtaatagcagctccatccatgtggacacgacctcagatcaaagacttcaaagagaagattcagcaggatgcagattccgtgattacagtgggccgaggagaagtggtcactgttcgagtacccacccatgaagaaggatcatatctcttttgggaatttgccacagacaattatgacattgggtttggggtgtattttgaatggacagactctccaaacactgctgtcagcgtgcatgtcagtgagtccagcgatgacgacgaggaggaagaagaaaacatcggttgtgaagagaaagccaaaaagaatgccaacaagcctttgctggatgagattgtgcctgtgtaccgacgggactgtcatgaggaggtgtatgctggcagccatcaatatccagggagaggagtctatctcctcaagtttgacaactcctactctttgtggcggtcaaaatcagtctactacagagtctattatactagataaaaatgttgttacaaagtctggagtctagggttgggcagaagatgacatttaatttggaaatttctttttacttttgtggagcattagagtcacagtttaccttattgatattggtctgatggtttgtgaactcttgctgggaatcaaaatttccttgagactctttagcattcatactttggggttaaaggagattcctcagactcatccagcccttgggtgctgaccagcagagtcactagtggatgctgaagttacatgagctacatgttaaatatttaaagtctccaaaataaaacaccccaacgttgaccttacccggctgatggttagccccttgctgcctgctccatgtgtcttatgagagcccgtagttacagtgtcctctaatttgaaatccataagttaacaagtctatatcaggtgcagctggctttgattaaaggccatttttaaaacttaaaaactcaacacctcacagattataatagaaaaagaaatggcctcagtttgatctcgttcagaatgacccagattgtttctgctttgggtgcagctgtttagttcagagttatattacagagaattattttctgagataatcttaaactagaatgttcaaaactaattgataattgaagtatcaagatacgtagaacacctcagagatttttcttcaggaacttccacaaactttgaatccttgtatctttatttggtattcatactactagtagcaaaatacaggttttttgttttgttttgttttgttttggcttcatagagtatctcaaattgaaacttttctgcacaaagaataaaattaaggattttataaactcaaattggcacctactgaattaaaatacataaaatcatttaaatataattcagcatatgggaagtaacattgcactaatatggaaatcactgccagagacagtctattttcttttaatttgttactacttagtcacaaaccccacattattccagtttggaattacttattaaggagaattggaaatacatatgcccatgcttaaattttatagctttaatttgtgttatttctttattgacgggaagaggtacatctttttttccttactgaaaacaaatatggattaattgcctcaaatttgtataagtgattggctagtgattcttgttttcagaagggagagtggtatagatagaaaatgacaaagatggcaatatacacttaatgttgttattgtatgttgttactgaagtacttagatttttaaaatttcaaatcctaaatcacttcttgtaggagggttttcattaactgcagtatatacagttcactacatatgggttgtttgagttttttgtgtgctgtatttctttctgttttttaatacctggttttgtacatatctaactctgttctcttttggttgttcagaaactggattttttttttcttaagcagtgcttaatttgtgttttttaattttgattcagaagtagtcccagctcataggtgttcatactgttacatccagaacatttgtcaggctctctgtcagctttcatgtacatatggtatagaaaccatggagttaggcacttcctggattttttttttatgagaaaaatactgtatttaaaatgtaaaataaacttttaaaaagcaggcactaatatatatttcttccagcctttgattacaaatttgtccttgcacatgttaagatgaattatctcctaaaaatatcattgttcttgggagcagtgtatgttactttacatagcagcggttcctgtcatgtgttcatgtcagaatatttttggttttaaactttcttattgcctttggctgttgattagtacagtacaagtgcgatttcaaaaagatcttgaaagtaatatatttaatcaattaaaatgtttatctgtaaaaaaaaaaaaaaaaaa

SEQ ID NO: 1343 - protein, 528 aa, Homo sapiens
MAAVLNAERLEVSVDGLTLSPDPEERPGAEGAPLLPPPLPPPSPPGSGRGPGASGEQPEPGEAAAGGAAEEARRLEQRWGFGLEELYGLALRFFKEKDGKAFHPTYEEKLKLVALHKQVLMGPYNPDTCPEVGFFDVLGNDRRREWAALGNMSKEDAMVEFVKLLNRCCHLFSTYVASHKIEKEEQEKKRKEEEERRRREEEERERLQKEEEKRRREEEERLRREEEERRRIEEERLRLEQQKQQIMAALNSQTAVQFQQYAAQQYPGNYEQQQILIRQLQEQHYQQYMQQLYQVQLAQQQAALQKQQEVVVAGSSLPTSSKVNATVPSNMMSVNGQAKTHTDSSEKELEPEAAEEALENGPKESLPVIAAPSMWTRPQIKDFKEKIQQDADSVITVGRGEVVTVRVPTHEEGSYLFWEFATDNYDIGFGVYFEWTDSPNTAVSVHVSESSDDDEEEEENIGCEEKAKKNANKPLLDEIVPVYRRDCHEEVYAGSHQYPGRGVYLLKFDNSYSLWRSKSVYYRVYYTR

SEQ ID NO: 1344 - DNA, 6045 bp, Homo sapiens
cgggtcctcagcctggaatcaccccttgagaaggaccccagagtcctcggcgcccagtccgtcccccgaggcagggcactgaaggggttaagtcccctggggctggattccgccttccggcttttcccagaccccagagccggtccctggaacactgcagtcctgagctctgggatggagcccgagactgcgctgtggggcccggatctgcagggtccggaacagagccccaacgatgctcacagaggtgccgagagtgaaaacgaagaggagagccctcggcaggaaagttctggggaggagatcatcatgggagacccggctcagagtccagaatccaaggactcaacagagatgtccctggagagatcctcccaggacccctctgtcccccagaaccccccaaccccactgggtcactccaatcccttggaccaccagatccccctggaccccccagccccggaggtagtccctaccccatctgactggaccaaggcctgcgaggccagctggcagtggggcgctctcaccacatggaacagccccccagtcgtccccgccaacgagcccagcctgcgggagctggtgcagggccgcccggcgggggcggagaagccctacatctgcaacgagtgcggcaagagcttcagccagtggtccaagctgctgcggcaccagcgcatccacacgggagagcggcccaacacctgctccgagtgcggcaagagcttcacgcagagctcgcacctggtgcagcaccagcgcacgcacaccggcgagaagccctacaagtgccccgactgcggcaagtgcttcagctggagctccaacctggtgcagcaccagcgcacgcacacgggagagaagccctacaagtgcacggagtgcgagaaagccttcacccagagcaccaacctcatcaagcaccagcgatcccacaccggcgagaagccctacaagtgcggcgagtgccgccgggctttctaccgcagctcggacctcatccagcaccaggccacccacacaggcgagaaaccctacaagtgccccgagtgcgggaagcgcttcggccagaaccacaacctcctcaagcaccagaagatccacgcgggcgagaagccataccgctgcaccgagtgcgggaagagcttcatccagagctcggagctgacccagcaccagcgcacgcacacaggcgagaagccctacgagtgcctagagtgcggcaagagcttcggccacagctccaccctcatcaagcaccagcggactcacctgcgcgaggacccgttcaagtgcccagtgtgcggcaagaccttcaccctgagcgccacgttgctgcggcaccagcgcacgcacacgggcgagcggccctacaagtgcccagagtgcggcaagagcttcagcgtcagctccaacctcatcaaccaccagcgcatccaccgcggcgagcggccctacatctgcgccgactgcggcaagagcttcatcatgagctccacccttatccgccaccagcgcatccacaccggtgagaagccctacaagtgttccgactgcggcaagagcttcatccgcagctcccaccttatccagcaccgccgcacgcacaccggcgagaagccctacaagtgccccgagtgcggcaagagcttcagccagagctccaaccttattacccacgtccgcacgcacatggacgagaacctgttcgtgtgctccgactgcgggaaggccttcctggaagcccacgagctggagcagcaccgggtgatccatgagagggggaagaccccagcgcgtagggcccagggcgacagcctgctggggctcggggacccctccctgctgaccccgccgccgggagccaagccgcacaagtgtctcgtgtgcggaaagggcttcaacgacgagggcatcttcatgcaacatcagaggatccacatcggagaaaacccctacaaaaatgcagacggcctcatcgcacacgcagcccccaaacctcctcagttacgatccccaaggctccctttcagagggaattcctaccccggggctgcggagggcagagcggaggcccccggacagccccttaagccgccggagggtcaggagggcttcagccagaggcgggggctgctgtcctccaagacctacatctgctcccactgcggagagagcttcctggatcgctctgtgctcctccagcatcagctcacccacggcaacgaaaagccctttctctttcctgattatagaattggcctaggggaaggcgcagggcccagccccttcttaagtgggaagccctttaaatgccctgaatgcaaacaaagctttggcctcagctctgagctgctgctgcaccagaaagtccatgcaggcgggaagagctcccagaagagtccagagctggggaagagctcttccgtcctcctggagcatctcaggagccccctgggggccagaccctaccgctgctcagattgcagggcctccttcctcgaccgcgtggccctcacccggcaccaagaaacccacacccaggaaaaaccccccaatcccgaggacccccctccagaggcagtcaccctgtccacagatcaggaaggtgagggcgagacccctacccccacagagagcagcagccatggggaagggcaaaaccccaaaaccctagtggaagaaaagccctatctgtgccccgagtgtggagccggcttcacagaagtcgcagccctcctgctccataggagctgccacccaggtgtctccctgtgaaatgggtctggagaccaggggcctcgctctctccagagaggaacactggattttttcccccaaaaaaattacatggggaagggaggataaccctatcagatggtagtggagtggaggagaaagaaccctgggaaaaaatagtgcttttacatcagtgatgagaaaccctataaaattgttggtgggaagcacttataaggcagtagagaaaaactgttgggttagaaaccctataaatatgtaggaaaaaaaaaagccctttaagtctgtagcagaaaaaccctataaaccatagtggataaaagccctattaattgtaggaagaggtcccaatatgtctctgaacaaccctataaaattgtatcaaaatccttaggaaaatcctatagggtcggggaagtaccgcaatggcactgacccgggagtaacgaccctcagatgatgcagaaaacacctctccctcactgttccacaatgttctctcccagcagccctggacagttctcatggaggaagatgctcagctgggggagtggtgtgggaactgggtggaactgaaaaggaagaaaataggagaaaaataagtgaccaggggctctggagcccccagaggagataagacagagactaggaagaaaaggtcccactcactgcactggggtccttggggtttgaggacaatgttagatgcattgtgtgttttagggaaagaggcctatggaatcccttatcaaaaccccaaaatggggaagaaaaaacaaattggcaagcctttttaaaggctgaagtttggggtgcagaaacatggtcagtataagaatactgagaaaccaccacaaaaattagggggaagcagggggcagtttctgttagattgctttgaggggagcaaaccaaggtggggaaactgctcacatggaacccagctaactccaggccccttcttgcttccggaagcttgcgaaactgcaagtagcaggcaggtcccagctctcagagtgcaagggttctccccacaccaggcaggaccaccctttctccctgcccagccagggacttctactctgcaaggcctccagggatggcggttgcctcccaccacattctcaggtctcaccttcaggaggtttttcctgaaatctaactgccgccagtggcagctcatttcctcaaattctgtcctcagtggagagggagaaccgctgctagtcgacctccaaagaataaagcccttcagagacttagggcctgcgtgtgggcctccccagccttctccaagtcatcagggccacagaatttcttagaaagctttgattagccagcaacttgattttaaacttcagctattcatctttgttggtagcaaggctgccccgcaggataaggcagccctcctccctggtggggatccagacaccccacagactgagccacaggtccctgaagagtccgcagaggccgtatcaccctcttcaccctggtacctggagccctccagggttgtgagatccagcccaatctcagccttgagatggatgggatggattccactcacttggctcccctctcctccttggccagaaaccttcagaaggaaacagaaggatgagaaagcctcccttgccaggcccatctcacctcccacaccacacagttacacattcataaacagccaagcctgctcacaggcctgggcatatgtggctggggagagactgttgccctatgagatggtggaagacagaaaactcttgaatgaaacatctgtaacaagactcccactccctaatcctggagaccccttcaaaaggagaggactctgctcagcgctgggtcagaaaggaagtgcttgccaaccccagtaatgcgctgtcctggagtaagaggactgagatgccagctgtggggcccgtcaggagtcacgtctcaagagaggggtgacccagatttttgcaaagctgtggaagagacctctaattccatgacctaaagtttcacacaacctttatgcaaatccttcgccatttgtctatcctggccccagcaggatgaccctcacatttaaaaggatcaaaatctcaaacattgtgggaggaaaacgccaggcctgctggggagagggagaaggcaggcctcaggattgtgcggagaaccatgttgccatctgcataacgccccagcctatccaagtgccaggaagggaagcactactgaggggggtgctgcctgtgggtctcttcctaacagaacgccaacgaagggggtgccctgtaagaatgagaagtctgccaagtctaaggagatgtccccctccccaagatggtagcagaaactgaagttgtaaagacaaacctctcgcaaagccagaagcagatgctctcaaaaacaggcctaaggaatctgttcccagaagaggcctggggagcagcttttggggctcagaggccagtctggggggaggcaggcagtgtgactgaaggccggcgcaggcctgtttcggactagggtgtagcatatttagtaggatgctcacatgttgtagggatgggtgagggctaaggggcttggctcttgtacgggatggatgatgtgagcgcacagttcgtagggtcaggcgtcttgcggtaggaaaggggcagggttcgatacctctggggtgtggcgtgttctctcttgcccacctccccaagctcctttaaccaggagcttccctcccagagtgagctacgtcttgggaggattgaagcagggaggtggcagtggctagagttgctcagatcggctcagatgaaggcccaggggtcaaagcatttgctcaccacaactgagtctggaaggcactgtgcagccaaaccctcttgtccaatcacatgcaggccccaggcccctcagaaacgccctggtggagggaggagcccaacagatagggtcagggagtcagtggggaaagcagaggggagagcttagagtgaaacttgaaactgctatggacatggaggtcagatgggaacttggaactgggcatgaatcctgaatggtggggaaacttgaagccatcacagccaagaggtggggttccatgacctgccctgaggtcagcagctcccagactcctttgccctcactagggaagccccagtcaccggacttgtccccatggagtgaagagaggccccatttttgagtgttgtgtgtccaaaacagtgttgtgtcactggtggtcatgttgcttagttgaagagaataaagggaataagattt

SEQ ID NO: 1345 - protein, 927 aa, Homo sapiens
RVLSLESPLEKDPRVLGAQSVPRGRALKGLSPLGLDSAFRLFPDPRAGPWNTAVLSSGMEPETALWGPDLQGPEQSPNDAHRGAESENEEESPRQESSGEEIIMGDPAQSPESKDSTEMSLERSSQDPSVPQNPPTPLGHSNPLDHQIPLDPPAPEVVPTPSDWTKACEASWQWGALTTWNSPPVVPANEPSLRELVQGRPAGAEKPYICNECGKSFSQWSKLLRHQRIHTGERPNTCSECGKSFTQSSHLVQHQRTHTGEKPYKCPDCGKCFSWSSNLVQHQRTHTGEKPYKCTECEKAFTQSTNLIKHQRSHTGEKPYKCGECRRAFYRSSDLIQHQATHTGEKPYKCPECGKRFGQNHNLLKHQKIHAGEKPYRCTECGKSFIQSSELTQHQRTHTGEKPYECLECGKSFGHSSTLIKHQRTHLREDPFKCPVCGKTFTLSATLLRHQRTHTGERPYKCPECGKSFSVSSNLINHQRIHRGERPYICADCGKSFIMSSTLIRHQRIHTGEKPYKCSDCGKSFIRSSHLIQHRRTHTGEKPYKCPECGKSFSQSSNLITHVRTHMDENLFVCSDCGKAFLEAHELEQHRVIHERGKTPARRAQGDSLLGLGDPSLLTPPPGAKPHKCLVCGKGFNDEGIFMQHQRIHIGENPYKNADGLIAHAAPKPPQLRSPRLPFRGNSYPGAAEGRAEAPGQPLKPPEGQEGFSQRRGLLSSKTYICSHCGESFLDRSVLLQHQLTHGNEKPFLFPDYRIGLGEGAGPSPFLSGKPFKCPECKQSFGLSSELLLHQKVHAGGKSSQKSPELGKSSSVLLEHLRSPLGARPYRCSDCRASFLDRVALTRHQETHTQEKPPNPEDPPPEAVTLSTDQEGEGETPTPTESSSHGEGQNPKTLVEEKPYLCPECGAGFTEVAALLLHRSCHPGVSL

SEQ ID NO: 1346 - DNA, 2825 bp, Homo sapiens
gcgaaattgaggtttcttggtattgcgcgtttctcttccttgctgactctccgaatggccatggactcgtcgcttcaggcccgcctgtttcccggtctcgctatcaagatccaacgcagtaatggtttaattcacagtgccaatgtaaggactgtgaacttggagaaatcctgtgtttcagtggaatgggcagaaggaggtgccacaaagggcaaagagattgattttgatgatgtggctgcaataaacccagaactcttacagcttcttcccttacatccgaaggacaatctgcccttgcaggaaaatgtaacaatccagaaacaaaaacggagatccgtcaactccaaaattcctgctccaaaagaaagtcttcgaagccgctccactcgcatgtccactgtctcagagcttcgcatcacggctcaggagaatgacatggaggtggagctgcctgcagctgcaaactcccgcaagcagttttcagttcctcctgcccccactaggccttcctgccctgcagtggctgaaataccattgaggatggtcagcgaggagatggaagagcaagtccattccatccgtggcagctcttctgcaaaccctgtgaactcagttcggaggaaatcatgtcttgtgaaggaagtggaaaaaatgaagaacaagcgagaagagaagaaggcccagaactctgaaatgagaatgaagagagctcaggagtatgacagtagttttccaaactgggaatttgcccgaatgattaaagaatttcgggctactttggaatgtcatccacttactatgactgatcctatcgaagagcacagaatatgtgtctgtgttaggaaacgcccactgaataagcaagaattggccaagaaagaaattgatgtgatttccattcctagcaagtgtctcctcttggtacatgaacccaagttgaaagtggacttaacaaagtatctggagaaccaagcattctgctttgactttgcatttgatgaaacagcttcgaatgaagttgtctacaggttcacagcaaggccactggtacagacaatctttgaaggtggaaaagcaacttgttttgcatatggccagacaggaagtggcaagacacatactatgggcggagacctctctgggaaagcccagaatgcatccaaagggatctatgccatggcctcccgggacgtcttcctcctgaagaatcaaccctgctaccggaagttgggcctggaagtctatgtgacattcttcgagatctacaatgggaagctgtttgacctgctcaacaagaaggccaagctgcgcgtgctggaggacggcaagcaacaggtgcaagtggtggggctgcaggagcatctggttaactctgctgatgatgtcatcaagatgctcgacatgggcagcgcctgcagaacctctgggcagacatttgccaactccaattcctcccgctcccacgcgtgcttccaaattattcttcgagctaaagggagaatgcatggcaagttctctttggtagatctggcagggaatgagcgaggcgcagacacttccagtgctgaccggcagacccgcatggagggcgcagaaatcaacaagagtctcttagccctgaaggagtgcatcagggccctgggacagaacaaggctcacaccccgttccgtgagagcaagctgacacaggtgctgagggactccttcattggggagaactctaggacttgcatgattgccacgatctcaccaggcataagctcctgtgaatatactttaaacaccctgagatatgcagacagggtcaaggagctgagcccccacagtgggcccagtggagagcagttgattcaaatggaaacagaagagatggaagcctgctctaacggggcgctgattccaggcaatttatccaaggaagaggaggaactgtcttcccagatgtccagctttaacgaagccatgactcagatcagggagctggaggagaaggctatggaagagctcaaggagatcatacagcaaggaccagactggcttgagctctctgagatgaccgagcagccagactatgacctggagacctttgtgaacaaagcggaatctgctctggcccagcaagccaagcatttctcagccctgcgagatgtcatcaaggccttacgcctggccatgcagctggaagagcaggctagcagacaaataagcagcaagaaacggccccagtgacgactgcaaataaaaatctgtttggtttgacacccagcctcttccctggccctccccagagaactttgggtacctggtgggtctaggcagggtctgagctgggacaggttctggtaaatgccaagtatgggggcatctgggcccagggcagctggggagggggtcagagtgacatgggacactccttttctgttcctcagttgtcgccctcacgagaggaaggagctcttagttacccttttgtgttgcccttctttccatcaaggggaatgttctcagcatagagctttctccgcagcatcctgcctgcgtggactggctgctaatggagagctccctggggttgtcctggctctggggagagagacggagcctttagtacagctatctgctggctctaaaccttctacgcctttgggccgagcactgaatgtcttgtactttaaaaaaatgtttctgagacctctttctactttactgtctccctagagtcctagaggatccctactgttttctgttttatgtgtttatacattgtatgtaacaataaagagaaaaaataaaaaaaaaaaaaaaaaaaaaaaaaaaaaaaa

SEQ ID NO: 1347 - protein, 725 aa, Homo sapiens
MAMDSSLQARLFPGLAIKIQRSNGLIHSANVRTVNLEKSCVSVEWAEGGATKGKEIDFDDVAAINPELLQLLPLHPKDNLPLQENVTIQKQKRRSVNSKIPAPKESLRSRSTRMSTVSELRITAQENDMEVELPAAANSRKQFSVPPAPTRPSCPAVAEIPLRMVSEEMEEQVHSIRGSSSANPVNSVRRKSCLVKEVEKMKNKREEKKAQNSEMRMKRAQEYDSSFPNWEFARMIKEFRATLECHPLTMTDPIEEHRICVCVRKRPLNKQELAKKEIDVISIPSKCLLLVHEPKLKVDLTKYLENQAFCFDFAFDETASNEVVYRFTARPLVQTIFEGGKATCFAYGQTGSGKTHTMGGDLSGKAQNASKGIYAMASRDVFLLKNQPCYRKLGLEVYVTFFEIYNGKLFDLLNKKAKLRVLEDGKQQVQVVGLQEHLVNSADDVIKMLDMGSACRTSGQTFANSNSSRSHACFQIILRAKGRMHGKFSLVDLAGNERGADTSSADRQTRMEGAEINKSLLALKECIRALGQNKAHTPFRESKLTQVLRDSFIGENSRTCMIATISPGISSCEYTLNTLRYADRVKELSPHSGPSGEQLIQMETEEMEACSNGALIPGNLSKEEEELSSQMSSFNEAMTQIRELEEKAMEELKEIIQQGPDWLELSEMTEQPDYDLETFVNKAESALAQQAKHFSALRDVIKALRLAMQLEEQASRQISSKKRPQ

SEQ ID NO: 1348 - DNA, 2653 bp, Homo sapiens
gagcgcggctggagtttgctgctgccgctgtgcagtttgttcaggggcttgtggtggtgagtccgagaggctgcgtgtgagagacgtgagaaggatcctgcactgaggaggtggaaagaagaggattgctcgaggaggcctggggtctgtgaggcagcggagctgggtgaaggctgcgggttccggcgaggcctgagctgtgctgtcgtcatgcctcaaacccgatcccaggcacaggctacaatcagttttccaaaaaggaagctgtctcgggcattgaacaaagctaaaaactccagtgatgccaaactagaaccaacaaatgtccaaaccgtaacctgttctcctcgtgtaaaagccctgcctctcagccccaggaaacgtctgggcgatgacaacctatgcaacactccccatttacctccttgttctccaccaaagcaaggcaagaaagagaatggtccccctcactcacatacacttaagggacgaagattggtatttgacaatcagctgacaattaagtctcctagcaaaagagaactagccaaagttcaccaaaacaaaatactttcttcagttagaaaaagtcaagagatcacaacaaattctgagcagagatgtccactgaagaaagaatctgcatgtgtgagactattcaagcaagaaggcacttgctaccagcaagcaaagctggtcctgaacacagctgtcccagatcggctgcctgccagggaaagggagatggatgtcatcaggaatttcttgagggaacacatctgtgggaaaaaagctggaagcctttacctttctggtgctcctggaactggaaaaactgcctgcttaagccggattctgcaagacctcaagaaggaactgaaaggctttaaaactatcatgctgaattgcatgtccttgaggactgcccaggctgtattcccagctattgctcaggagatttgtcaggaagaggtatccaggccagctgggaaggacatgatgaggaaattggaaaaacatatgactgcagagaagggccccatgattgtgttggtattggacgagatggatcaactggacagcaaaggccaggatgtattgtacacgctatttgaatggccatggctaagcaattctcacttggtgctgattggtattgctaataccctggatctcacagatagaattctacctaggcttcaagctagagaaaaatgtaagccacagctgttgaacttcccaccttataccagaaatcagatagtcactattttgcaagatcgacttaatcaggtatctagagatcaggttctggacaatgctgcagttcaattctgtgcccgcaaagtctctgctgtttcaggagatgttcgcaaagcactggatgtttgcaggagagctattgaaattgtagagtcagatgtcaaaagccagactattctcaaaccactgtctgaatgtaaatcaccttctgagcctctgattcccaagagggttggtcttattcacatatcccaagtcatctcagaagttgatggtaacaggatgaccttgagccaagaaggagcacaagattccttccctcttcagcagaagatcttggtttgctctttgatgctcttgatcaggcagttgaaaatcaaagaggtcactctggggaagttatatgaagcctacagtaaagtctgtcgcaaacagcaggtggcggctgtggaccagtcagagtgtttgtcactttcagggctcttggaagccaggggcattttaggattaaagagaaacaaggaaacccgtttgacaaaggtgtttttcaagattgaagagaaagaaatagaacatgctctgaaagataaagctttaattggaaatatcttagctactggattgccttaaattcttctcttacaccccacccgaaagtattcagctggcatttagagagctacagtcttcattttagtgctttacacattcgggcctgaaaacaaatatgaccttttttacttgaagccaatgaattttaatctatagattctttaatattagcacagaataatatctttgggtcttactatttttacccataaaagtgaccaggtagaccctttttaattacattcactacttctaccacttgtgtatctctagccaatgtgcttgcaagtgtacagatctgtgtagaggaatgtgtgtatatttacctcttcgtttgctcaaacatgagtgggtatttttttgtttgttttttttgttgttgttgtttttgaggcgcgtctcaccctgttgcccaggctggagtgcaatggcgcgttctctgctcactacagcacccgcttcccaggttgaagtgattctcttgcctcagcctcccgagtagctgggattacaggtgcccaccaccgcgcccagctaattttttaatttttagtagagacagggttttaccatgttggccaggctggtcttgaactcctgaccctcaagtgatctgcccaccttggcctccctaagtgctgggattataggcgtgagccaccatgctcagccattaaggtattttgttaagaactttaagtttagggtaagaagaatgaaaatgatccagaaaaatgcaagcaagtccacatggagatttggaggacactggttaaag

SEQ ID NO: 1349 - protein, 560 aa, Homo sapiens
MPQTRSQAQATISFPKRKLSRALNKAKNSSDAKLEPTNVQTVTCSPRVKALPLSPRKRLGDDNLCNTPHLPPCSPPKQGKKENGPPHSHTLKGRRLVFDNQLTIKSPSKRELAKVHQNKILSSVRKSQEITTNSEQRCPLKKESACVRLFKQEGTCYQQAKLVLNTAVPDRLPAREREMDVIRNFLREHICGKKAGSLYLSGAPGTGKTACLSRILQDLKKELKGFKTIMLNCMSLRTAQAVFPAIAQEICQEEVSRPAGKDMMRKLEKHMTAEKGPMIVLVLDEMDQLDSKGQDVLYTLFEWPWLSNSHLVLIGIANTLDLTDRILPRLQAREKCKPQLLNFPPYTRNQIVTILQDRLNQVSRDQVLDNAAVQFCARKVSAVSGDVRKALDVCRRAIEIVESDVKSQTILKPLSECKSPSEPLIPKRVGLIHISQVISEVDGNRMTLSQEGAQDSFPLQQKILVCSLMLLIRQLKIKEVTLGKLYEAYSKVCRKQQVAAVDQSECLSLSGLLEARGILGLKRNKETRLTKVFFKIEEKEIEHALKDKALIGNILATGLP

SEQ ID NO: 1350 - DNA, 4197 bp, Homo sapiens
gcggaggccgttcctggctttgtagctcgctcaagatggcggcgcagccaccccgcgggatacgcctcagcgcgctttgcccgaagtttttacatacaaattctactagtcacacctggccattcagtgcagttgctgaattaatagataatgcttatgatcctgatgtgaacgctaaacaaatatggattgacaaaacagtgataaatgaccatatatgcttgacattcaccgacaatgggaatggtatgacttctgataaattacataaaatgctaagctttggcttcagtgacaaactcaccatgaatggtcatgtcccagttggattatatgggaatggcttcaagtcgggttctatgcgtctgggtaaagacgcaatcgtttttaccaaaaatggagaaagcatgagcgtgggccttttgtctcagacctacttggaagtcataaaagcggagcatgttgttgttccaatagtggcattcaacaagcaccgacagatgattaatttagcagaatcaaaagccagccttgctgcaattctggaacattctctgttttccacggaacagaagttactggcagaacttgatgctattataggcaagaaggggacgaggatcatcatttggaatcttagaagctacaaaaatgcaacagagttcgattttgaaaaggataaatatgatatcagaattcccgaggatttagatgagataacagggaagaaggggtacaagaagcaggaaaggatggaccagattgcccctgagagtgactattccctgagggcttattgcagtatattatatctaaagccaagaatgcagatcatcctacgtggacagaaagtgaagacacagctggtttcgaagagtcttgcctacatcgaacgtgatgtttatcgaccaaaatttttatctaaaacagtgagaattacctttggattcaactgcagaaataaagatcattatgggataatgatgtatcacagaaatagactcatcaaagcttatgaaaaagttggatgtcagttaagggcaaacaacatgggtgttggagtggttggaattatagagtgtaatttccttaagccaactcataataaacaagatttcgactatactaatgagtacagacttacaataacagcactaggagaaaagctgaatgattactggaatgaaatgaaagtgaagaaaaatacagaatatcctctaaatttgccagttgaagatatacagaagcgtcctgatcagacatgggttcagtgtgatgcctgtctaaagtggcggaaattacctgatgggatggatcaacttcctgaaaaatggtattgctccaataaccctgacccacagttcagaaattgtgaggttccagaagaacctgaagatgaggatttggtacatcccacttatgaaaaaacctacaaaaagaccaacaaggaaaaattcaggatcagacaaccggaaatgatccctcggattaatgctgaactgttgtttcggccaactgctctttcaactccaagcttttcttctcctaaggaaagtgttccaagaagacatctttcagaaggaacaaattcttatgcgacaagacttctaaataatcatcaagttccacctcagtctgaacctgagagcaacagcttgaaacggagactttctactcgttcctcaattttgaatgcaaagaatcggagattgagtagtcagtttgaaaattcagtttataaaggtgatgatgatgatgaagatgtcatcatcttagaagaaaacagtacccccaaacctgcagtagatcatgatattgacatgaaatcagaacagagtcacgttgagcaaggtggtgttcaggttgagtttgtgggtgacagtgaaccttgtggccagactggttcaacaagcacctcatcatcccgatgcgaccagggaaatactgcagctacccagactgaagtaccaagtttagttgttaaaaaagaagaaactgttgaagacgagatagacgtaagaaatgatgcagtgattctgccctcctgtgtagaagctgaagcaaagatacatgaaacccaggaaaccaccgataaatctgcagatgatgcaggctgccaattacaagaactgagaaaccagctactccttgtcactgaggaaaaagagaattataaaagacagtgtcatatgtttactgatcaaatcaaagtgttacaacagaggatactagaaatgaatgacaagtatgttaagaaagaaacttgccatcagtccactgaaaccgatgctgtatttttacttgaaagtattaatggcaaatctgaaagtccagaccatatggtatctcagtatcagcaagctttggaagaaatagaaaggctgaaaaaacaatgtagtgctttgcaacatgtaaaggctgaatgcagccagtgttccaataatgagagtaaaagtgaaatggatgagatggctgtgcagcttgacgatgtgtttagacaactggacaaatgcagtattgagagggaccagtataaaagtgaggttgaattgctggaaatggaaaagtcacaaatccgttcacagtgtgaagaactcaaaactgaagtagaacagttaaaatctacaaatcaacagacggcaacagatgtttcaacatcaagtaacattgaggagtctgtaaatcatatggatggagaaagcctcaaactccgatctcttcgagttaacgtaggacaactgctggctatgattgtgcctgatcttgatcttcagcaagtgaattacgatgttgatgtagttgatgagattttaggacaagttgttgaacaaatgagtgaaatcagtagtacttaaagtatatgttatgtaagataaaatatttgctcaattcttttggttgtacagctttcaaaatataattaattttgttttatagatatgataggcaacagactgaaaaccataatctttactgtattctatgcattcaaatgtggtcacaaatattgtggacacattatcttatgttttgaaatacctgtgaattgttggcattgagcagctgaagctaactcatgactctgttttgaatgtaaatatttgtaattaagcctgcacatatttttttattgccctagagtactcaagtgtttttcaccaagagcttttcaggttgcccctaagctttgtgcaattttttctggttccccaaagtgtatttttctctaagtcgagggctatgccataatacaaatggaaatgttacctttgattttcttataaaggagtttaaataggatttttaaataatgtagtaacactcctgatacaactctggttataagtgaattgagcattaatgtttcttttgtataaattcctgtcctgaaatattttattcatgaaaataaggtaagcaaaaaccaactccattttgccaggattttgttgtgctgagattgccaatcacggttaaacacaaagtgtttttatagaatgaagaaacagtctttaacagaaaaaaggtattgaaatattaaatggccaccaagtttactttgaagcccatttttggctgtttagtcagcatgaagtgggcatgataattttttaatatttctttttgtgaaatttcctgtacagccttttgtaggattactacaggttaatgtgagttgaggaagacagtctttctcaaacaatactacatacctttaattatattacaaacctaagtgttttatatcctagagtcaaggaacaaatttccttaggattatagtattacatgccataaaatactatgctttattggtcccatgttttgtgcaattttaaagagatggctttctattaagtataaactatgtatatataagaaccatattttccacaactaaaatgtgcattattttttccaaagttttatcattgctatttatttttacctttgtttttgaacattcaatccgttcattttgtatgtatgcttaatacgtgtcggtcatatacagtattgaatttttactgtatagtaattctggaaagagcaaataaatgaagattgtttttatttgcctgataaagtaattgaaagtgtatttttggtatgaagctggttttctgtcacaattgtaatttcccaaattttaaaatatcttataataaaataaaaatatatgatggctaactgttc

SEQ ID NO: 1351 - protein, 950 aa, Homo sapiens
GGRSWLCSSLKMAAQPPRGIRLSALCPKFLHTNSTSHTWPFSAVAELIDNAYDPDVNAKQIWIDKTVINDHICLTFTDNGNGMTSDKLHKMLSFGFSDKLTMNGHVPVGLYGNGFKSGSMRLGKDAIVFTKNGESMSVGLLSQTYLEVIKAEHVVVPIVAFNKHRQMINLAESKASLAAILEHSLFSTEQKLLAELDAIIGKKGTRIIIWNLRSYKNATEFDFEKDKYDIRIPEDLDEITGKKGYKKQERMDQIAPESDYSLRAYCSILYLKPRMQIILRGQKVKTQLVSKSLAYIERDVYRPKFLSKTVRITFGFNCRNKDHYGIMMYHRNRLIKAYEKVGCQLRANNMGVGVVGIIECNFLKPTHNKQDFDYTNEYRLTITALGEKLNDYWNEMKVKKNTEYPLNLPVEDIQKRPDQTWVQCDACLKWRKLPDGMDQLPEKWYCSNNPDPQFRNCEVPEEPEDEDLVHPTYEKTYKKTNKEKFRIRQPEMIPRINAELLFRPTALSTPSFSSPKESVPRRHLSEGTNSYATRLLNNHQVPPQSEPESNSLKRRLSTRSSILNAKNRRLSSQFENSVYKGDDDDEDVIILEENSTPKPAVDHDIDMKSEQSHVEQGGVQVEFVGDSEPCGQTGSTSTSSSRCDQGNTAATQTEVPSLVVKKEETVEDEIDVRNDAVILPSCVEAEAKIHETQETTDKSADDAGCQLQELRNQLLLVTEEKENYKRQCHMFTDQIKVLQQRILEMNDKYVKKETCHQSTETDAVFLLESINGKSESPDHMVSQYQQALEEIERLKKQCSALQHVKAECSQCSNNESKSEMDEMAVQLDDVFRQLDKCSIERDQYKSEVELLEMEKSQIRSQCEELKTEVEQLKSTNQQTATDVSTSSNIEESVNHMDGESLKLRSLRVNVGQLLAMIVPDLDLQQVNYDVDVVDEILGQVVEQMSEISST

SEQ ID NO: 1352 - DNA, 489 bp, Homo sapiens
cgcgacaagatggcggataaggagaagaagaaaaaggagagcatcttggacttgtccaagtacatcgacaagacgatccgggtaaagttccagggaggccgcgaagccagtggaatcctgaagggcttcgacccactcctcaaccttgtgctggacggcaccattgagtacatgcgagaccctgacgaccagtacaagctcacggaggacacccggcagctgggcctcgtggtgtgccggggcacgtccgtggtgctaatctgcccgcaggacggcatggaggccatccccaaccccttcatccagcagcaggacgcctagcctggccgggggcgcggggggtgcagggcaggcccgagcagctcggtttcccgcggacttggctgctgctcccaccgcagtaccgcctcctggaacggaagcatttctcctttttgtataggttgaatttttgttttcttaataaaattgcaaacctcaaaaaaaaaa

SEQ ID NO: 1353 - protein, 103 aa, Homo sapiens
MADKEKKKKESILDLSKYIDKTIRVKFQGGREASGILKGFDPLLNLVLDGTIEYMRDPDDQYKLTEDTRQLGLVVCRGTSVVLICPQDGMEAIPNPFIQQQDA

SEQ ID NO: 1354 - DNA, 1776 bp, Homo sapiens
ctctatggttcggcggctctaagcgctcagctccgcggtcgtcctccaggtctgtgccgcctccctccggtctcggtggcgcggcacgcgcggctctctaggcctccttcagctctgtggtgacggtggccgaggtggagggccggtctgaagagtggcgggactggcttcacttcctccgcggttcctcggagccgcctcgctcctcttcagggactttgctgagaagggctctcgggcgtccagaccccaccgcaaaggtgtttggcgatccgccgagaagttgttggccccaggagcatccctcggggccgaatgcgcagtggacgatgccccttctgacccaacagatccaagacgaggatgatcagtacagccttgtggccagccttgacaacgttaggaatctctccactatcttgaaagctattcatttccgagaacatgccacgtgtttcgcaactaaaaatggtatcaaagtaacagtggaaaatgcaaagtgtgtgcaagcaaatgcttttattcaggctggaatatttcaggagtttaaagttcaggaagagtctgttacttttcgaattaatttaactgtccttttagactgtttatctatttttggatcaagtcctatgccagggactttaactgcacttcgaatgtgttaccaaggttatggttaccctttgatgctgttcctggaagaaggaggagtggtgacagtctgcaaaatcaatacacaggaacctgaggagaccctggactttgatttctgcagcaccaatgttattaataaaattattctgcagtcagaggggctccgtgaagcattttctgaattggatatgacgagtgaagtcctacaaattaccatgtctcctgacaagccttatttcaggttatctacttttggaaatgcaggaagttcccaccttgactatcccaaagattctgatttgatggaagcatttcattgtaatcagacccaagtcaacagatacaagatttccttactgaaaccctctacaaaggcattagtcctatcttgtaaggtatctattcggacagataacagaggcttcctttcattacagtatatgattagaaatgaagatggacaaatatgttttgtggaatattactgctgccctgatgaagaagttcctgaatctgagtcttgagtatgacaattcactgatatttatgtgtacatttatgatagatgaagttcttattctgagtacagtactctttgtcatttcatattggattttctatagagaagaagcacaatggggaagataggagcaaggtcatgtaccctaatagttactatgttttgtaaatccattttgtagagggcatgtaaataaatgttttcctgtagtcatagattattcaggactgtcctttagttctgtcttttgaactcatgggaataattgtgagtcagcgtaacatttcaagagtctaaaggtggccgggtgtggtggctttaatcccagcactttgggaacccgaggtgggcggatcacctgaggtcaggagttcgaaaccagcctgaccaacgtggagaaaccccatctctactaaaaatacaaaaaattagccggacgtggtggcacatgcctgtaatgccagctactcgggaggctgaggcaggaaaattgcttgaacccgggaggcggaggttgtggtgagctgaaatgacgccattgcactccagcctaggcaataagagcaaaactctgcctcaaaaaaaaaaaaaaaaaaaaaaaa

SEQ ID NO: 1355 - protein, 282 aa, Homo sapiens
MPLLTQQIQDEDDQYSLVASLDNVRNLSTILKAIHFREHATCFATKNGIKVTVENAKCVQANAFIQAGIFQEFKVQEESVTFRINLTVLLDCLSIFGSSPMPGTLTALRMCYQGYGYPLMLFLEEGGVVTVCKINTQEPEETLDFDFCSTNVINKIILQSEGLREAFSELDMTSEVLQITMSPDKPYFRLSTFGNAGSSHLDYPKDSDLMEAFHCNQTQVNRYKISLLKPSTKALVLSCKVSIRTDNRGFLSLQYMIRNEDGQICFVEYYCCPDEEVPESES

SEQ ID NO: 1356 - DNA, 1620 bp, Homo sapiens
aggtctgtgccgcctccctccggtctcggtggcgcggcacgcgcggctctctaggcctccttcagctctgtggtgacggtggccgaggtggagggccggtctgaagagtggcgggactggcttcacttcctccgcggttcctcggagccgcctcgctcctcttcagggactttgctgagaagggctctcgggcgtccagaccccaccgcaaaggtgtttggcgatccgccgagaagttgttggccccaggagcatccctcggggccgaatgcgcagtggacgatgccccttctgacccaacagatccaagacgaggatgatcagtacagccttgtggccagccttgacaacgttaggaatctctccactatcttgaaagctattcatttccgagaacatgccacgtgtttcgcaactaaaaatggtatcaaagtaacagtggaaaatgcaaagtgtgtgcaagcaaatgcttttattcagggactttaactgcacttcgaatgtgttaccaaggttatggttaccctttgatgctgttcctggaagaaggaggagtggtgacagtctgcaaaatcaatacacaggaacctgaggagaccctggactttgatttctgcagcaccaatgttattaataaaattattctgcagtcagaggggctccgtgaagcattttctgaattggatatgacgagtgaagtcctacaaattaccatgtctcctgacaagccttatttcaggttatctacttttggaaatgcaggaagttcccaccttgactatcccaaagattctgatttgatggaagcatttcattgtaatcagacccaagtcaacagatacaagatttccttactgaaaccctctacaaaggcattagtcctatcttgtaaggtatctattcggacagataacagaggcttcctttcattacagtatatgattagaaatgaagatggacaaatatgttttgtggaatattactgctgccctgatgaagaagttcctgaatctgagtcttgagtatgacaattcactgatatttatgtgtacatttatgatagatgaagttcttattctgagtacagtactctttgtcatttcatattggattttctatagagaagaagcacaatggggaagataggagcaaggtcatgtaccctaatagttactatgttttgtaaatccattttgtagagggcatgtaaataaatgttttcctgtagtcatagattattcaggactgtcctttagttctgtcttttgaactcatgggaataattgtgagtcagcgtaacatttcaagagtctaaaggtggccgggtgtggtggctttaatcccagcactttgggaacccgaggtgggcggatcacctgaggtcaggagttcgaaaccagcctgaccaacgtggagaaaccccatctctactaaaaatacaaaaaattagccggacgtggtggcacatgcctgtaatgccagctactcgggaggctgaggcaggaaaattgcttgaacccgggaggcggaggttgtggtgagctgaaatgacgccattgcactccagcctaggcaataagagcaaaactctgcctcaaaaaaaaaaaaaaaaaaaaaaaa

SEQ ID NO: 1357 - protein, 173 aa, Homo sapiens
MCYQGYGYPLMLFLEEGGVVTVCKINTQEPEETLDFDFCSTNVINKIILQSEGLREAFSELDMTSEVLQITMSPDKPYFRLSTFGNAGSSHLDYPKDSDLMEAFHCNQTQVNRYKISLLKPSTKALVLSCKVSIRTDNRGFLSLQYMIRNEDGQICFVEYYCCPDEEVPESES

SEQ ID NO: 1358 - DNA, 1862 bp, Homo sapiens
gccggctgaagtgctcacggctcactgcagtttcaagttcctgggctcaaagatgggagtctccctatgttgcccaggctggtctccaacacctgggctcaagtggcttggcctcccaaagcgctgggattataggtctgtgccgcctccctccggtctcggtggcgcggcacgcgcggctctctaggcctccttcagctctgtggtgacggtggccgaggtggagggccggtctgaagagtggcgggactggcttcacttcctccgcggttcctcggagccgcctcgctcctcttcagggactttgctgagaagggctctcgggcgtccagaccccaccgcaaaggtgtttggcgatccgccgagaagttgttggccccaggagcatccctcggggccgaatgcgcagtggacgatgccccttctgacccaacagatccaagacgaggatgatcagtacagccttgtggccagccttgacaacgttaggaatctctccactatcttgaaagctattcatttccgagaacatgccacgtgtttcgcaactaaaaatggtatcaaagtaacagtggaaaatgcaaagtgtgtgcaagcaaatgcttttattcaggctggaatatttcaggagtttaaagttcaggaagagtctgttacttttcgaattaatttaactgtccttttagactgtttatctatttttggatcaagtcctatgccagggactttaactgcacttcgaatgtgttaccaaggttatggttaccctttgatgctgttcctggaagaaggaggagtggtgacagtctgcaaaatcaatacacaggaacctgaggagaccctggactttgatttctgcagcaccaatgttattaataaaattattctgcagtcagaggggctccgtgaagcattttctgaattggatatgacgagtgaagtcctacaaattaccatgtctcctgacaagccttatttcaggttatctacttttggaaatgcaggaagttcccaccttgactatcccaaagattctgatttgatggaagcatttcattgtaatcagacccaagtcaacagatacaagatttccttactgaaaccctctacaaaggcattagtcctatcttgtaaggtatctattcggacagataacagaggcttcctttcattacagtatatgattagaaatgaagatggacaaatatgttttgtggaatattactgctgccctgatgaagaagttcctgaatctgagtcttgagtatgacaattcactgatatttatgtgtacatttatgatagatgaagttcttattctgagtacagtactctttgtcatttcatattggattttctatagagaagaagcacaatggggaagataggagcaaggtcatgtaccctaatagttactatgttttgtaaatccattttgtagagggcatgtaaataaatgttttcctgtagtcatagattattcaggactgtcctttagttctgtcttttgaactcatgggaataattgtgagtcagcgtaacatttcaagagtctaaaggtggccgggtgtggtggctttaatcccagcactttgggaacccgaggtgggcggatcacctgaggtcaggagttcgaaaccagcctgaccaacgtggagaaaccccatctctactaaaaatacaaaaaattagccggacgtggtggcacatgcctgtaatgccagctactcgggaggctgaggcaggaaaattgcttgaacccgggaggcggaggttgtggtgagctgaaatgacgccattgcactccagcctaggcaataagagcaaaactctgcctcaaaaaaaaaaaaaaaaaaaaaaaa

SEQ ID NO: 1359 - DNA, 1718 bp, Homo sapiens
ggcacgaggcacgtggttatgctgccggagtttgggccgccactgtaggaaaagtaacttcagctgcagccccaaagcgagtgagccgagccggagccatggagggccagagcgtggaggagctgctcgcaaaggcagagcaggacgaggcagagaagttgcaacgcatcacggtgcacaaggagctggagctgcagtttgacctgggcaacctgctggcgtcggaccggaaccccccgaccgggctgcggtgcgccggacccacgccggaggccgagctacaggccctggcgcgggacaacacgcaactgctcatcaaccagctgtggcagctgcccacggagcgcgtggaagaggcgatagtggcgcggctgccggagcccaccacacgcctgccgcgagagaagcctctgccccgaccgcggccacttacacgctggcagcagttcgcgcgcctcaagggcatccgtcccaagaagaagaccaacctggtgtgggacgaggtgagtggccagtggcggcggcgctggggctaccagcgcgcccgggacgacaccaaagaatggctgattgaggtgcccggcaatgccgaccccttggaggaccagttcgccaagcggattcaggccaagaaggaaagggtggccaagaacgagctgaaccggctgcgtaacctggcccgcgcgcacaagatgcagctgcccagcgcggccggcttgcaccctaccggacaccagagtaaggaggagctgggccgcgccatgcaagtggccaaggtctccaccgcctctgtggggcgctttcaggagcgcctccccaaggagaaggtgccccggggctccggcaagaaaaggaagtttcaaccccttttcggggactttgcagccgagaaaaagaaccagttggagctgcttcgtgtcatgaacagcaagaagcctcagctggatgtgactagggccaccaataagcagatgagggaggaggaccaggaggaggccgccaagaggaggaaaatgagccagaagggcaagagaaagggaggccggcaggggcctgggggcaagaggaaagggggcccgcccagccagggagggaagaggaaagggggcttgggaggcaagatgaattctgggccgcctggcttgggtggcaagagaaaaggaggacagcgcccaggaggaaagaggaggaagtaatagtttctaactgtcggacccgtctgtaaaccaaggactatgaatactaaatgttaagttctaggcaattatacggggactcagaaggacctggccgctgccttcattgagtttaaagggacaggattgcccttccgtcaagaaagtatgtaagtgttggactgcacaaattaatgtttttcccacaaccgagactttggagattaagaacttatttgaggatttaagaattagggaaataatttggtggaaaccgggaatgagttctattcttaaacagcctttttttttctttttaatgttggatatacggcgaggtagagttggccatatttcagagacttagattgacgtatatgtttctgcattatttttacaacaagtttgtgtatcagagcgggagtgcgggggagggaaagaaaacaaacagtttcagaattgaataggcaagtgactgttttaaagattaagtaataaagatgtcttatctagtgtgacttttaaaaaaaaaaaaaaaaaaaa

SEQ ID NO: 1360 - protein, 365 aa, Homo sapiens
MEGQSVEELLAKAEQDEAEKLQRITVHKELELQFDLGNLLASDRNPPTGLRCAGPTPEAELQALARDNTQLLINQLWQLPTERVEEAIVARLPEPTTRLPREKPLPRPRPLTRWQQFARLKGIRPKKKTNLVWDEVSGQWRRRWGYQRARDDTKEWLIEVPGNADPLEDQFAKRIQAKKERVAKNELNRLRNLARAHKMQLPSAAGLHPTGHQSKEELGRAMQVAKVSTASVGRFQERLPKEKVPRGSGKKRKFQPLFGDFAAEKKNQLELLRVMNSKKPQLDVTRATNKQMREEDQEEAAKRRKMSQKGKRKGGRQGPGGKRKGGPPSQGGKRKGGLGGKMNSGPPGLGGKRKGGQRPGGKRRK

SEQ ID NO: 1361 - DNA, 6115 bp, Homo sapiens
ctccgactctcggcacctggcctccagctttcggaactatggaggccgcgcccgggacccccccgccgccgccatcagagtcgccgccgccgccatcgccgccgccgccatcaacgccttcgcctcctccgtgttcccccgacgcccgcccggccaccccgcacctcctccaccaccgcctcccgctccctgacgacagggaagatggagagttggaagaaggtgaattggaagatgatggggcagaggagacccaggatacctccggagggcctgagagaagccggaaagaaaagggggagaagcatcacagtgattcggatgaggagaagtcccacaggagactgaagcggaaacggaagaaagagcgggagaaagagaaaaggaggtcgaagaagaggaggaaatccaagcacaaacgccatgcttcttctagcgatgacttctctgacttctcagatgactcggatttcagccccagtgagaaaggtcaccgcaagtacagagagtacagccccccatatgcgccgtcccaccagcagtaccccccatcgcatgccacgcccctgcccaagaaggcatactccaagatggacagcaagagttatggcatgtacgaggactacgagaatgagcagtatggggaatatgagggcgacgaggaggaggacatgggcaaggaggactatgacgacttcaccaaagagctgaaccagtaccggcgtgccaaggagggcagcagccgcggccgaggcagccgaggccggggccggggctacaggggccgaggaagccgtggaggatcgcgaggccgcggcatgggcaggggcagccgaggcaggggcagaggctctatgggaggagaccacccggaggatgaagaggatttctacgaggaagagatggactatggagagagtgaggagccaatgggagacgacgactatgacgagtactccaaggagctgaaccagtaccgccgctccaaggacagccgaggccgagggctaagtcgaggccgtggcaggggctcccgaggtcgagggaaaggaatgggtcggggccgaggccgaggtggcagccgaggagggatgaacaagggcggaatgaacgatgacgaagacttctatgatgaggacatgggcgacggtggtggtggaagctaccggagtcgtgaccatgacaagccccaccagcagtcggacaagaaaggcaaagtcatttgcaagtacttcgtggaagggcgctgcacctggggagaccactgtaattttagccatgacatcgaactgccaaagaagcgagaactgtgcaagttttacatcactggattttgcgccagagctgagaactgcccttatatgcacggtgatttcccgtgtaagctgtaccacaccactgggaactgcatcaatggtgacgactgcatgttttcccacgaccctctgaccgaagagacgagggagctcttggataagatgttggccgatgatgcagaagcaggtgccgaggatgagaaggaggtggaggaactgaagaagcagggcatcaaccccctgcccaaaccgccccctggtgtgggcctcctgcccacccctcctcggccccctggcccgcaggctccaacctctcccaacggcaggcccatgcagggtggccccccgcccccgccccctccccctcccccaccgcccgggccccctcagatgcccatgccggtgcatgagccactgtccccgcagcagctgcagcagcaggacatgtacaacaagaagatcccctccttgtttgagatcgtggtgcggcccacgggacagctggctgagaagctgggtgtgaggttccctggacccggtggacccccagggccaatgggccctgggcccaacatgggacccccagggccaatgggcggtccaatgcatcctgacatgcaccccgacatgcacccggacatgcaccctgacatgcacgcagacatgcacgcagacatgccgatgggccctggcatgaatcctggcccacccatgggccctggcggccctccaatgatgccctacggccctggagactccccacattctggaatgatgccccctatcccgccagcccagaacttctatgaaaacttctaccagcagcaggagggcatggagatggagcccggactcctgggggatgcagaggactacgggcactacgaagagctgccaggggagcctggggagcacctcttccctgagcaccctctggagcccgacagcttctctgagggagggcccccaggccggccgaagccaggcgccggtgtccctgacttcctgccctcagcccagagggccctgtacctgaggatccagcagaagcagcaggaggaggaggagagagcgaggaggctggctgagagcagcaagcaggaccgggagaatgaggaaggtgacaccggaaactggtactcaagtgatgaggatgagggtggaagcagtgtcacctccatcctgaagaccttgaggcagcagacgtccagccgacccccggcttcagttggggagctgagcagcagtgggctgggggacccccgcctccagaagggacaccccacaggaagccggctggctgaccctcgcctcagccgggaccccagactcacccgccatgtggaggcttctggcgggtctggcccaggtgattcgggaccctccgatcctcggctggctcgcgccctgcccacctccaagcccgaaggcagccttcattccagccctgtgggccccagcagttccaaggggtctgggccgcccccaacggaggaggaggaaggggagcgggccctgcgggagaaggccgtgaacattcccctggacccactccccgggcaccctctgcgggacccacggtcacagctgcagcagttcagccacatcaagaaggacgtgaccctgagcaagcccagcttcgcccgcaccgtgctctggaatcccgaggacctgatccccctacccatccccaagcaggacgcagtgccccccgtgcccgcggccctgcaatccatgcccaccctggacccccggctgcaccgcgctgccacggcagggccccccaacgcccggcagcgcccgggcgcctccacggattccagcacacagggcgccaacctccccgactttgaacttctgtctcgcatcctcaagacagtcaatgccaccggctcctcggccgcccccggttccagcgacaaacccagtgacccccgggtgcggaaggcccccaccgaccctcggctgcagaaacccacagactctacggcctcctcccgggctgccaagcccggccctgctgaggcgccctctcccaccgccagcccgagtggggatgcctccccaccagccaccgctccctacgacccccgcgtgctggcggccggtggactgggccagggcggagggggcgggcagagcagtgtgctgagcggtatcagcctctacgacccgaggactcccaacgcggggggcaaagccacagagccggctgctgacacgggtgcccagcccaagggtgctgagggcaatggcaagagctcggcctccaaggctaaggagcccccgttcgtccgcaagtctgccctggaacagccagagacagggaaggccggtgctgatgggggcacccccacggacagatacaacagctacaaccggccccggcccaaggctgctgcagcccccgctgccaccaccgccaccccaccccccgagggtgccccaccccagcccggggtgcacaacctgcccgtgcccaccctcttcgggacggtgaagcagacacccaagacgggctcaggaagcccatttgctgggaacagtccggcccgcgagggtgagcaggatgcggcatccctgaaggatgtttttaaaggcttcgaccccacggcctcccccttttgccagtagtgtccagccagagctgcggctccagccacccttcctagggtggcattcagggcagcacccagggtagggaacttgggggcaaggggaggcaggctgggtgttccttttttcttttctttttcttttgctttccgtctcttttatttttttttaaagtagtactttctttgagatttgtaaattgtatataaccatcttaagttctggtcagtgtggcgggctcaggggctcctgctgagcaaaccgactcatgcccgcaaacctgtgaactttcgccagtgcctggcctcagactctgtgggctctgcgtggccgggccttgctggaggcccagtgggttttctgggcaaagcatggccccttttccccaggacaaagggaacagttggtgtctgggaaggtattgaacgctcctcaccctgtgcccgaagagacccggaaccaagaccatggcagggcctgcgtggaagcaggtccaggcgtttctagaaccctagggtgcaccatcactgtcttttcagtgcaggctgtaacaacccactcaggagacagtgagagtgaaaaggtattaaggaaaaagcccccagcggcactatgggggctccctggtgcatgcctgctcctgtccctggattaccacacgtgccctccctgccaccctccgtctagagcaagcggatgccccccagcctgcagcagaagcctccacagtgagaactggacccaaaggtagtgggggccggtgtggggcagagtcctgaagagccacctctaggaggcagcccctaggagcacgcacgttctgtcagtattaccccacctgtcctatcaggtgggccacaccctgcttgcccacaccagggtctgtcctggtcctcaagccacgcacccgctatgcctgcactgcagcccagccccggacagctccaggatccgtgcagtggctgcgccgccaggccccaacaatggggaccctggggtggctcctggccaagtgttctctgttttcctcgcacctccttacactgtgtgacctgcagggcatgaggtattgatgtgttcgggtttcctttcccaagccagcagatgcaggtgttccaaggtgtgttgctctgtgggatttgtggacacttaagaaacggactgagtgggaaccctgcagccaggggatggggagcctctgctccccccatgctcccaccctggctgagggccagcctcatctgcagagccctggaggaggcccacctatggacacagcccgagagatgggcgcaaggggtgctgggggaggcctgctatcctgcctctgggccacttgaggggcctcaggaagtgtgtgcttgtggctgcatctgcccgtctccctggcccaccatgtggctgcaggccaagctcttcattgctgaccatgaagagacctagttacctgccaagggattccccttccctcctcctcagggtggggtgaacaaggctcctatcccaccccaccccaaaaagagaaaaatgaaaaactcatagtttggagccaggaggcagggtgtcctacagggctgcacagccctgaggggtcagtgctgggatctggttggttggtttgtctttttgtcttttttttttttttttttttttacacaatcattaatgagatttgtcttcagccaccagtgttggccttgaagcagagggcacagcccttggtgtttgtaaaataagtatgaatacacagtgtggcagtgttgtggtttttgttgttgtttttcctctccttttgagaattttcttttgtaaaagaaaaatattttttaaaccgaaatccgtggatgaaatagaagctggagccctcctcttggaatattcagcctaagaacctcataggactatgaattcacccgaaattctcatttgccatcaggccgagcttttaaagaaaaattgttctctaaccaggattgtaacaaaagtgtaaatactgtttcagagttgagagttggtggtgcaaatatgtatataatgaactgtatttttacaatgatcgccgcatgactatttcacaccctttttatactccatatctgtcttccagaaacgtcacctgcctttctcctgtggtctcttaatccagtaattgtattactgccattaaaggatgcagttatttt

SEQ ID NO: 1362 - protein, 1315 aa, Homo sapiens
PTLGTWPPAFGTMEAAPGTPPPPPSESPPPPSPPPPSTPSPPPCSPDARPATPHLLHHRLPLPDDREDGELEEGELEDDGAEETQDTSGGPERSRKEKGEKHHSDSDEEKSHRRLKRKRKKEREKEKRRSKKRRKSKHKRHASSSDDFSDFSDDSDFSPSEKGHRKYREYSPPYAPSHQQYPPSHATPLPKKAYSKMDSKSYGMYEDYENEQYGEYEGDEEEDMGKEDYDDFTKELNQYRRAKEGSSRGRGSRGRGRGYRGRGSRGGSRGRGMGRGSRGRGRGSMGGDHPEDEEDFYEEEMDYGESEEPMGDDDYDEYSKELNQYRRSKDSRGRGLSRGRGRGSRGRGKGMGRGRGRGGSRGGMNKGGMNDDEDFYDEDMGDGGGGSYRSRDHDKPHQQSDKKGKVICKYFVEGRCTWGDHCNFSHDIELPKKRELCKFYITGFCARAENCPYMHGDFPCKLYHTTGNCINGDDCMFSHDPLTEETRELLDKMLADDAEAGAEDEKEVEELKKQGINPLPKPPPGVGLLPTPPRPPGPQAPTSPNGRPMQGGPPPPPPPPPPPPGPPQMPMPVHEPLSPQQLQQQDMYNKKIPSLFEIVVRPTGQLAEKLGVRFPGPGGPPGPMGPGPNMGPPGPMGGPMHPDMHPDMHPDMHPDMHADMHADMPMGPGMNPGPPMGPGGPPMMPYGPGDSPHSGMMPPIPPAQNFYENFYQQQEGMEMEPGLLGDAEDYGHYEELPGEPGEHLFPEHPLEPDSFSEGGPPGRPKPGAGVPDFLPSAQRALYLRIQQKQQEEEERARRLAESSKQDRENEEGDTGNWYSSDEDEGGSSVTSILKTLRQQTSSRPPASVGELSSSGLGDPRLQKGHPTGSRLADPRLSRDPRLTRHVEASGGSGPGDSGPSDPRLARALPTSKPEGSLHSSPVGPSSSKGSGPPPTEEEEGERALREKAVNIPLDPLPGHPLRDPRSQLQQFSHIKKDVTLSKPSFARTVLWNPEDLIPLPIPKQDAVPPVPAALQSMPTLDPRLHRAATAGPPNARQRPGASTDSSTQGANLPDFELLSRILKTVNATGSSAAPGSSDKPSDPRVRKAPTDPRLQKPTDSTASSRAAKPGPAEAPSPTASPSGDASPPATAPYDPRVLAAGGLGQGGGGGQSSVLSGISLYDPRTPNAGGKATEPAADTGAQPKGAEGNGKSSASKAKEPPFVRKSALEQPETGKAGADGGTPTDRYNSYNRPRPKAAAAPAATTATPPPEGAPPQPGVHNLPVPTLFGTVKQTPKTGSGSPFAGNSPAREGEQDAASLKDVFKGFDPTASPFCQ

SEQ ID NO: 1363 - DNA, 2089 bp, Homo sapiens
gcggccgctccgtgtgccctggactcgccgcccgcggctcggaagctggagagtcagcgacggggcccgactgcgggaccgagggctgcaagaagaagcgaacaaatagtccccagcgcctcctctggatgcggtcgcgtctgtggtcctggcagccgctgggcgggccaggccaggtcgggccgggccgagccgggcacatggacctgggcctgcgggctctaattgcggcgcttatgttgatgattttttttttaatcacagcagcccccagtttagcggactgatttactcccggtattggtaaatatgatcacgtgggccgcgcgaccaatggtggaggctgcagcctgcgaactagtcggtggctcgggcgccggcggggagctgctcggcggcggacagtgtaatgttgggtgggagtgcgggacgcctcaaaatgtcttccagtggcaccctcagcaactactacgtggactcgcttataggccatgagggcgacgaggtgttcgcggcgcgcttcgggccgccggggccaggcgcgcagggccggcctgcaggtgtggctgatggcccggccgccaccgccgccgagttcgcctcgtgtagttttgcccccagatcggccgtgttctctgcctcgtggtccgcggtgccctcccagcccccggcagcggcggcgatgagcggcctctaccacccgtacgttcccccgccgcccctggccgcctctgcctccgagcccggccgctacgtgcgctcctggatggagccgctgcccggcttcccgggcggtgcgggcggtggcggtggtggtggaggcggcggtccgggccgcggtcccagccctggccccagcggcccagccaacgggcgccactacgggattaagcctgaaacccgagcggccccggcccccgccacggccgcctccaccacctcctcctcctccacttccttatcctcctcctccaaacggactgagtgctccgtggcccgggagtcccaggggagcagcggccccgagttctcgtgcaactcgttcctgcaggagaaggcggcagcggcgacggggggaaccgggcctggggcagggatcggggccgcgactgggacgggcggctcgtcggagccctcagcttgcagcgaccacccgatcccaggctgttcgctgaaggaggaggagaagcagcattcgcagccgcagcagcagcaacttgacccaaacaaccccgccgcgaactggatccacgctcgctccacccggaaaaagcgctgtccctacaccaaataccagacgcttgagctggagaaagaattcctcttcaacatgtacctcacccgggaccggcgctacgaggtggccaggattctcaacctaacagagagacaggtcaaaatctggtttcagaaccgtaggatgaaaatgaaaaagatgagcaaggagaaatgccccaaaggagactgacccggcgcggtgctggcgggagcgctcaagggcagcggatttgttgttgttgctgttttcctttgtgggtgtttggtgcttgatttccagaaactctccagcgacttggacttcttcttctttttttttttctttttagatagaagtgactgtgtggttggtctctgaggtatttgggggactctgtatttgctcgtttacgtgttggaaaaaccaagtggctttggggtttcgccctatcccactccctctctttcctgctccattggttccttaagaaatgctatattttgtgagtgcaagctggcttggggagccctctcttgtgtaaatgtcccccatgtttctgaaaagtgctgtagtttagtcccctcacccccagcactgcccaaacaggggccaagtgcgccccaattccaagaatgaaggcagagcgacaacagtgcggacaccccggctgctagcccacggtgaagcccggcggggttgcccaccagttgcgaaagccccctttcctcagggagcacgcgggacctcggtggagatctccagtgaggcttagaggagcccagggcctcgggcgggttggggtttgtcctcagtgcattggacgcgctgctc

SEQ ID NO: 1364 - protein, 342 aa, Homo sapiens
MSSSGTLSNYYVDSLIGHEGDEVFAARFGPPGPGAQGRPAGVADGPAATAAEFASCSFAPRSAVFSASWSAVPSQPPAAAAMSGLYHPYVPPPPLAASASEPGRYVRSWMEPLPGFPGGAGGGGGGGGGGPGRGPSPGPSGPANGRHYGIKPETRAAPAPATAASTTSSSSTSLSSSSKRTECSVARESQGSSGPEFSCNSFLQEKAAAATGGTGPGAGIGAATGTGGSSEPSACSDHPIPGCSLKEEEKQHSQPQQQQLDPNNPAANWIHARSTRKKRCPYTKYQTLELEKEFLFNMYLTRDRRYEVARILNLTERQVKIWFQNRRMKMKKMSKEKCPKGD

SEQ ID NO: 1365 - DNA, 1579 bp, Homo sapiens
ccgggccgtgacagacggccggcagaggaagggagagaggcggcggcgacaccatgtcatctcccagtccgggcaagaggcggatggacacggacgtggtcaagctcatcgagagtaaacatgaggttacgatcctgggaggacttaatgaatttgtagtgaagttttatggaccacaaggaacaccatatgaaggcggagtatggaaagttagagtggacctacctgataaataccctttcaaatctccatctataggattcatgaataaaattttccatcccaacattgatgaagcgtcaggaactgtgtgtctagatgtaattaatcaaacttggacagctctctatgatcttaccaatatatttgagtccttcctgcctcagttattggcctatcctaaccccatagatcctctcaatggtgacgctgcagccatgtacctccaccgaccagaagaatacaagcagaaaattaaagagtacatccagaaatacgccacggaggaggcgctgaaagaacaggaagagggtaccggggacagctcatcggagagctctatgtctgacttttccgaagatgaggcccaggatatggagttgtagtagaaaaagcacctgcttttcagaaagactattatttcctaaccatgagaagcagactataatattcatatttaaacaaagcaattttttttattactaaacaaggtttttatgaataatagcattgatatatatatattatatatcaccctttagatcttgatttcttggtcatttctcaacctgaggtgcatagcatattcccacattccatttggtagcaatatgcggtctgaatgcatgcattcatgagtccatgtggccaagtcagcctgtgtgctactgaactgtcgaaggaaatagccgctctgataggtagatgtgagtaaaaagaacaggaaaaaattgcttcttttattggtttccaaagaaacaaaccaaaccaaccagctcttggatgtgaagataaaatagtgcttttttgaaatggagaggaaaaacttggggaggaagaggcctgctgtgggggcatcggagccagccatgtaagaatcagagctgctccttcctgtgaatcctaggtggccctatgtcttctgtggagttacagtataaagcagggagctaattaagagtattaaaacttaaaaccattttttgactctgattttaagtacatttttatatgtcagttgctgcccttcacactaccaggccctgcagccacagtgttctgttggagaaacttggggaagtgttttctgaaccagttctttttcttggggtagagcgtgaaatccagacctgtttttgaaaggacagcacaggaggagaaaagtgactgggacgatgcttcctctcatccaaaacacatgcagagtcacatcctcatcctagtgtttggcagtttgagaccgctaccctgaacttaagagctttaaatatgagggttgtgtttctgggggggttatttttttggtgtgtgtgtgtgtgtattgtgcttagaaaggttgcagatttcatcttcacctacc

SEQ ID NO: 1366 - protein, 183 aa, Homo sapiens
MSSPSPGKRRMDTDVVKLIESKHEVTILGGLNEFVVKFYGPQGTPYEGGVWKVRVDLPDKYPFKSPSIGFMNKIFHPNIDEASGTVCLDVINQTWTALYDLTNIFESFLPQLLAYPNPIDPLNGDAAAMYLHRPEEYKQKIKEYIQKYATEEALKEQEEGTGDSSSESSMSDFSEDEAQDMEL

SEQ ID NO: 1367 - DNA, 1284 bp, Homo sapiens
gcttctcgagcccggagccgctgccgccgcccccagctcccccgcctcgggaggggcaccaggtcactgcagccagaggggtccagaagagagaggaggcactgcctcactacagcaactgcacccacgatgcagagcatcaagtgcgtggtggtgggtgatggggctgtgggcaagacgtgcctgctcatctgctacacaactaacgctttccccaaagagtacatccccaccgtgttcgacaattacagcgcgcagagcgcagttgacgggcgcacagtgaacctgaacctgtgggacactgcgggccaggaggagtatgaccgcctccgtacactctcctaccctcagaccaacgttttcgtcatctgtttctccattgccagtccgccgtcctatgagaacgtgcggcacaagtggcatccagaggtgtgccaccactgccctgatgtgcccatcctgctggtgggcaccaagaaggacctgagagcccagcctgacaccctacggcgcctcaaggagcagagccaggcgcccatcacaccgcagcagggccaggcactcgcgaaacagatccacgctgtgcgctacctcgaatgctcagccctgcaacaggatggtgtcaaggaagtgttcgccgaggctgtccgggctgtgctcaaccccacgccgatcaagcgtgggcggtcctgcatcctcttgtgaccctggcacttggcttggaggctgcccctgccctccccccaccagttgtgccttggtgccttgtccgcctcagctgtgccttaaggactaattctggcacccctttccaggggttccctgaatgcctttttctctgagtgcctttttctccttaaggaggcctgcagagaaaggggctttgggctctgcccctctggcttgggaacactgggtattctcatgagctcatccaagccaaggttggacccctccccaagaggccaacccagtgccccctcccattttccgctactgaccagttcatccagctttccacacagttgttgctgcctattgtggtgccgcctcaggttaggggctctcagccatctctaacctctgccctcgctgctcttggaattgcgcccccaagatgctctctcccttctccaatgagggagccacagaatcctgagaaggtgaatgtaccctaacctgctcctctgtgcctaggccttacgcatttgctgactgactcagcccccatgcttctggggacctttcctacccccatcagcatcaataaaacctcctgtctcc

SEQ ID NO: 1368 - protein, 191 aa, Homo sapiens
MQSIKCVVVGDGAVGKTCLLICYTTNAFPKEYIPTVFDNYSAQSAVDGRTVNLNLWDTAGQEEYDRLRTLSYPQTNVFVICFSIASPPSYENVRHKWHPEVCHHCPDVPILLVGTKKDLRAQPDTLRRLKEQSQAPITPQQGQALAKQIHAVRYLECSALQQDGVKEVFAEAVRAVLNPTPIKRGRSCILL

SEQ ID NO: 1369 - DNA, 2912 bp, Homo sapiens
tccctccttttctttccaagtcacaaaattctcccctcccctaccccggagtttacggccctcctcctgtttccgatttcagcccggaaccggaagtgtagtgggcggggcccgtcggcggaaaacgcagcggagccagagccggacacggctgtggccgctgcctctacccccgccacggatcgccgggtagtaggactgcgcggctccaggctgagggtcggtccggaggcgggtgggcgcgggtctcacccggattgtccgggtggcaccgttcccggccccaccgggcgccgcgagggatcatgtctacagcctctgccgcctcctcctcctcctcgtcttcggccggtgagatgatcgaagccccttcccaggtcctcaactttgaagagatcgactacaaggagatcgaggtggaagaggttgttggaagaggagcctttggagttgtttgcaaagctaagtggagagcaaaagatgttgctattaaacaaatagaaagtgaatctgagaggaaagcgtttattgtagagcttcggcagttatcccgtgtgaaccatcctaatattgtaaagctttatggagcctgcttgaatccagtgtgtcttgtgatggaatatgctgaagggggctctttatataatgtgctgcatggtgctgaaccattgccatattatactgctgcccacgcaatgagttggtgtttacagtgttcccaaggagtggcttatcttcacagcatgcaacccaaagcgctaattcacagggacctgaaaccaccaaacttactgctggttgcaggggggacagttctaaaaatttgtgattttggtacagcctgtgacattcagacacacatgaccaataacaaggggagtgctgcttggatggcacctgaagtttttgaaggtagtaattacagtgaaaaatgtgacgtcttcagctggggtattattctttgggaagtgataacgcgtcggaaaccctttgatgagattggtggcccagctttccgaatcatgtgggctgttcataatggtactcgaccaccactgataaaaaatttacctaagcccattgagagcctgatgactcgttgttggtctaaagatccttcccagcgcccttcaatggaggaaattgtgaaaataatgactcacttgatgcggtactttccaggagcagatgagccattacagtatccttgtcagtattcagatgaaggacagagcaactctgccaccagtacaggctcattcatggacattgcttctacaaatacgagtaacaaaagtgacactaatatggagcaagttcctgccacaaatgatactattaagcgcttagaatcaaaattgttgaaaaatcaggcaaagcaacagagtgaatctggacgtttaagcttgggagcctcccgtgggagcagtgtggagagcttgcccccaacctctgagggcaagaggatgagtgctgacatgtctgaaatagaagctaggatcgccgcaaccacaggcaacggacagccaagacgtagatccatccaagacttgactgtaactggaacagaacctggtcaggtgagcagtaggtcatccagtcccagtgtcagaatgattactacctcaggaccaacctcagaaaagccaactcgaagtcatccatggacccctgatgattccacagataccaatggatcagataactccatcccaatggcttatcttacactggatcaccaactacagcctctagcaccgtgcccaaactccaaagaatctatggcagtgtttgaacagcattgtaaaatggcacaagaatatatgaaagttcaaacagaaattgcattgttattacagagaaagcaagaactagttgcagaactggaccaggatgaaaaggaccagcaaaatacatctcgcctggtacaggaacataaaaagcttttagatgaaaacaaaagcctttctacttactaccagcaatgcaaaaaacaactagaggtcatcagaagtcagcagcagaaacgacaaggcacttcatgattctctgggaccgttacattttgaaatatgcaaagaaagactttttttttaaggaaaggaaaaccttataatgacgattcatgagtgttagctttttggcgtgttctgaatgccaactgcctatatttgctgcatttttttcattgtttattttccttttctcatggtggacatacaattttactgtttcattgcataacatggtagcatctgtgacttgaatgagcagcactttgcaacttcaaaacagatgcagtgaactgtggctgtatatgcatgctcattgtgtgaaggctagcctaacagaacaggaggtatcaaactagctgctatgtgcaaacagcgtccattttttcatattagaggtggaacctcaagaatgactttattcttgtatctcatctcaaaatattaataatttttttcccaaaagatggtatataccaagttaaagacagggtattataaatttagagtgattggtggtatattacggaaatacggaacctttagggatagttccgtgtaagggctttgatgccagcatccttggatcagtactgaactcagttccatccgtaaaatatgtaaaggtaagtggcagctgctctatttaatgaaagcagttttaccggattttgttagactaaaatttgattgtgatacattgaacaaaatggaactcatttttttttaaggagtaaagatttttaattctgtgattgtgtgtatgtgtgttgaaactgtaaagcttttatgactctaatattaatctcttaaatgaaattaaaaggcaaaagaacatgattgagcttaaatgatcatttcttcctgcagtgattcttggattgttttctcatgtatttg

SEQ ID NO: 1370 - protein, 579 aa, Homo sapiens
MSTASAASSSSSSSAGEMIEAPSQVLNFEEIDYKEIEVEEVVGRGAFGVVCKAKWRAKDVAIKQIESESERKAFIVELRQLSRVNHPNIVKLYGACLNPVCLVMEYAEGGSLYNVLHGAEPLPYYTAAHAMSWCLQCSQGVAYLHSMQPKALIHRDLKPPNLLLVAGGTVLKICDFGTACDIQTHMTNNKGSAAWMAPEVFEGSNYSEKCDVFSWGIILWEVITRRKPFDEIGGPAFRIMWAVHNGTRPPLIKNLPKPIESLMTRCWSKDPSQRPSMEEIVKIMTHLMRYFPGADEPLQYPCQYSDEGQSNSATSTGSFMDIASTNTSNKSDTNMEQVPATNDTIKRLESKLLKNQAKQQSESGRLSLGASRGSSVESLPPTSEGKRMSADMSEIEARIAATTGNGQPRRRSIQDLTVTGTEPGQVSSRSSSPSVRMITTSGPTSEKPTRSHPWTPDDSTDTNGSDNSIPMAYLTLDHQLQPLAPCPNSKESMAVFEQHCKMAQEYMKVQTEIALLLQRKQELVAELDQDEKDQQNTSRLVQEHKKLLDENKSLSTYYQQCKKQLEVIRSQQQKRQGTS

SEQ ID NO: 1371 - DNA, 2850 bp, Homo sapiens
ggacacggctgtggccgctgcctctacccccgccacggatcgccgggtagtaggactgcgcggctccaggctgagggtcggtccggaggcgggtgggcgcgggtctcacccggattgtccgggtggcaccgttcccggccccaccgggcgccgcgagggatcatgtctacagcctctgccgcctcctcctcctcctcgtcttcggccggtgagatgatcgaagccccttcccaggtcctcaactttgaagagatcgactacaaggagatcgaggtggaagaggttgttggaagaggagcctttggagttgtttgcaaagctaagtggagagcaaaagatgttgctattaaacaaatagaaagtgaatctgagaggaaagcgtttattgtagagcttcggcagttatcccgtgtgaaccatcctaatattgtaaagctttatggagcctgcttgaatccagtgtgtcttgtgatggaatatgctgaagggggctctttatataatgtgctgcatggtgctgaaccattgccatattatactgctgcccacgcaatgagttggtgtttacagtgttcccaaggagtggcttatcttcacagcatgcaacccaaagcgctaattcacagggacctgaaaccaccaaacttactgctggttgcaggggggacagttctaaaaatttgtgattttggtacagcctgtgacattcagacacacatgaccaataacaaggggagtgctgcttggatggcacctgaagtttttgaaggtagtaattacagtgaaaaatgtgacgtcttcagctggggtattattctttgggaagtgataacgcgtcggaaaccctttgatgagattggtggcccagctttccgaatcatgtgggctgttcataatggtactcgaccaccactgataaaaaatttacctaagcccattgagagcctgatgactcgttgttggtctaaagatccttcccagcgcccttcaatggaggaaattgtgaaaataatgactcacttgatgcggtactttccaggagcagatgagccattacagtatccttgtcagtattcagatgaaggacagagcaactctgccaccagtacaggctcattcatggacattgcttctacaaatacgagtaacaaaagtgacactaatatggagcaagttcctgccacaaatgatactattaagcgcttagaatcaaaattgttgaaaaatcaggcaaagcaacagagtgaatctggacgtttaagcttgggagcctcccgtgggagcagtgtggagagcttgcccccaacctctgagggcaagaggatgagtgctgacatgtctgaaatagaagctaggatcgccgcaaccacagcctattccaagcctaaacggggccaccgtaaaactgcttcatttggcaacattctggatgtccctgagatcgtcatatcaggcaacggacagccaagacgtagatccatccaagacttgactgtaactggaacagaacctggtcaggtgagcagtaggtcatccagtcccagtgtcagaatgattactacctcaggaccaacctcagaaaagccaactcgaagtcatccatggacccctgatgattccacagataccaatggatcagataactccatcccaatggcttatcttacactggatcaccaactacagcctctagcaccgtgcccaaactccaaagaatctatggcagtgtttgaacagcattgtaaaatggcacaagaatatatgaaagttcaaacagaaattgcattgttattacagagaaagcaagaactagttgcagaactggaccaggatgaaaaggaccagcaaaatacatctcgcctggtacaggaacataaaaagcttttagatgaaaacaaaagcctttctacttactaccagcaatgcaaaaaacaactagaggtcatcagaagtcagcagcagaaacgacaaggcacttcatgattctctgggaccgttacattttgaaatatgcaaagaaagactttttttttaaggaaaggaaaaccttataatgacgattcatgagtgttagctttttggcgtgttctgaatgccaactgcctatatttgctgcatttttttcattgtttattttccttttctcatggtggacatacaattttactgtttcattgcataacatggtagcatctgtgacttgaatgagcagcactttgcaacttcaaaacagatgcagtgaactgtggctgtatatgcatgctcattgtgtgaaggctagcctaacagaacaggaggtatcaaactagctgctatgtgcaaacagcgtccattttttcatattagaggtggaacctcaagaatgactttattcttgtatctcatctcaaaatattaataatttttttcccaaaagatggtatataccaagttaaagacagggtattataaatttagagtgattggtggtatattacggaaatacggaacctttagggatagttccgtgtaagggctttgatgccagcatccttggatcagtactgaactcagttccatccgtaaaatatgtaaaggtaagtggcagctgctctatttaatgaaagcagttttaccggattttgttagactaaaatttgattgtgatacattgaacaaaatggaactcatttttttttaaggagtaaagatttttaattctgtgattgtgtgtatgtgtgttgaaactgtaaagcttttatgactctaatattaatctcttaaatgaaattaaaaggcaaaagaacatgattgagcttaaatgatcatttcttcctgcagtgattcttggattgttttctcatgtatttg

SEQ ID NO: 1372 - protein, 606 aa, Homo sapiens
MSTASAASSSSSSSAGEMIEAPSQVLNFEEIDYKEIEVEEVVGRGAFGVVCKAKWRAKDVAIKQIESESERKAFIVELRQLSRVNHPNIVKLYGACLNPVCLVMEYAEGGSLYNVLHGAEPLPYYTAAHAMSWCLQCSQGVAYLHSMQPKALIHRDLKPPNLLLVAGGTVLKICDFGTACDIQTHMTNNKGSAAWMAPEVFEGSNYSEKCDVFSWGIILWEVITRRKPFDEIGGPAFRIMWAVHNGTRPPLIKNLPKPIESLMTRCWSKDPSQRPSMEEIVKIMTHLMRYFPGADEPLQYPCQYSDEGQSNSATSTGSFMDIASTNTSNKSDTNMEQVPATNDTIKRLESKLLKNQAKQQSESGRLSLGASRGSSVESLPPTSEGKRMSADMSEIEARIAATTAYSKPKRGHRKTASFGNILDVPEIVISGNGQPRRRSIQDLTVTGTEPGQVSSRSSSPSVRMITTSGPTSEKPTRSHPWTPDDSTDTNGSDNSIPMAYLTLDHQLQPLAPCPNSKESMAVFEQHCKMAQEYMKVQTEIALLLQRKQELVAELDQDEKDQQNTSRLVQEHKKLLDENKSLSTYYQQCKKQLEVIRSQQQKRQGTS

SEQ ID NO: 1373 - DNA, 2877 bp, Homo sapiens
tccctccttttctttccaagtcacaaaattctcccctcccctaccccggagtttacggccctcctcctgtttccgatttcagcccggaaccggaagtgtagtgggcggggcccgtcggcggaaaacgcagcggagccagagccggacacggctgtggccgctgcctctacccccgccacggatcgccgggtagtaggactgcgcggctccaggctgagggtcggtccggaggcgggtgggcgcgggtctcacccggattgtccgggtggcaccgttcccggccccaccgggcgccgcgagggatcatgtctacagcctctgccgcctcctcctcctcctcgtcttcggccggtgagatgatcgaagccccttcccaggtcctcaactttgaagagatcgactacaaggagatcgaggtggaagaggttgttggaagaggagcctttggagttgtttgcaaagctaagtggagagcaaaagatgttgctattaaacaaatagaaagtgaatctgagaggaaagcgtttattgtagagcttcggcagttatcccgtgtgaaccatcctaatattgtaaagctttatggagcctgcttgaatccagtgtgtcttgtgatggaatatgctgaagggggctctttatataatgtgctgcatggtgctgaaccattgccatattatactgctgcccacgcaatgagttggtgtttacagtgttcccaaggagtggcttatcttcacagcatgcaacccaaagcgctaattcacagggacctgaaaccaccaaacttactgctggttgcaggggggacagttctaaaaatttgtgattttggtacagcctgtgacattcagacacacatgaccaataacaaggggagtgctgcttggatggcacctgaagtttttgaaggtagtaattacagtgaaaaatgtgacgtcttcagctggggtattattctttgggaagtgataacgcgtcggaaaccctttgatgagattggtggcccagctttccgaatcatgtgggctgttcataatggtactcgaccaccactgataaaaaatttacctaagcccattgagagcctgatgactcgttgttggtctaaagatccttcccagcgcccttcaatggaggaaattgtgaaaataatgactcacttgatgcggtactttccaggagcagatgagccattacagtatccttgtcagtattcagatgaaggacagagcaactctgccaccagtacaggctcattcatggacattgcttctacaaatacgagtaacaaaagtgacactaatatggagcaagttcctgccacaaatgatactattaagcgcttagaatcaaaattgttgaaaaatcaggcaaagcaacagagtgaatctggacgtttaagcttgggagcctcccgtgggagcagtgtggagagcttgcccccaacctctgagggcaagaggatgagtgctgacatgtctgaaatagaagctaggatcgccgcaaccacagcctattccaagcctaaacggggccaccgtaaaactgcttcatttggcaacattctggatgtccctgagatcgtcatatcaggcaacggacagccaagacgtagatccatccaagacttgactgtaactggaacagaacctggtcaggtgagcagtaggtcatccagtcccagtgtcagaatgattactacctcaggaccaacctcagaaaagccaactcgaagtcatccatggacccctgatgattccacagataccaatggatcagataactccatcccaatggcttatcttacactggatcaccaactacaggcaagaactagttgcagaactggaccaggatgaaaaggaccagcaaaatacatctcgcctggtacaggaacataaaaagcttttagatgaaaacaaaagcctttctacttactaccagcaatgcaaaaaacaactagaggtcatcagaagtcagcagcagaaacgacaaggcacttcatgattctctgggaccgttacattttgaaatatgcaaagaaagactttttttttaaggaaaggaaaaccttataatgacgattcatgagtgttagctttttggcgtgttctgaatgccaactgcctatatttgctgcatttttttcattgtttattttccttttctcatggtggacatacaattttactgtttcattgcataacatggtagcatctgtgacttgaatgagcagcactttgcaacttcaaaacagatgcagtgaactgtggctgtatatgcatgctcattgtgtgaaggctagcctaacagaacaggaggtatcaaactagctgctatgtgcaaacagcgtccattttttcatattagaggtggaacctcaagaatgactttattcttgtatctcatctcaaaatattaataatttttttcccaaaagatggtatataccaagttaaagacagggtattataaatttagagtgattggtggtatattacggaaatacggaacctttagggatagttccgtgtaagggctttgatgccagcatccttggatcagtactgaactcagttccatccgtaaaatatgtaaaggtaagtggcagctgctctatttaatgaaagcagttttaccggattttgttagactaaaatttgattgtgatacattgaacaaaatggaactcatttttttttaaggagtaaagatttttaattctgtgattgtgtgtatgtgtgttgaaactgtaaagcttttatgactctaatattaatctcttaaatgaaattaaaaggcaaaagaacatgattgagcttaaatgatcatttcttcctgcagtgattcttggattgttttctcatgtatttg

SEQ ID NO: 1374 - protein, 518 aa, Homo sapiens
MSTASAASSSSSSSAGEMIEAPSQVLNFEEIDYKEIEVEEVVGRGAFGVVCKAKWRAKDVAIKQIESESERKAFIVELRQLSRVNHPNIVKLYGACLNPVCLVMEYAEGGSLYNVLHGAEPLPYYTAAHAMSWCLQCSQGVAYLHSMQPKALIHRDLKPPNLLLVAGGTVLKICDFGTACDIQTHMTNNKGSAAWMAPEVFEGSNYSEKCDVFSWGIILWEVITRRKPFDEIGGPAFRIMWAVHNGTRPPLIKNLPKPIESLMTRCWSKDPSQRPSMEEIVKIMTHLMRYFPGADEPLQYPCQYSDEGQSNSATSTGSFMDIASTNTSNKSDTNMEQVPATNDTIKRLESKLLKNQAKQQSESGRLSLGASRGSSVESLPPTSEGKRMSADMSEIEARIAATTAYSKPKRGHRKTASFGNILDVPEIVISGNGQPRRRSIQDLTVTGTEPGQVSSRSSSPSVRMITTSGPTSEKPTRSHPWTPDDSTDTNGSDNSIPMAYLTLDHQLQARTSCRTGPG

SEQ ID NO: 1375 - DNA, 2796 bp, Homo sapiens
tccctccttttctttccaagtcacaaaattctcccctcccctaccccggagtttacggccctcctcctgtttccgatttcagcccggaaccggaagtgtagtgggcggggcccgtcggcggaaaacgcagcggagccagagccggacacggctgtggccgctgcctctacccccgccacggatcgccgggtagtaggactgcgcggctccaggctgagggtcggtccggaggcgggtgggcgcgggtctcacccggattgtccgggtggcaccgttcccggccccaccgggcgccgcgagggatcatgtctacagcctctgccgcctcctcctcctcctcgtcttcggccggtgagatgatcgaagccccttcccaggtcctcaactttgaagagatcgactacaaggagatcgaggtggaagaggttgttggaagaggagcctttggagttgtttgcaaagctaagtggagagcaaaagatgttgctattaaacaaatagaaagtgaatctgagaggaaagcgtttattgtagagcttcggcagttatcccgtgtgaaccatcctaatattgtaaagctttatggagcctgcttgaatccagtgtgtcttgtgatggaatatgctgaagggggctctttatataatgtgctgcatggtgctgaaccattgccatattatactgctgcccacgcaatgagttggtgtttacagtgttcccaaggagtggcttatcttcacagcatgcaacccaaagcgctaattcacagggacctgaaaccaccaaacttactgctggttgcaggggggacagttctaaaaatttgtgattttggtacagcctgtgacattcagacacacatgaccaataacaaggggagtgctgcttggatggcacctgaagtttttgaaggtagtaattacagtgaaaaatgtgacgtcttcagctggggtattattctttgggaagtgataacgcgtcggaaaccctttgatgagattggtggcccagctttccgaatcatgtgggctgttcataatggtactcgaccaccactgataaaaaatttacctaagcccattgagagcctgatgactcgttgttggtctaaagatccttcccagcgcccttcaatggaggaaattgtgaaaataatgactcacttgatgcggtactttccaggagcagatgagccattacagtatccttgtcagtattcagatgaaggacagagcaactctgccaccagtacaggctcattcatggacattgcttctacaaatacgagtaacaaaagtgacactaatatggagcaagttcctgccacaaatgatactattaagcgcttagaatcaaaattgttgaaaaatcaggcaaagcaacagagtgaatctggacgtttaagcttgggagcctcccgtgggagcagtgtggagagcttgcccccaacctctgagggcaagaggatgagtgctgacatgtctgaaatagaagctaggatcgccgcaaccacaggcaacggacagccaagacgtagatccatccaagacttgactgtaactggaacagaacctggtcaggtgagcagtaggtcatccagtcccagtgtcagaatgattactacctcaggaccaacctcagaaaagccaactcgaagtcatccatggacccctgatgattccacagataccaatggatcagataactccatcccaatggcttatcttacactggatcaccaactacaggcaagaactagttgcagaactggaccaggatgaaaaggaccagcaaaatacatctcgcctggtacaggaacataaaaagcttttagatgaaaacaaaagcctttctacttactaccagcaatgcaaaaaacaactagaggtcatcagaagtcagcagcagaaacgacaaggcacttcatgattctctgggaccgttacattttgaaatatgcaaagaaagactttttttttaaggaaaggaaaaccttataatgacgattcatgagtgttagctttttggcgtgttctgaatgccaactgcctatatttgctgcatttttttcattgtttattttccttttctcatggtggacatacaattttactgtttcattgcataacatggtagcatctgtgacttgaatgagcagcactttgcaacttcaaaacagatgcagtgaactgtggctgtatatgcatgctcattgtgtgaaggctagcctaacagaacaggaggtatcaaactagctgctatgtgcaaacagcgtccattttttcatattagaggtggaacctcaagaatgactttattcttgtatctcatctcaaaatattaataatttttttcccaaaagatggtatataccaagttaaagacagggtattataaatttagagtgattggtggtatattacggaaatacggaacctttagggatagttccgtgtaagggctttgatgccagcatccttggatcagtactgaactcagttccatccgtaaaatatgtaaaggtaagtggcagctgctctatttaatgaaagcagttttaccggattttgttagactaaaatttgattgtgatacattgaacaaaatggaactcatttttttttaaggagtaaagatttttaattctgtgattgtgtgtatgtgtgttgaaactgtaaagcttttatgactctaatattaatctcttaaatgaaattaaaaggcaaaagaacatgattgagcttaaatgatcatttcttcctgcagtgattcttggattgttttctcatgtatttg

SEQ ID NO: 1376 - protein, 491 aa, Homo sapiens
MSTASAASSSSSSSAGEMIEAPSQVLNFEEIDYKEIEVEEVVGRGAFGVVCKAKWRAKDVAIKQIESESERKAFIVELRQLSRVNHPNIVKLYGACLNPVCLVMEYAEGGSLYNVLHGAEPLPYYTAAHAMSWCLQCSQGVAYLHSMQPKALIHRDLKPPNLLLVAGGTVLKICDFGTACDIQTHMTNNKGSAAWMAPEVFEGSNYSEKCDVFSWGIILWEVITRRKPFDEIGGPAFRIMWAVHNGTRPPLIKNLPKPIESLMTRCWSKDPSQRPSMEEIVKIMTHLMRYFPGADEPLQYPCQYSDEGQSNSATSTGSFMDIASTNTSNKSDTNMEQVPATNDTIKRLESKLLKNQAKQQSESGRLSLGASRGSSVESLPPTSEGKRMSADMSEIEARIAATTGNGQPRRRSIQDLTVTGTEPGQVSSRSSSPSVRMITTSGPTSEKPTRSHPWTPDDSTDTNGSDNSIPMAYLTLDHQLQARTSCRTGPG

SEQ ID NO: 1377 - DNA, 4232 bp, Homo sapiens
aaaattgcgtttgagtttgccgcgagccgggccaatcggttttgccaacgcatgcccacgtgctggcgaacaaatgtaaacacggagatcgtgtgccgggcacttggtttcgtggtgggcaactgtgctgctgtttcttttggccgcggacaaggtcggcagaggtggacccctgcttgggagagctcttctcgctgtgctgacacccgcccctaacagtcacccaccccggggaaataatggggctcggaggcctcctcccagccagtgtccagcctaagcacatcggctcccgcagttcagaaaggtcccgaggcccgagtcaccatttccggctcagacctcgacccggaacgtggctgcccactgccacgcccactacgccccagtggctcgccccaggggacgaggggcaagaagcggcctccgagggcagcggccgaaggccattcggtccctggctcttcccagctcgcagagacccggaagcgctgcccggccgcctgcccctcttcagatcccccagcaccggaggagcagcgagggggctgcgtccaggccggctttcgggtcggcttaggcgaatccagctctcttttgcccctcccagaaggcccagccccgtccgggcggtgttcgggcggcgccgggccgggccccccgccgccccaggctcgctcataggcccggaacaccacagcccgcccagacttggctggcgccgagccgggggtggagccagcgggttcccgccaaaatcgcgtagctggtccttcccccgcgggctacgtcgcgccctcctttttttttcaaacccggagctgcactgggattggtggactgggcactcacgtggttaacggtcgcgggaagccgcggagcccgaacctgagactggacctgaggagacctcagcctcggtgctcgggccgccccgcctctgccggaaagtccgcgccgccgctgccgccaccgtccgcagcccgagcgccccggagccgcaggccgccgccgcgcagagacgccgcggctgcgactaggcgcgcccagccgcacgtggcggacccgcccccaggcccgcagtgtcctggaccccgcaggcctccgctctcctgtcctcggccccgtccccagggccgcgatgagcttcctgagccgacagcagccgccgccaccccgccgcgccggggcggcctgcaccttgcggcagaagctgatcttctcgccctgcagcgactgtgaggaggaggaagaagaggaggaggaggagggcagcggccacagcaccggggaggactcggcctttcaagagcccgactcgccgctgccgcccgcgcggagccccacggagcccgggcccgagcgccgccgctcgcccgggccggcccccgggagccccggcgagctggaggaggacctgttgctgcccggcgcctgcccgggcgcggacgaggcgggcggtggggcggagggcgactcgtgggaggaggagggcttcggctcctcgtcgccggtcaagtcgccggcggccccctacttcctgggtagctctttctcgccggtgcgctgcggcggcccaggagatgcgtcgccgcggggttgcggggcgcgccgggcgggcgaaggccgccgctcgccgcggccggaccacccgggcaccccgccacacaagaccttccgcaagctgcgactcttcgacaccccgcacacgcccaagagtttgctctccaaagctcggggaattgattccagctctgttaaactccggggtagttctctcttcatggatacagaaaaatcaggaaaaagggaatttgatgtgcgacagactcctcaagtgaatattaatccttttactccggattctttgttgcttcattcctcaggacagtgtcgtcgtagaaagagaacgtattggaatgattcctgtggtgaagacatggaagccagtgattatgagcttgaagatgaaacaagacctgctaagagaattacaattactgaaagcaatatgaagtcccggtatacaacagaatttcatgagctagagaaaatcggctctggagaatttggttctgtatttaagtgtgtgaagaggctggatggatgcatttatgccattaagcgatcaaaaaagccattggcgggctctgttgatgagcagaacgctttgagagaagtatatgctcatgcagtgcttggacagcattctcatgtagttcgatatttctctgcgtgggcagaagatgatcatatgcttatacagaatgaatattgtaatggtggaagtttagctgatgctataagtgaaaactacagaatcatgagttactttaaagaagcagagttgaaggatctccttttgcaagttggccgaggcttgaggtatattcattcaatgtctttggttcacatggatataaaacctagtaatattttcatatctcgaacctcaatcccaaatgctgcctctgaagaaggagacgaagatgattgggcatccaacaaagttatgtttaaaataggtgatcttgggcatgtaacaaggatctccagtccacaagttgaagagggcgatagtcgttttcttgcaaatgaagttttacaggagaattatacccatctaccaaaagcagatatttttgcgcttgccctcacagtggtatgtgctgctggtgctgaacctcttccgagaaatggagatcaatggcatgaaatcagacagggtagattacctcggataccacaagtgctttcccaagaatttacagagttgctaaaagttatgattcatccagatccagagagaagaccttcagcaatggcactggtaaagcattcagtattgctgtccgcttctagaaagagtgcagaacaattacgaatagaattgaatgccgaaaagttcaaaaattcacttttacaaaaagaactcaagaaagcacagatggcaaaagctgcagctgaggaaagagcactcttcactgaccggatggccactaggtccaccacccagagtaatagaacatctcgacttattggaaagaaaatgaaccgctctgtcagccttactatatactgagctactcctttcccacctccccctgaacactgtgacaagaggaagctaggttgaaatcactgatagaatccagtttgcaattactttctcgattggtgtcagtagttttactgattaggacttttattgtgaattacagttgaaagctgtattttgatgattgctatgtcaggctttcatctaatcttaccagtctgtcttctgtaggatgtgtcactgttggatgttacaccagcctttccagggttaaccactgtggtggtgtgctgcttatagtttgctgttgcattgtaataaaaggtgtctttccctgtagtgacctgtaaaaagtactcaagggctttattacagacataccctccctttgaaaagggacatgctaaaagactcattactactcagccttcaatgtacctgtgtgtccatcttatatttcttttttttttttaattgtgaattagacttgtatatcccactgggagcactttgtaggcattgcatgaaccatgggatgatgattctgtggaggtattgccttgtgaatttgctgctattttagttttgtctttgctgtaaacttgtagcattaaacaatcattgttgttaataggtcttctttttgaaacaattatgtgaaatgtatagctgcttttgatgaaaagcagctatttgccttttttttttttcctttgaactttgaagctagtgcattggaaaaatgcaccctttccctcctttggaatgctgtattaatgtagtataataattactggttttgtaacttgttctggtaatgtccttcccggactctttttaaatgtctccccctaagttttatacttgattgtattattagtctgtttttaaatgttttgcccggtttttctcttcaatatttgtgtatataaaccgatcttcgtgatactgtacatagctgtttgaaatgccagaatgacttctgacattccaagtttttcacaaaatatattttatctgtgattagccatttgactaataatactggctaacagatgttgaaaaaaattgtctgtttgttttctcattaattttggtctaaaacatgtttgcacttgtctttgacttgtgttttattaacattgattggcatattaaaagtcactctgagctt

SEQ ID NO: 1378 - protein, 646 aa, Homo sapiens
MSFLSRQQPPPPRRAGAACTLRQKLIFSPCSDCEEEEEEEEEEGSGHSTGEDSAFQEPDSPLPPARSPTEPGPERRRSPGPAPGSPGELEEDLLLPGACPGADEAGGGAEGDSWEEEGFGSSSPVKSPAAPYFLGSSFSPVRCGGPGDASPRGCGARRAGEGRRSPRPDHPGTPPHKTFRKLRLFDTPHTPKSLLSKARGIDSSSVKLRGSSLFMDTEKSGKREFDVRQTPQVNINPFTPDSLLLHSSGQCRRRKRTYWNDSCGEDMEASDYELEDETRPAKRITITESNMKSRYTTEFHELEKIGSGEFGSVFKCVKRLDGCIYAIKRSKKPLAGSVDEQNALREVYAHAVLGQHSHVVRYFSAWAEDDHMLIQNEYCNGGSLADAISENYRIMSYFKEAELKDLLLQVGRGLRYIHSMSLVHMDIKPSNIFISRTSIPNAASEEGDEDDWASNKVMFKIGDLGHVTRISSPQVEEGDSRFLANEVLQENYTHLPKADIFALALTVVCAAGAEPLPRNGDQWHEIRQGRLPRIPQVLSQEFTELLKVMIHPDPERRPSAMALVKHSVLLSASRKSAEQLRIELNAEKFKNSLLQKELKKAQMAKAAAEERALFTDRMATRSTTQSNRTSRLIGKKMNRSVSLTIY

SEQ ID NO: 1379 - DNA, 1743 bp, Homo sapiens
ggcgcggggacgcgggtttctgcctcaggccctgccctgctctactctgcgctctctgcccgcgccgccgccgcctcagcctcggccctgcgctgcgcgcccggcccgtgctgccatggcctgccgcccgcgaagcccgccgaggcatcagagccgctgcgacggtgacgccagcccgccgtcccccgcgcgatggagcctgggacggaagcgcagagccgacggcaggcgctggaggcccgaagacgccgaggaggcagagcaccgcggcgccgagcgcagacccgagagctttaccactcctgaaggccctaaaccccgttccagatgctctgactgggcaagtgcagttgaagaagatgaaatgaggaccagagttaacaaagaaatggcaagatataaaaggaaactcctcatcaatgactttggaagagagagaaaatcatcatcaggaagttctgattcaaaggagtctatgtctactgtgccggctgactttgagacagatgaaagtgtcctaatgaggagacagaagcagatcaactatgggaagaacacaattgcctacgatcgttatattaaagaagtcccaagacaccttcgacaacctggcattcatcccaagacccctaataaatttaagaagtatagtcgacgttcatgggaccagcaaatcaaactctggaaggtggctctgcatttttgggatcctccagcggaagaaggatgtgatttgcaagaaatacaccctgtagaccttgaatctgcagaaagcagctccgagccccagaccagctctcaggatgactttgatgtgtactctggcacacccaccaaggtgagacacatggacagtcaagtggaggatgagtttgatttggaagcttgtttaactgaacccttgagagacttctcagccatgagctaactgccccctggcggccaggaagagaaacagctcctccccgactaggtggaaggctggccaggcaccaagcatgtgtgtgcacttgtacctggtggtttctctgttagcagtccattagctcatgctgaattatttttgccttactttcttaagaaacattaattttatgtatagtgagtatattttgcatgttttaaattgtaaatggagctaagtccaagaaagtacttgaagctctcttccagcgagcttaattgcgtaatccctgttgtcctccagggtaagctgacacgtctacataactggttttccacaggcatcttcagttattgcttgtcaggtggactgttttggatttaaccatgtaatccatgggaccaattgagagtcagctacttttataggcatcaaagtattctcagacacctttaatatctttatggaaacttaatttttggccttttatcaatatgtcataacagcattctgaagtcagacattgttaaattgagctattaaactaatgagttttatgtaagttatatggtcttaatttggtacttgtaaatagcactagttagactctttagaatactccaagagttagggcagcagagtggagcgatttagaaagaacattttaaaacaatcagttaatttaccatgtaaaattgctgtaaatgataatgtgtacagattttctgttcaaatattcaattgtaaacttcttgttaagactgttacgtttctattgcttttgtatgggatattgcaaaaataaaaaggaaagaaccctcaaaaaaaaaaaaaaaaaa

SEQ ID NO: 1380 - protein, 270 aa, Homo sapiens
MACRPRSPPRHQSRCDGDASPPSPARWSLGRKRRADGRRWRPEDAEEAEHRGAERRPESFTTPEGPKPRSRCSDWASAVEEDEMRTRVNKEMARYKRKLLINDFGRERKSSSGSSDSKESMSTVPADFETDESVLMRRQKQINYGKNTIAYDRYIKEVPRHLRQPGIHPKTPNKFKKYSRRSWDQQIKLWKVALHFWDPPAEEGCDLQEIHPVDLESAESSSEPQTSSQDDFDVYSGTPTKVRHMDSQVEDEFDLEACLTEPLRDFSAMS

SEQ ID NO: 1381 - DNA, 3004 bp, Homo sapiens
cccttatggcgattgggcggctgcagagaccaggactcagttcccctgccctagtctgagcctagtgggtgggactcagctcagagtcagttttcagaagcaggtttcagttgcagagttttcctacacttttcctgcgctagagcagcgagcagcctggaacagacccaggcggaggacacctgtgggggagggagcgcctggaggagcttagagaccccagccgggcgtgatctcaccatgtgcggatttgcgaggcgcgccctggagctgctagagatccggaagcacagccccgaggtgtgcgaagccaccaagactgcggctcttggagaaagcgtgagcagggggccaccgcggtctccggcctgtctgcaccctgtcgcctgagctgcctgacagtgacaatgacatcccagttaccagtgtccttgaattgatagtggcttctgtttgtcagtctcatataagaactacagctcatcaggaggagatcgcagcagggtaagagacaccaacaccatgttctgcacgaagctcaaggatctcaagatcacaggagagtgtcctttctccttactggcaccaggtcaagttcctaacgagtcttcagaggaggcagcaggaagctcagagagctgcaaagcaaccgtgcccatctgtcaagacattcctgagaagaacatacaagaaagtcttcctcaaagaaaaaccagtcggagccgagtctatcttcacactttggcagagagtatttgcaaactgattttcccagagtttgaacggctgaatgttgcacttcagagaacattggcaaagcacaaaataaaagaaagcaggaaatctttggaaagagaagactttgaaaaaacaattgcagagcaagcagtgcagcagagtccagtggagttatcaaagaatctcttggtgaagaggtttttaaaatatgttacgaggaagatgaaaacatccttggggtggttggaggcacccttaaagatttttaaacagcttcagtacccttctgaaacagagcagccattgccaagaagcaggaaaaaggggcagcttgaggacgcctccattctatgcctggataaggaggatgattttctacatgtttactacttcttccctaagagaaccacctccctgattcttcccggcatcataaaggcagctgctcacgtattatatgaaacggaagtggaagtgtcgttaatgcctccctgcttccataatgattgcagcgagtttgtgaatcagccctacttgttgtactccgttcacatgaaaagcaccaagccatccctgtcccccagcaaaccccagtcctcgctggtgattcccacatcgctattctgcaagacatttccattccatttcatgtttgacaaagatatgacaattctgcaatttggcaatggcatcagaaggctgatgaacaggagagactttcaaggaaagcctaattttgaatactttgaaattctgactccaaaaatcaaccagacctttagcgggatcatgactatgttgaatatgcagtttgttgtacgagtgaggagatgggacaactctgtgaagaaatcttcaagggttatggacctcaaaggccaaatgatctacattgttgaatccagtgcaatcttgtttttggggtcaccctgtgtggacagattagaagattttacaggacgagggctctacctctcagacatcccaattcacaatgcactgagggatgtggtcttaataggggaacaagcccgagctcaagatggcctgaagaagaggctggggaagctgaaggctacccttgagcaagcccaccaagccctggaggaggagaagaaaaagacagtagaccttctgtgctccatatttccctgtgaggttgctcagcagctgtggcaagggcaagttgtgcaagccaagaagttcagtaatgtcaccatgctcttctcagacatcgttgggttcactgccatctgctcccagtgctcaccgctgcaggtcatcaccatgctcaatgcactgtacactcgcttcgaccagcagtgtggagagctggatgtctacaaggtggagaccattgcgatgcctattgtgtggcttgggggattacacaaagagagtgatactcatgctgttcagatagcgctgatggccctgaagatgatggagctctctgatgaagttatgtctccccatggagaacctatcaagatgcgaattggactgcactctggatcagtttttgctggcgtcgttggagttaaaatgccccgttactgtctttttggaaacaatgtcactctggctaacaaatttgagtcctgcagtgtaccacgaaaaatcaatgtcagcccaacaacttacagattactcaaagactgtcctggtttcgtgtttacccctcgatcaagggaggaacttccaccaaacttccctagtgaaatccccggaatctgccattttctggatgcttaccaacaaggaacaaactcaaaaccatgcttccaaaagaaagatgtggaagatgcaagccaattttttaggcaaagcatcaggaatagattagcaacctatatacctatttataagtctttggggtttgactcattgaagatgtgtagagcctctgaaagcactttagggattgtagatggctaacaagcagtattaaaatttcaggagccaagtcacaatctttctcctgtttaacatgacaaaatgtactcacttcagtacttcagctcttcaagaaaaaaaaaaaaaccttaaaaagctacttttgtgggagtatttctattatataaccagcacttactacctgtactcaaaattcagcaccttgtacatatatcagataattgtagtcaattgtacaaactgatggagtcacctgcaatctcatatcctggtggaatgccatggttattaaagtgtgtttgtgatagttgtcgtcaaaaaaaaaaaaaaaaaaaaaaaaaaaaaaaaa

SEQ ID NO: 1382 - protein, 717 aa, Homo sapiens
MFCTKLKDLKITGECPFSLLAPGQVPNESSEEAAGSSESCKATVPICQDIPEKNIQESLPQRKTSRSRVYLHTLAESICKLIFPEFERLNVALQRTLAKHKIKESRKSLEREDFEKTIAEQAVQQSPVELSKNLLVKRFLKYVTRKMKTSLGWLEAPLKIFKQLQYPSETEQPLPRSRKKGQLEDASILCLDKEDDFLHVYYFFPKRTTSLILPGIIKAAAHVLYETEVEVSLMPPCFHNDCSEFVNQPYLLYSVHMKSTKPSLSPSKPQSSLVIPTSLFCKTFPFHFMFDKDMTILQFGNGIRRLMNRRDFQGKPNFEYFEILTPKINQTFSGIMTMLNMQFVVRVRRWDNSVKKSSRVMDLKGQMIYIVESSAILFLGSPCVDRLEDFTGRGLYLSDIPIHNALRDVVLIGEQARAQDGLKKRLGKLKATLEQAHQALEEEKKKTVDLLCSIFPCEVAQQLWQGQVVQAKKFSNVTMLFSDIVGFTAICSQCSPLQVITMLNALYTRFDQQCGELDVYKVETIAMPIVWLGGLHKESDTHAVQIALMALKMMELSDEVMSPHGEPIKMRIGLHSGSVFAGVVGVKMPRYCLFGNNVTLANKFESCSVPRKINVSPTTYRLLKDCPGFVFTPRSREELPPNFPSEIPGICHFLDAYQQGTNSKPCFQKKDVEDASQFFRQSIRNRLATYIPIYKSLGFDSLKMCRASESTLGIVDG

SEQ ID NO: 1383 - DNA, 4193 bp, Homo sapiens
catggcggcgactgcggcaaagcgagagcctcggagacgccgctgccgccagcacagccggagatctgagccgacactgggggcagtccgcgagccccgcactctctcgatgagtcggagaagtcccgttgtatcagagtaagatggacggtagctttgattgtgattgtggtgagctggagccacctgatcactaacaaaagacatcttctgttaaccaacagccgccaggcttcctgttgaaataaatatatagcaacaaaggaaaaaaagaagcaaaacggaaatagtgcttaccagcaccttagaatgatgctgctcaggaccagtccaacactgaatgtatctgcactgtgaggagaatgttcatagaagcctgttgtgtgcatatttattcactttttgttaaatgttaaatcgtttagcacggtaatctgagtgcacagtatgtcatttcattccgtttgagtttcttgttttcgttaaatgtctgcagagttgctgcccctttcttgaactatgagtactgcaatctttttaattctcaatatgaatagagctttttgagctttaaatctaaggggaactcgacaggcctgtttggcatatgcaatgaacatcaagaaaccatcttgctgtggaagcataattatttttcttctccctttttgaaagatctttccttttgatgccagttttcttccttgtttacacaagttcaatttgaaaggaaaaggcaatagtaagggtttcaaaatggcagagaaatttgaaagtctcatgaacattcatggttttgatctgggttctaggtatatggacttaaaaccattgggttgtggaggcaatggcttggttttttctgctgtagacaatgactgtgacaaaagagtagccatcaagaaaattgtccttactgatccccagagtgtcaaacatgctctacgtgaaatcaaaattattagaagacttgaccatgataacattgtgaaagtgtttgagattcttggtcccagtggaagccaattaacagacgatgtgggctctcttacggaactgaacagtgtttacattgttcaggagtacatggagacagacttggctaatgtgctggagcagggccctttactggaagagcatgccaggcttttcatgtatcagctgctacgggggctcaagtatattcactctgcaaatgtactgcacagagatctcaaaccagctaatcttttcattaatacggaagacttggtgctgaagataggtgactttggtcttgcacggatcatggatcctcattattcccataagggtcatctttctgaaggattggttactaaatggtacagatctccacgtcttttactttctcctaataattatactaaagccattgacatgtgggctgcaggctgcatctttgctgaaatgctgactggtaaaaccctttttgcaggtgcacatgaacttgaacagatgcagctgattttagaatctattcctgttgtacatgaggaagatcgtcaggagcttctcagcgtaattccagtttacattagaaatgacatgactgagccacacaaacctttaactcagctgcttccaggaattagtcgagaagcactggatttcctggaacaaattttgacatttagccccatggatcggttaacagcagaagaagcactctcccatccttacatgagcatatattcttttccaatggatgagccaatttcaagccatccttttcatattgaagatgaagttgatgatattttgcttatggatgaaactcacagtcacatttataactgggaaaggtatcatgattgtcagttttcagagcatgattggcctgtacataacaactttgatattgatgaagttcagcttgatccaagagctctgtccgatgtcactgatgaagaagaagtacaagttgatccccgaaaatatttggatggagatcgggaaaagtatctggaggatcctgcttttgataccaattactctactgagccttgttggcaatactcagatcatcatgaaaacaaatattgtgatctggagtgtagccatacttgtaactacaaaacgaggtcatcatcatatttagataacttagtttggagagagagtgaagttaaccattactatgaacccaagcttattatagatctttccaattggaaagaacaaagcaaagaaaaatctgataagaaaggcaaatcaaaatgtgaaaggaatggattggttaaagcccagatagcgctagaggaagcatcacagcaactggctggaaaagaaagggaaaagaatcagggatttgattttgattcctttattgcaggaactattcagcttagttcccagcatgagcctactgatgttgttgataaattaaatgacttgaatagctcagtgtcccaactagaattgaaaagtttgatatcaaagtcagtaagccaagaaaaacaggaaaaaggaatggcaaatctggctcaattagaagccttgtaccagtcttcttgggacagccagtttgtgagtggtggggaggactgttttttcataaatcagttttgtgaggtaaggaaggatgaacaagttgagaaggaaaacacttacactagttacttggacaagttctttagcaggaaagaagatactgaaatgctagaaactgagccagtagaggatgggaagcttggggagagaggacatgaggaaggatttctgaacaacagtggggagttcctctttaacaagcagctcgagtccataggcatcccacagtttcacagtccagttgggtcaccacttaagtcaatacaggccacattaacaccttctgctatgaaatcttcccctcaaattcctcatcaaacatacagcagcattctgaaacatctgaactaaaacactcagcagacatttatctttgtattcttcatgaaatgtgttttgtctttttttattactagtgtttaagtcattttttacttgaatcagatggtgtcatttagtaaggattttatgagttcttgttttttaaaatccagactttctttttctacatgtgagatagttttcattttaactggcatgtcatttgcacacaaaaataaagactagagcaaaataatgcaacgcaggaggagaaaagaaatgcactaagacaagaacattctctcatagaacattgatctgttttacaggaaacaaaccttgccttgaaatttacacagtgagactgtacataattgcatgaaaatagctatttttttcctaagacatttttcattcatgaatattttcaagtttttcatactgtacacatttcttaaaacacatgataccagcagcaactgaaaatgaatgccgaatttggtacacatgtgttatctacctcaaggtaacaagagtatgtggcaaaacatataccacccatagtgcttcacaaaatgcacttctatttagccagcgtttattgtagtaaactattcttaataaaactcactcactgtttataaatgttctggtatgcattctttatagtgaagtgttaatacatcacatcttatttattttagcaaatcagtatattttctgtatttaattataaaaaattaacttagtttttaaaatttatttgcaaatatactttttccatttggcactatggtttgttgcctacctagctgcatctataatgtcagcttatcctaaggctgtccacgtacttaatttacttaagtgttcattttaagtaacgtgctcactgtgtataggaatttgtattttggaggtgcttgatctatctacaaagaaaaattaattaggaattactttattataaaatgctcctagaagtcttaattgtgtttattttttaaaaaaacaaatgttagacttgtgtgcatggaagtaattaaggtacatcattattgtagtttgaaagttgtacatgataagacattttgtttttactgtatgtttttactgaatgatctattccccatcccaaggcaagcatgaataaaattaggttaaacgtagcatgtggcatcgcagtctcttagaatttgtttcatctattttattttattgaatactgtctgtatctttggttatcctgtttgaagaaaaaggacaaataaaacatggccagcaaatacaaaaaaaaaaaa

SEQ ID NO: 1384 - protein, 721 aa, Homo sapiens
MAEKFESLMNIHGFDLGSRYMDLKPLGCGGNGLVFSAVDNDCDKRVAIKKIVLTDPQSVKHALREIKIIRRLDHDNIVKVFEILGPSGSQLTDDVGSLTELNSVYIVQEYMETDLANVLEQGPLLEEHARLFMYQLLRGLKYIHSANVLHRDLKPANLFINTEDLVLKIGDFGLARIMDPHYSHKGHLSEGLVTKWYRSPRLLLSPNNYTKAIDMWAAGCIFAEMLTGKTLFAGAHELEQMQLILESIPVVHEEDRQELLSVIPVYIRNDMTEPHKPLTQLLPGISREALDFLEQILTFSPMDRLTAEEALSHPYMSIYSFPMDEPISSHPFHIEDEVDDILLMDETHSHIYNWERYHDCQFSEHDWPVHNNFDIDEVQLDPRALSDVTDEEEVQVDPRKYLDGDREKYLEDPAFDTNYSTEPCWQYSDHHENKYCDLECSHTCNYKTRSSSYLDNLVWRESEVNHYYEPKLIIDLSNWKEQSKEKSDKKGKSKCERNGLVKAQIALEEASQQLAGKEREKNQGFDFDSFIAGTIQLSSQHEPTDVVDKLNDLNSSVSQLELKSLISKSVSQEKQEKGMANLAQLEALYQSSWDSQFVSGGEDCFFINQFCEVRKDEQVEKENTYTSYLDKFFSRKEDTEMLETEPVEDGKLGERGHEEGFLNNSGEFLFNKQLESIGIPQFHSPVGSPLKSIQATLTPSAMKSSPQIPHQTYSSILKHLN

SEQ ID NO: 1385 - DNA, 3186 bp, Homo sapiens
agttaatatgatcctctgttgaagcaagaagacaaactgtatggtggagaaagaagtgggaaggatctgcgcggaagaagcctgagaagatgatgcacagatagagaggcaccaggacttgagaggcaccaggacttgggaggcatgttgatccatctccaggaaagactgagaaaaagagcgttgaatataagaaaaaatacttcctctgttctcagatcgtatttgttttaaggccacacctttttgaagttttcagtttgaaacacaacctggactgaaatcatgagggaggttgtgtaggaaagaatcatcaagggacttagttgggagcttctctaccacagcttactccttatggtattaaccccctttaagtgtaaatgtctttggtttaaaacgtttgtacctcatctgttaccagagtgttcatactggagagaaaccctatgaatttactgaatgtgggggaactgttactcatatgttgcatttcgtcgaacgtgcaagtcatgctgaagagaaaccctgtgcttctaaggagtattgacaagcccttagctagatgacaatctcattgagaagcagaaaattcatgctggagagaaactagtgaaggtagcaatacttcattgaatattagaaaatttttctagagagaaagcattgaatatactgagtatgataacatttcctctcaaaccttatcccttactctgcatttgggagatcatacacagagaagccttataaatgtaagagatgtggaaatatcttcagccaaaagtaaatcctcactcatcaagaaatttttactggagagaaaccttgtgaatgtgggaaagcttccattcagatgtcacacctcagccagcagaaaatttacagtggggaaaacccctttgcctgtaaggtatgtggaaaagtcttcagccacaaatcaaacctcactgagcatgagcattttcacacgagagagaaaccttttgaatgtaacgagtgtggaaaagcctttagccaaaagcagtatgtcattaaacatcagaacacccatactggcgagaagcttttcgaatgtaatgaatgtggaaaatcatttagccagaaggaaaacctccttacgcaccagaaaattcacactggagaaaaaccttttgagtgtaaagattgcgggaaagctttcattcagaagtcaaacctcatcagacaccagagaactcacacaggagagaagccctttgtatgtaaggagtgtggaaaaaccttcagtggcaaatccaaccttactgagcatgagaaaatccatattggagagaagccttttaaatgtagtgaatgtggaacagcctttggccagaagaagtacctcataaaacatcagaacattcacactggagagaaaccctatgaatgtaacgaatgtggaaaagccttctctcagcgaacatcacttattgtacatgtgaggattcattcaggtgataaaccttacgaatgcaatgtttgtggaaaagccttctctcagagctcatctctcactgtgcatgtgagaagccatacaggggagaagccctatggttgtaatgaatgtgggaaagctttctctcagttctcaacccttgctctgcatttgagaatacacacaggtaagaagccttatcagtgcagtgaatgtgggaaagctttcagccagaagtcacaccacattagacaccagaaaattcatactcactaaaaaccccatgaaagccttgaaagtgggaaagctttcattagaaatttgcacctcatcatgccccagaaataatccttctgaagcaaagcaccacgaatgaggttaactttaacaagtactaaaaacttaagggacaccagaaaatttgtactgaagagaaagacatgcatatgattaaaaccctgtgtccaacagagaaacctgcagcagagataatggtgaaagtttaggcacattttcactaaaagtgggaacagaaaatggaggcctgttttttattgctaccaccatagatctggagatcttcgccagtaacaagaaaaattaagttgtaaatattggaaaggaacagacaaaaatagatgacatggtcatctacaactaatattaagactcctgtggtattgattgagcagagcagaagagatttcaaaaaaagacctatgcatttattagaatttggaatatgatacaagtggcatcaggaaatgaggaaataatggaactattttttttaagtggaggtagtttgttctccaagggggaaaaatagaccatgaactatacacaaaagtgaatccagagattaaaaacagaaatatggaaaagctatgtactaaaatgcatatgaccttgggaatagggaaacattccttggaacaatttgagaaatacttagcggttctacttatgagtatgaatgctcaggaaatacgcactaggatatttactgtggcttgatttgtagtagccaaaaattagaaacaactgagaaagcccatcacgaacaatatgggaaattcttatgtaatactatatatctgtaaaatgcaacaaatgaaatccacatgtattaacagaaagatcccagaattgttgaggggggatcaagttgcagaatgatacagatagtacaatgacttttttgtaaatttgaattaaaagtttcctcataaaactcagtactatctattggtaatggatgcatatatgtatgtacatgtacatgtttttgaaacggattggaaggatacagaccaaactcttgatagtggtcacctgtgaagagtggagaagggaaaataatgagtgtgggaggtgggatgggtattggttaaaggggacttcagctttttatataaacatccacttctctttcaaaagacttcaagtaaatataagaagatactgattgattctggattgtggtatagggatatcttgtcttattttttgtacttttctgtatttttaaaatttctcaaaataggaatgggagtgaggatgggaatgctgtatctgtggaagtcatgttatactggattcatttccaattaaatactaaacattttatagaaaatatttctaaaattttatcacggatgaatggatggacttgctctctatgtaatatgaaattaatctattttattaaaatttaaaaggacagc

SEQ ID NO: 1386 - protein, 292 aa, Homo sapiens
MSHLSQQKIYSGENPFACKVCGKVFSHKSNLTEHEHFHTREKPFECNECGKAFSQKQYVIKHQNTHTGEKLFECNECGKSFSQKENLLTHQKIHTGEKPFECKDCGKAFIQKSNLIRHQRTHTGEKPFVCKECGKTFSGKSNLTEHEKIHIGEKPFKCSECGTAFGQKKYLIKHQNIHTGEKPYECNECGKAFSQRTSLIVHVRIHSGDKPYECNVCGKAFSQSSSLTVHVRSHTGEKPYGCNECGKAFSQFSTLALHLRIHTGKKPYQCSECGKAFSQKSHHIRHQKIHTH

SEQ ID NO: 1387 - DNA, 1085 bp, Homo sapiens
atcctgtctgtccgaacccagacacaagtcttcactccttcctgcgagccctgaggaagccttctttccccagacatggccaacaagggtccttcctatggcatgagccgcgaagtgcagtccaaaatcgagaagaagtatgacgaggagctggaggagcggctggtggagtggatcatagtgcagtgtggccctgatgtgggccgcccagaccgtgggcccttgggcttccaggtgtggctgaagaatggcgtgattctgagcaagctggtgaacagcctgtaccctgatggctccaagccggtgaaggtgcccgagaacccaccctccatggtcttcaagcagatggagcaggtggctcagttcctgaaggcggctgaggactctggggtcatcaagactgacatgttccagactgttgacctctttgaaggcaaagacatggcagcagtgcagaggaccctgatggctttgggcagcttggcagtgaccaagaatgatgggcactaccgtggagatcccaactggtttatgaagaaagcgcaggagcataagagggaattcacagagagccagctgcaggagggaaagcatgtcattggccttcagatgggcagcaacagaggggcctcccaggccggcatgacaggctacggacgacctcggcagatcatcagttagagcggagagggctagccctgagcccggcgctcccccagctccttggctgcagccatcccgcttagcctgcctcacccacacccgtgtggtaccttcagccctggccaagctttgaggctctgtcactgagcaatggtaactgcacctgggcagctcctccctgtgcccccagcctcagcccaacttcttacccgaaagcatcactgccttggcccctccctcccggcggcccccatcacctctactgtctcctccctgggctaagcaggggagaagcgggctgggggtagcctggatgtgggcgaagtccactgtcctccttggcggcaaaagcccattgaagaagaaccagcccagcctgccccctatcttgtacctggaatatttttggggttggaactctc

SEQ ID NO: 1388 - protein, 201 aa, Homo sapiens
MANKGPSYGMSREVQSKIEKKYDEELEERLVEWIIVQCGPDVGRPDRGPLGFQVWLKNGVILSKLVNSLYPDGSKPVKVPENPPSMVFKQMEQVAQFLKAAEDSGVIKTDMFQTVDLFEGKDMAAVQRTLMALGSLAVTKNDGHYRGDPNWFMKKAQEHKREFTESQLQEGKHVIGLQMGSNRGASQAGMTGYGRPRQIIS

SEQ ID NO: 1389 - DNA, 2348 bp, Homo sapiens
tgaaccctgaagtcggtgtctgctgcgttcacggcaggattcggttaggaggaacagcacagcatgctgggctctggatttaaagctgagcgcttaagagtgaatttgagattagtcataaatcgccttaaactattggagaaaaagaaaacggaactggcccagaaagcaaggaaggagattgctgactatctggctgctgggaaagatgaacgagctcggatccgtgtggagcacattatccgggaagactacctcgtggaggccatggagatcctggagctgtactgtgacctgctgctggctcggtttggccttatccagtctatgaaggaactagattctggtctggctgaatctgtgtctacattgatctgggctgctcctcgactccagtcagaagtggctgagttgaaaatagttgctgatcagctctgtgccaagtatagcaaggaatatggcaagctatgtaggaccaaccagattggaactgtgaatgacaggctaatgcacaagctgagtgtggaagccccacccaaaatcctggtggagagatacctgattgaaattgcaaagaattacaacgtaccctatgaacctgactctgtggtcatggcagaagctcctcctggggtagagacagatcttattgatgttggattcacagatgatgtgaagaaaggaggccctggaagaggagggagtggtggcttcacagcaccagttggtggacctgatggaacggtgccaatgcccatgcccatgcccatgccatctgcaaatacgcctttctcatatccactgccaaagggaccatcagatttcaatggactgccaatggggacttatcaggcctttcccaatattcatccacctcagataccagcaactcccccatcgtatgaatctgtagatgacattaatgctgataagaatatctcttctgcacagattgttggtcctggacccaagccagaagcctctgcaaagcttccttccagacctgcagataactatgacaactttgtcctaccagagttgccatctgtgccagacacactaccaactgcatctgctggtgccagcacctcagcatctgaagacattgactttgatgatctttcccggaggtttgaagagctgaaaaagaaaacataggtctcttaaaccaggcaactttcacgttttgggagttgagactgagcaatttctccttgtaacaaagaatctccatgaaattctgtttcatctgttaaccgtcactcagcacaacactccctctgggctctcttcctgctcctccagattctgctgctttccagttctctgttgatcctgagactaacaattggagactgaggccagagcaactggctcctggcagctgtgcttgtccgcttcctgtcagagtgatcccaggtttcctcctggcccgtcccatggtccctccacaggagtgtgagaggatgggggaagcactgtgggaagaccaccaaagatggctggacagtgggagagagcacgttgtgaagcatcccagcctcgtgttgaggttccagacttagaaacagacccctctgtacagggggattgtggtgagtgagaatcaaggccaccttgtgtgttttctcactctcgaatgcaagtgggagagggaaaatgactcgggacgccattgtaacggttcctggaagctgggccctctcattggcatatacagtactcctcgctgcagggcactgtcccaccgggatccagttgcaaagtttgtcttgacagttgaaggcctcgcttagttgtactggattctcagggagccctctgtggccttttgctttgcgtgctgtttcccttgtaccagagggcggcaccgtggaaattctgttttccctgtagcatattgtgttggattgcattactggcagagaaaggacaaggtgccattcaagtcctagggtgggcttccagctgccttaatagaagtactcaagtcttttgggtagtgagctggaaagcctacaggaaaagaggggtacctgttttcatttgaaaactttgattcatggaacctttaaaactaatctcagaaaaatttttggtgcccatgcagctgtagttgttcactgctttcctggatggatgggactcttatgtcataacttctgttactcctttggcccatagctaaggtcatccttccccacaggggtggctttgggattggatgatacagcttttgcttctgtgtagtatacctgtacatacttgtttcaggcagcctttctttaatgttttcagttggtttgtattttgtagctcagtagctgctaataaagttaaagatcctg

SEQ ID NO: 1390 - protein, 364 aa, Homo sapiens
MLGSGFKAERLRVNLRLVINRLKLLEKKKTELAQKARKEIADYLAAGKDERARIRVEHIIREDYLVEAMEILELYCDLLLARFGLIQSMKELDSGLAESVSTLIWAAPRLQSEVAELKIVADQLCAKYSKEYGKLCRTNQIGTVNDRLMHKLSVEAPPKILVERYLIEIAKNYNVPYEPDSVVMAEAPPGVETDLIDVGFTDDVKKGGPGRGGSGGFTAPVGGPDGTVPMPMPMPMPSANTPFSYPLPKGPSDFNGLPMGTYQAFPNIHPPQIPATPPSYESVDDINADKNISSAQIVGPGPKPEASAKLPSRPADNYDNFVLPELPSVPDTLPTASAGASTSASEDIDFDDLSRRFEELKKKT

SEQ ID NO: 1391 - DNA, 5010 bp, Homo sapiens
gttatagttttgccgctggactcttccctcccttcccccaccccatcaggatgatatgagacttgaaagaagacgatgcatacaggaggagagacttcagcatgcaaaccttcatctgttcggcttgcaccgtcattttcattccatgctgctggccttcagatggctggacagatgccccattcacatcagtacagtgaccgtcgccagccaaacataagtgaccaacaggtttctgccttatcatattctgaccagattcagcaacctctaactaaccaggtgatgcctgatattgtcatgttacagaggcggatgccccaaaccttccgtgacccagcaactgctcccctgagaaaactttctgttgacttgatcaaaacatacaagcatattaatgaggtttactatgcaaaaaagaagcgaagacaccaacagggccagggagacgattctagtcataagaaggaacggaaggtttacaatgatggttatgatgatgataactatgattatattgtaaaaaacggagaaaagtggatggatcgttacgaaattgactccttgataggcaaaggttcctttggacaggttgtaaaggcatatgatcgtgtggagcaagaatgggttgccattaaaataataaagaacaagaaggcttttctgaatcaagcacagatagaagtgcgacttcttgagctcatgaacaaacatgacactgaaatgaaatactacatagtgcatttgaaacgccactttatgtttcgaaaccatctctgtttagtttttgaaatgctgtcctacaacctctatgacttgctgagaaacaccaatttccgaggggtctctttgaacctaacacgaaagtttgcgcaacagatgtgcactgcactgcttttccttgcgactccagaacttagtatcattcactgtgatctaaaacctgaaaatatccttctttgtaaccccaaacgcagtgcaatcaagatagttgactttggcagttcttgtcagttggggcagaggatataccagtatattcagagtcgcttttatcggtctccagaggtgctactgggaatgccttatgaccttgccattgatatgtggtccctcgggtgtattttggttgaaatgcacactggagaacctctgttcagtggtgccaatgaggtagatcagatgaataaaatagtggaagttctgggtattccacctgctcatattcttgaccaagcaccaaaagcaagaaagttctttgagaagttgccagatggcacttggaacttaaagaagaccaaagatggaaaacgggagtacaaaccaccaggaacccgtaaacttcataacattcttggagtggaaacaggaggacctggtgggcgacgtgctggggagtcaggtcatacggtcgctgactacttgaagttcaaagacctcattttaaggatgcttgattatgaccccaaaactcgaattcaaccttattatgctctgcagcacagtttcttcaagaaaacagctgatgaaggtacaaatacaagtaatagtgtatctacaagccccgccatggagcagtctcagtcttcgggcaccacctccagtacatcgtcaagctcaggtggctcatcggggacaagcaacagtgggagagcccggtcggatccgacgcaccagcatcggcacagtggtgggcacttcacagctgccgtgcaggccatggactgcgagacacacagtccccaggtgcgtcagcaatttcctgctcctcttggttggtcaggcactgaagctcctacacaggtcactgttgaaactcatcctgttcaagaaacaacctttcatgtagcccctcaacagaatgcattgcatcatcaccatggtaacagttcccatcaccatcaccaccaccaccaccatcaccaccaccatggacaacaagccttgggtaaccggaccaggccaagggtctacaattctccaacgaatagctcctctacccaagattctatggaggttggccacagtcaccactccatgacatccctgtcttcctcaacgacttcttcctcgacatcttcctcctctactggtaaccaaggcaatcaggcctaccagaatcgcccagtggctgctaataccttggactttggacagaatggagctatggacgttaatttgaccgtctactccaatccccgccaagagactggcatagctggacatccaacataccaattttctgctaatacaggtcctgcacattacatgactgaaggacatctgacaatgaggcaaggggctgatagagaagagtcccccatgacaggagtttgtgtgcaacagagtcctgtagctagctcgtgactacattgaaacttgagtttgtttcttgtgtgtttttatagaagtggtgttttttttccaaaaacaaagtgcaaagctgcttgaatcaggaggagattaacacactgaaccgctacaagagggcaaagctgattttttttttaacttgaaaagattgcaaagggacattgaagtgtttaaaagagccatgtccaaacccatcttcatggatagctcagaggtatcctctttttgctcccccattttaacttgccacatcccagtcacagtggggtttttttgtctttctattcagcaaaagttaatattcagatgttggtcttggtcatttgccaactaattttaaagtaaaaggcactgcacataatttgcataaagggccccatgagggtgttttttttttttctttttgtcccccccatccccctttttttttgttttgttctgttttgttttgggtgggagggtgggaaatttgggtttttaagtcctctaaacacacttgggcacggaaatgcagtactgtaaggaagagggacctccagcttccacaaacaccatcttcagctgtatgaaagggacggttgtggtgaagtttgtcaggcacagtaagcatgctgagtggcggggatcagaactctcctatctgaacctactgaggagcaaagcagcaattacatgggatcctgtggctctcccgttgcagaggccacaggaagataggatggaacgtgactggtctcctaaccaaggtgcactgagaagcaatcaacgggtcggtcgtggccagtcctggggaggtctgagtggtggtctttgggataacctttggccttatggatttggactcgaaattagaagagcctaccatttcagatgcaatcacttttggacatgcttttgcagacagtccttaatgctgaaaacacagagaatgggtaattcaagaggcctttcttttaaaatagacttttgtgacccactaattgtaaggtattgcaaggtcactttgcgtgtgtcataaagttgacttccttattggttgaaggtcacagaagtagtggtttgctttgatggaaatagctacagctgtgtcccttcctgctttttactttttcttttgctttttctcggcacgtggtatctccaccatttcttctgcacaaagatgtcttctgttcatcctgaacatttttaaaaaatgcagaattttatgtgactgcttttttgcctcacaattatgctgtgaattttacaaaaatttattttcttttttgataatttattgtaccaaagctgtttttatagcacatagatgtctgtaaccaataatgtagcagttctgcactttgacacaaggtgtaactagaccatttttaaatgtcagttgaaaattatggctgtactattgcttaaacaaaactggaactgttgttgaatccatagccaatacatttacagcaatctgtgtactgaacatagtagattgacatctaattcaagattacaacatctgttacattctaagtgtgttcaggcttctgaaggtaaagggacactggatccagaagctatggaaccagcagttgattcttgtattcctgattaacctacttgtaaacttgaaagcaagaccttgattgcaccaacaggtccagagtatgagtgcaagcaaagcagaactctcatgcgtgacctgagcagacaggctggtatttaacaggtgcctcgtgttgagattacgctgccttaatgtaacacagtctggcagttgctaaatttgtgttcccattttaaattgaccaattttggggtgtgacacttttgagcggttgaattgggagaatgaagataagtaatttacctgtccaggatcaaaagaagcctagaaaagaagcagtaatctacctctgccgataacctgtttaagatgactcagcagaacaccgcgtttcattctattggtcaattccatgtggctgactaggtcaattttttttctgaacaaaagcaggtttttatatgtaaacagtgagaaaagaaaggctaaacactatgtaaatgtgaatggaaacttggaaatactcgtttttataaactacaaaaactttttgttgtttatcaggaaatccatatttattttgtaattaactgtcaagcctgtggatgatttttttgaacttggtagttcataaaggtttacagtgaataaaaggatatcatcttgagtatagcaatatcaaaaggaattcagtagttactgctgtttaggaatataaggttaagatatcatatgggtcaggtcattttttttttctgtgctggttgccacatcttagcaagcaccaaaaaactaaagcagtttttaaaccgatatttacgtaaagaaaatcataaaatccaatgcttctgcatactgtgttatgttacagtccagttttgtgtgctttactacacagtttggttacaggacttctgtgcattgtaaacataaacagcatggaaaaggttaaatacctgtgttcagattgtaagatctagtccggacttgctgtgtatattgtaacgttaaatgaaaaaagaacccccctttgtattatagtcatgcggtcttatgtatgataaacagttgaataatttgtc

SEQ ID NO: 1392 - protein, 763 aa, Homo sapiens
MHTGGETSACKPSSVRLAPSFSFHAAGLQMAGQMPHSHQYSDRRQPNISDQQVSALSYSDQIQQPLTNQVMPDIVMLQRRMPQTFRDPATAPLRKLSVDLIKTYKHINEVYYAKKKRRHQQGQGDDSSHKKERKVYNDGYDDDNYDYIVKNGEKWMDRYEIDSLIGKGSFGQVVKAYDRVEQEWVAIKIIKNKKAFLNQAQIEVRLLELMNKHDTEMKYYIVHLKRHFMFRNHLCLVFEMLSYNLYDLLRNTNFRGVSLNLTRKFAQQMCTALLFLATPELSIIHCDLKPENILLCNPKRSAIKIVDFGSSCQLGQRIYQYIQSRFYRSPEVLLGMPYDLAIDMWSLGCILVEMHTGEPLFSGANEVDQMNKIVEVLGIPPAHILDQAPKARKFFEKLPDGTWNLKKTKDGKREYKPPGTRKLHNILGVETGGPGGRRAGESGHTVADYLKFKDLILRMLDYDPKTRIQPYYALQHSFFKKTADEGTNTSNSVSTSPAMEQSQSSGTTSSTSSSSGGSSGTSNSGRARSDPTHQHRHSGGHFTAAVQAMDCETHSPQVRQQFPAPLGWSGTEAPTQVTVETHPVQETTFHVAPQQNALHHHHGNSSHHHHHHHHHHHHHGQQALGNRTRPRVYNSPTNSSSTQDSMEVGHSHHSMTSLSSSTTSSSTSSSSTGNQGNQAYQNRPVAANTLDFGQNGAMDVNLTVYSNPRQETGIAGHPTYQFSANTGPAHYMTEGHLTMRQGADREESPMTGVCVQQSPVASS

SEQ ID NO: 1393 - DNA, 5315 bp, Homo sapiens
gggagcgcggcgcgggagcccgaggctgagactcaccggaggaagcggcgcgagcgccccgccatcgtcccggctgaagtgcagtggcacgatcataggtggtcactacagtctcagattcctgggcttaagcagtcttcccacctcagcctccccagtagctgggattacagtgttatagttttgccgctggactcttccctcccttcccccaccccatcaggatgatatgagacttgaaagaagacgatgcatacaggaggagagacttcagcatgcaaaccttcatctgttcggcttgcaccgtcattttcattccatgctgctggccttcagatggctggacagatgccccattcacatcagtacagtgaccgtcgccagccaaacataagtgaccaacaggtttctgccttatcatattctgaccagattcagcaacctctaactaaccaggtgatgcctgatattgtcatgttacagaggcggatgccccaaaccttccgtgacccagcaactgctcccctgagaaaactttctgttgacttgatcaaaacatacaagcatattaatgaggtttactatgcaaaaaagaagcgaagacaccaacagggccagggagacgattctagtcataagaaggaacggaaggtttacaatgatggttatgatgatgataactatgattatattgtaaaaaacggagaaaagtggatggatcgttacgaaattgactccttgataggcaaaggttcctttggacaggttgtaaaggcatatgatcgtgtggagcaagaatgggttgccattaaaataataaagaacaagaaggcttttctgaatcaagcacagatagaagtgcgacttcttgagctcatgaacaaacatgacactgaaatgaaatactacatagtgcatttgaaacgccactttatgtttcgaaaccatctctgtttagtttttgaaatgctgtcctacaacctctatgacttgctgagaaacaccaatttccgaggggtctctttgaacctaacacgaaagtttgcgcaacagatgtgcactgcactgcttttccttgcgactccagaacttagtatcattcactgtgatctaaaacctgaaaatatccttctttgtaaccccaaacgcagtgcaatcaagatagttgactttggcagttcttgtcagttggggcagaggatataccagtatattcagagtcgcttttatcggtctccagaggtgctactgggaatgccttatgaccttgccattgatatgtggtccctcgggtgtattttggttgaaatgcacactggagaacctctgttcagtggtgccaatgaggtagatcagatgaataaaatagtggaagttctgggtattccacctgctcatattcttgaccaagcaccaaaagcaagaaagttctttgagaagttgccagatggcacttggaacttaaagaagaccaaagatggaaaacgggagtacaaaccaccaggaacccgtaaacttcataacattcttggagtggaaacaggaggacctggtgggcgacgtgctggggagtcaggtcatacggtcgctgactacttgaagttcaaagacctcattttaaggatgcttgattatgaccccaaaactcgaattcaaccttattatgctctgcagcacagtttcttcaagaaaacagctgatgaaggtacaaatacaagtaatagtgtatctacaagccccgccatggagcagtctcagtcttcgggcaccacctccagtacatcgtcaagctcaggtggctcatcggggacaagcaacagtgggagagcccggtcggatccgacgcaccagcatcggcacagtggtgggcacttcacagctgccgtgcaggccatggactgcgagacacacagtccccaggtgagctcgcacgtggttcatttgcttgtgtcacctgccattctcaggtggagcagcactggatgccaggtgcctttagaatgaccgtatcatttaccctagaggttcatgacgttcctgtctaaggaaatgtgcgtcagcaatttcctgctcctcttggttggtcaggcactgaagctcctacacaggtcactgttgaaactcatcctgttcaagaaacaacctttcatgtagcccctcaacagaatgcattgcatcatcaccatggtaacagttcccatcaccatcaccaccaccaccaccatcaccaccaccatggacaacaagccttgggtaaccggaccaggccaagggtctacaattctccaacgaatagctcctctacccaagattctatggaggttggccacagtcaccactccatgacatccctgtcttcctcaacgacttcttcctcgacatcttcctcctctactggtaaccaaggcaatcaggcctaccagaatcgcccagtggctgctaataccttggactttggacagaatggagctatggacgttaatttgaccgtctactccaatccccgccaagagactggcatagctggacatccaacataccaattttctgctaatacaggtcctgcacattacatgactgaaggacatctgacaatgaggcaaggggctgatagagaagagtcccccatgacaggagtttgtgtgcaacagagtcctgtagctagctcgtgactacattgaaacttgagtttgtttcttgtgtgtttttatagaagtggtgttttttttccaaaaacaaagtgcaaagctgcttgaatcaggaggagattaacacactgaaccgctacaagagggcaaagctgattttttttttaacttgaaaagattgcaaagggacattgaagtgtttaaaagagccatgtccaaacccatcttcatggatagctcagaggtatcctctttttgctcccccattttaacttgccacatcccagtcacagtggggtttttttgtctttctattcagcaaaagttaatattcagatgttggtcttggtcatttgccaactaattttaaagtaaaaggcactgcacataatttgcataaagggccccatgagggtgttttttttttttctttttgtcccccccatccccctttttttttgttttgttctgttttgttttgggtgggagggtgggaaatttgggtttttaagtcctctaaacacacttgggcacggaaatgcagtactgtaaggaagagggacctccagcttccacaaacaccatcttcagctgtatgaaagggacggttgtggtgaagtttgtcaggcacagtaagcatgctgagtggcggggatcagaactctcctatctgaacctactgaggagcaaagcagcaattacatgggatcctgtggctctcccgttgcagaggccacaggaagataggatggaacgtgactggtctcctaaccaaggtgcactgagaagcaatcaacgggtcggtcgtggccagtcctggggaggtctgagtggtggtctttgggataacctttggccttatggatttggactcgaaattagaagagcctaccatttcagatgcaatcacttttggacatgcttttgcagacagtccttaatgctgaaaacacagagaatgggtaattcaagaggcctttcttttaaaatagacttttgtgacccactaattgtaaggtattgcaaggtcactttgcgtgtgtcataaagttgacttccttattggttgaaggtcacagaagtagtggtttgctttgatggaaatagctacagctgtgtcccttcctgctttttactttttcttttgctttttctcggcacgtggtatctccaccatttcttctgcacaaagatgtcttctgttcatcctgaacatttttaaaaaatgcagaattttatgtgactgcttttttgcctcacaattatgctgtgaattttacaaaaatttattttcttttttgataatttattgtaccaaagctgtttttatagcacatagatgtctgtaaccaataatgtagcagttctgcactttgacacaaggtgtaactagaccatttttaaatgtcagttgaaaattatggctgtactattgcttaaacaaaactggaactgttgttgaatccatagccaatacatttacagcaatctgtgtactgaacatagtagattgacatctaattcaagattacaacatctgttacattctaagtgtgttcaggcttctgaaggtaaagggacactggatccagaagctatggaaccagcagttgattcttgtattcctgattaacctacttgtaaacttgaaagcaagaccttgattgcaccaacaggtccagagtatgagtgcaagcaaagcagaactctcatgcgtgacctgagcagacaggctggtatttaacaggtgcctcgtgttgagattacgctgccttaatgtaacacagtctggcagttgctaaatttgtgttcccattttaaattgaccaattttggggtgtgacacttttgagcggttgaattgggagaatgaagataagtaatttacctgtccaggatcaaaagaagcctagaaaagaagcagtaatctacctctgccgataacctgtttaagatgactcagcagaacaccgcgtttcattctattggtcaattccatgtggctgactaggtcaattttttttctgaacaaaagcaggtttttatatgtaaacagtgagaaaagaaaggctaaacactatgtaaatgtgaatggaaacttggaaatactcgtttttataaactacaaaaactttttgttgtttatcaggaaatccatatttattttgtaattaactgtcaagcctgtggatgatttttttgaacttggtagttcataaaggtttacagtgaataaaaggatatcatcttgagtatagcaatatcaaaaggaattcagtagttactgctgtttaggaatataaggttaagatatcatatgggtcaggtcattttttttttctgtgctggttgccacatcttagcaagcaccaaaaaactaaagcagtttttaaaccgatatttacgtaaagaaaatcataaaatccaatgcttctgcatactgtgttatgttacagtccagttttgtgtgctttactacacagtttggttacaggacttctgtgcattgtaaacataaacagcatggaaaaggttaaatacctgtgttcagattgtaagatctagtccggacttgctgtgtatattgtaacgttaaatgaaaaaagaacccccctttgtattatagtcatgcggtcttatgtatgataaacagttgaataatttgtc

SEQ ID NO: 1394 - protein, 584 aa, Homo sapiens
MHTGGETSACKPSSVRLAPSFSFHAAGLQMAGQMPHSHQYSDRRQPNISDQQVSALSYSDQIQQPLTNQVMPDIVMLQRRMPQTFRDPATAPLRKLSVDLIKTYKHINEVYYAKKKRRHQQGQGDDSSHKKERKVYNDGYDDDNYDYIVKNGEKWMDRYEIDSLIGKGSFGQVVKAYDRVEQEWVAIKIIKNKKAFLNQAQIEVRLLELMNKHDTEMKYYIVHLKRHFMFRNHLCLVFEMLSYNLYDLLRNTNFRGVSLNLTRKFAQQMCTALLFLATPELSIIHCDLKPENILLCNPKRSAIKIVDFGSSCQLGQRIYQYIQSRFYRSPEVLLGMPYDLAIDMWSLGCILVEMHTGEPLFSGANEVDQMNKIVEVLGIPPAHILDQAPKARKFFEKLPDGTWNLKKTKDGKREYKPPGTRKLHNILGVETGGPGGRRAGESGHTVADYLKFKDLILRMLDYDPKTRIQPYYALQHSFFKKTADEGTNTSNSVSTSPAMEQSQSSGTTSSTSSSSGGSSGTSNSGRARSDPTHQHRHSGGHFTAAVQAMDCETHSPQVSSHVVHLLVSPAILRWSSTGCQVPLE

SEQ ID NO: 1395 - DNA, 6378 bp, Homo sapiens
aaaaataactcatattgtctctgaggttcttttccagtgaagtgtttagtattgctgctatttggagtacaaagttggagcttttaaagaacctgggagttcaaaagtataaggagaaataaatgaaaagcagaaatattttgaggcaataagtatagactcaaatctatattatgacccacttgtagcaccacttggaattctaccaataagagatttatttgggcaaactataatggttgttggaaattgcaaatcttagtgtgaattattttagtccagttggtttctttctttctcttacctgaaatgaactatactgaggcaataggagctttgtatagtaatttaggagtgtaaaacaacttagggaaaaggattattaagcaggatgattgggatgacatcatgtgaaatttaggaattggaggcattgggaattgagagggtgctaacaaaggaaaacagcttattttagaatttgtctggaggatgtagaattgaagaagttttggtatttcttctgcagcggccccagtgcccttgaccaggaacatctcttggagtcagtagttttcatgaggctgacctaggaacttggccaacatatgcaacattgttctatttaaaatattccttgaattaaattcgatagtatcaatttaaaacataaagttttcactcaactcctttagaagttagattttagcttgtacttgtctttacctcttctgctgattatcagttgacaacactgagattactttcattttcctgtaagtcattatgaatttttctggtcaaccatgagttatcagtggaagcaataagtaggaagtactgtaaaagaattacaataaaataagagaaaccacttggagagcaagagggcttgtggacttgggggagcggttgtgagaaatgtctcagaacttaatttacaaataacattggtagattgacatgttgtctttcctataaagtaactttacctctgtcttaatagtaaactactatgaaagtgaattcgtgttcctcttgatttgtgaactgatgaaaattacaaaatgtggagttttttccccagataaagtaaatggtggaatattcaggtttatttgatacctagaaaatacctgaaattttccgtggtaataggcacattttgaaactgttttttttttctctgacaattgaatatattttatatatagttgattttgattattgaagactaaggaaaacttaagtttgaatgttagaaaatgaattttgcaaatttgaagtaattttattctttatgttttgggattgtagttatgttagatattcctcagttggggtaattgtcttgcatcattatctcttatcataatctgtttttcttcacacagtgttatagttttgccgctggactcttccctcccttcccccaccccatcaggatgatatgagacttgaaagaagacgatgcatacaggaggagagacttcagcatgcaaaccttcatctgttcggcttgcaccgtcattttcattccatgctgctggccttcagatggctggacagatgccccattcacatcagtacagtgaccgtcgccagccaaacataagtgaccaacaggtttctgccttatcatattctgaccagattcagcaacctctaactaaccagaggcggatgccccaaaccttccgtgacccagcaactgctcccctgagaaaactttctgttgacttgatcaaaacatacaagcatattaatgaggtttactatgcaaaaaagaagcgaagacaccaacagggccagggagacgattctagtcataagaaggaacggaaggtttacaatgatggttatgatgatgataactatgattatattgtaaaaaacggagaaaagtggatggatcgttacgaaattgactccttgataggcaaaggttcctttggacaggttgtaaaggcatatgatcgtgtggagcaagaatgggttgccattaaaataataaagaacaagaaggcttttctgaatcaagcacagatagaagtgcgacttcttgagctcatgaacaaacatgacactgaaatgaaatactacatagtgcatttgaaacgccactttatgtttcgaaaccatctctgtttagtttttgaaatgctgtcctacaacctctatgacttgctgagaaacaccaatttccgaggggtctctttgaacctaacacgaaagtttgcgcaacagatgtgcactgcactgcttttccttgcgactccagaacttagtatcattcactgtgatctaaaacctgaaaatatccttctttgtaaccccaaacgcagtgcaatcaagatagttgactttggcagttcttgtcagttggggcagaggatataccagtatattcagagtcgcttttatcggtctccagaggtgctactgggaatgccttatgaccttgccattgatatgtggtccctcgggtgtattttggttgaaatgcacactggagaacctctgttcagtggtgccaatgaggtagatcagatgaataaaatagtggaagttctgggtattccacctgctcatattcttgaccaagcaccaaaagcaagaaagttctttgagaagttgccagatggcacttggaacttaaagaagaccaaagatggaaaacgggagtacaaaccaccaggaacccgtaaacttcataacattcttggagtggaaacaggaggacctggtgggcgacgtgctggggagtcaggtcatacggtcgctgactacttgaagttcaaagacctcattttaaggatgcttgattatgaccccaaaactcgaattcaaccttattatgctctgcagcacagtttcttcaagaaaacagctgatgaaggtacaaatacaagtaatagtgtatctacaagccccgccatggagcagtctcagtcttcgggcaccacctccagtacatcgtcaagctcaggtggctcatcggggacaagcaacagtgggagagcccggtcggatccgacgcaccagcatcggcacagtggtgggcacttcacagctgccgtgcaggccatggactgcgagacacacagtccccaggtgcgtcagcaatttcctgctcctcttggttggtcaggcactgaagctcctacacaggtcactgttgaaactcatcctgttcaagaaacaacctttcatgtagcccctcaacagaatgcattgcatcatcaccatggtaacagttcccatcaccatcaccaccaccaccaccatcaccaccaccatggacaacaagccttgggtaaccggaccaggccaagggtctacaattctccaacgaatagctcctctacccaagattctatggaggttggccacagtcaccactccatgacatccctgtcttcctcaacgacttcttcctcgacatcttcctcctctactggtaaccaaggcaatcaggcctaccagaatcgcccagtggctgctaataccttggactttggacagaatggagctatggacgttaatttgaccgtctactccaatccccgccaagagactggcatagctggacatccaacataccaattttctgctaatacaggtcctgcacattacatgactgaaggacatctgacaatgaggcaaggggctgatagagaagagtcccccatgacaggagtttgtgtgcaacagagtcctgtagctagctcgtgactacattgaaacttgagtttgtttcttgtgtgtttttatagaagtggtgttttttttccaaaaacaaagtgcaaagctgcttgaatcaggaggagattaacacactgaaccgctacaagagggcaaagctgattttttttttaacttgaaaagattgcaaagggacattgaagtgtttaaaagagccatgtccaaacccatcttcatggatagctcagaggtatcctctttttgctcccccattttaacttgccacatcccagtcacagtggggtttttttgtctttctattcagcaaaagttaatattcagatgttggtcttggtcatttgccaactaattttaaagtaaaaggcactgcacataatttgcataaagggccccatgagggtgttttttttttttctttttgtcccccccatccccctttttttttgttttgttctgttttgttttgggtgggagggtgggaaatttgggtttttaagtcctctaaacacacttgggcacggaaatgcagtactgtaaggaagagggacctccagcttccacaaacaccatcttcagctgtatgaaagggacggttgtggtgaagtttgtcaggcacagtaagcatgctgagtggcggggatcagaactctcctatctgaacctactgaggagcaaagcagcaattacatgggatcctgtggctctcccgttgcagaggccacaggaagataggatggaacgtgactggtctcctaaccaaggtgcactgagaagcaatcaacgggtcggtcgtggccagtcctggggaggtctgagtggtggtctttgggataacctttggccttatggatttggactcgaaattagaagagcctaccatttcagatgcaatcacttttggacatgcttttgcagacagtccttaatgctgaaaacacagagaatgggtaattcaagaggcctttcttttaaaatagacttttgtgacccactaattgtaaggtattgcaaggtcactttgcgtgtgtcataaagttgacttccttattggttgaaggtcacagaagtagtggtttgctttgatggaaatagctacagctgtgtcccttcctgctttttactttttcttttgctttttctcggcacgtggtatctccaccatttcttctgcacaaagatgtcttctgttcatcctgaacatttttaaaaaatgcagaattttatgtgactgcttttttgcctcacaattatgctgtgaattttacaaaaatttattttcttttttgataatttattgtaccaaagctgtttttatagcacatagatgtctgtaaccaataatgtagcagttctgcactttgacacaaggtgtaactagaccatttttaaatgtcagttgaaaattatggctgtactattgcttaaacaaaactggaactgttgttgaatccatagccaatacatttacagcaatctgtgtactgaacatagtagattgacatctaattcaagattacaacatctgttacattctaagtgtgttcaggcttctgaaggtaaagggacactggatccagaagctatggaaccagcagttgattcttgtattcctgattaacctacttgtaaacttgaaagcaagaccttgattgcaccaacaggtccagagtatgagtgcaagcaaagcagaactctcatgcgtgacctgagcagacaggctggtatttaacaggtgcctcgtgttgagattacgctgccttaatgtaacacagtctggcagttgctaaatttgtgttcccattttaaattgaccaattttggggtgtgacacttttgagcggttgaattgggagaatgaagataagtaatttacctgtccaggatcaaaagaagcctagaaaagaagcagtaatctacctctgccgataacctgtttaagatgactcagcagaacaccgcgtttcattctattggtcaattccatgtggctgactaggtcaattttttttctgaacaaaagcaggtttttatatgtaaacagtgagaaaagaaaggctaaacactatgtaaatgtgaatggaaacttggaaatactcgtttttataaactacaaaaactttttgttgtttatcaggaaatccatatttattttgtaattaactgtcaagcctgtggatgatttttttgaacttggtagttcataaaggtttacagtgaataaaaggatatcatcttgagtatagcaatatcaaaaggaattcagtagttactgctgtttaggaatataaggttaagatatcatatgggtcaggtcattttttttttctgtgctggttgccacatcttagcaagcaccaaaaaactaaagcagtttttaaaccgatatttacgtaaagaaaatcataaaatccaatgcttctgcatactgtgttatgttacagtccagttttgtgtgctttactacacagtttggttacaggacttctgtgcattgtaaacataaacagcatggaaaaggttaaatacctgtgttcagattgtaagatctagtccggacttgctgtgtatattgtaacgttaaatgaaaaaagaacccccctttgtattatagtcatgcggtcttatgtatgataaacagttgaataatttgtc

SEQ ID NO: 1396 - protein, 754 aa, Homo sapiens
MHTGGETSACKPSSVRLAPSFSFHAAGLQMAGQMPHSHQYSDRRQPNISDQQVSALSYSDQIQQPLTNQRRMPQTFRDPATAPLRKLSVDLIKTYKHINEVYYAKKKRRHQQGQGDDSSHKKERKVYNDGYDDDNYDYIVKNGEKWMDRYEIDSLIGKGSFGQVVKAYDRVEQEWVAIKIIKNKKAFLNQAQIEVRLLELMNKHDTEMKYYIVHLKRHFMFRNHLCLVFEMLSYNLYDLLRNTNFRGVSLNLTRKFAQQMCTALLFLATPELSIIHCDLKPENILLCNPKRSAIKIVDFGSSCQLGQRIYQYIQSRFYRSPEVLLGMPYDLAIDMWSLGCILVEMHTGEPLFSGANEVDQMNKIVEVLGIPPAHILDQAPKARKFFEKLPDGTWNLKKTKDGKREYKPPGTRKLHNILGVETGGPGGRRAGESGHTVADYLKFKDLILRMLDYDPKTRIQPYYALQHSFFKKTADEGTNTSNSVSTSPAMEQSQSSGTTSSTSSSSGGSSGTSNSGRARSDPTHQHRHSGGHFTAAVQAMDCETHSPQVRQQFPAPLGWSGTEAPTQVTVETHPVQETTFHVAPQQNALHHHHGNSSHHHHHHHHHHHHHGQQALGNRTRPRVYNSPTNSSSTQDSMEVGHSHHSMTSLSSSTTSSSTSSSSTGNQGNQAYQNRPVAANTLDFGQNGAMDVNLTVYSNPRQETGIAGHPTYQFSANTGPAHYMTEGHLTMRQGADREESPMTGVCVQQSPVASS

SEQ ID NO: 1397 - DNA, 2972 bp, Homo sapiens
ggcacgaggccactgctgtcctcttcagctcaagatggtggcctgccgggcgattggcatcctcagccgcttttctgccttcaggatcctccgctcccgaggttatatatgccgcaattttacagggtcttctgctttgctgaccagaacccatattaactatggagtcaaaggggatgtggcagttgttcgaattaactctcccaattcaaaggtaaatacactgagtaaagagctacattcagagttctcagaagttatgaatgaaatctgggctagtgatcaaatcagaagtgccgtccttatctcatcaaagccaggctgctttattgcaggtgctgatatcaacatgttagccgcttgcaagacccttcaagaagtaacacagctatcacaagaagcacagagaatagttgagaaacttgaaaagtccacaaagcctattgtggctgccatcaatggatcctgcctgggaggaggacttgaggttgccatttcatgccaatacagaatagcaacaaaagacagaaaaacagtattaggtacccctgaagttttgctgggggccttaccaggagcaggaggcacacaaaggctgcccaaaatggtgggtgtgcctgctgctttggacatgatgctgactggtagaagcattcgtgcagacagggcaaagaaaatgggactggttgaccaactggtggaacccctgggaccaggactaaaacctccagaggaacggacaatagaatacctagaagaagttgcaattacttttgccaaaggactagctgataagaagatctctccaaagagagacaagggattggtggaaaaattgacagcgtatgccatgactattccatttgtcaggcaacaggtttacaaaaaagtggaagaaaaagtgcgaaagcagactaaaggcctttatcctgcacctctgaaaataattgatgtggtaaagactggaattgagcaagggagtgatgccggttatctctgtgaatctcagaaatttggagagcttgtaatgaccaaagaatcaaaggccttgatgggactctaccatggtcaggtcctgtgcaagaagaataaatttggagctccacagaaggatgttaagcatctggctattcttggtgcagggctgatgggagcaggcatcgcccaagtctccgtggataaggggctaaagactatacttaaagatgccaccctcactgcgctagaccgaggacagcaacaagtgttcaaaggattgaatgacaaagtgaagaagaaagctctaacatcatttgaaagggattccatcttcagcaacttgactgggcagcttgattaccaaggttttgaaaaggccgacatggtgattgaagctgtgtttgaggaccttagtcttaagcacagagtgctaaaggaagtagaagcggtgattccagatcactgtatctttgccagtaacacatctgctctcccaatcagtgaaatcgctgctgtcagcaaaagacctgagaaggtgattggcatgcactacttctctcccgtggacaagatgcagctgctggagattatcacgaccgagaaaacttccaaagacaccagtgcttcagctgtagcagttggtctcaagcaggggaaggtcatcattgtggttaaggatggacctggcttctatactaccaggtgtcttgcgcccatgatgtctgaagtcatccgaatcctccaggaaggagttgacccgaagaagctggattccctgaccacaagctttggctttcctgtgggtgccgccacactggtggatgaagttggtgtggatgtagcgaaacatgtggcggaagatctgggcaaagtctttggggagcggtttggaggtggaaacccagaactgctgacacagatggtgtccaagggcttcctaggtcgtaaatctgggaagggcttttacatctatcaggagggtgtgaagaggaaggatttgaattctgacatggatagtattttagcgagtctgaagctgcctcctaagtctgaagtctcatcagacgaagacatccagttccgcctggtgacaagatttgtgaatgaggcagtcatgtgcctgcaagaggggatcttggccacacctgcagagggagacatcggagccgtctttgggcttggcttcccgccttgtctgggagggcctttccgctttgtggatctgtatggcgcccagaagatagtggaccggctcaagaaatatgaagctgcctatggaaaacagttcaccccatgccagctgctagctgaccatgctaacagccctaacaagaagttctaccagtgagcaggcctcatgcctcgctcagtcagtgcactaaccccagctgccggcagtgctggttctccaacagagtggtgtctagatttatcagagtaacgagaagacaaactccggcactgggtttgctccctgattaaagtgccttcagccaagaccatctctccctcctggtgaagtgtgacttcgaattagtttgcacttcctattggaaggtagagcccactgctcattgtataagccccgaggcctagagtggcagccaagagccatctgaagccacctctctgcctgttcctcccaagaggccagggtggccaggggtggtgagggcagttctgcacccagccaaacacataacaataaaaaccaaactctgtgtcagcatctttgcccttctggtttaaacgcctccttcaaaaagcaatctggaagaaagccctgtgctttgggggagtaagaatgtgtgtgcagaattctaggcagcaccttagggagggactgggatgagagaaagtgggacctggtgggctcaaccacacacacctgtctgtgcagatgctttgcccaggcttctcaccacggtgtaccgggatattaaacctctttccccagcaaaaaaaaaaaaaaaaaaaaaaaaaaaaaaaaaaaa

SEQ ID NO: 1398 - protein, 763 aa, Homo sapiens
MVACRAIGILSRFSAFRILRSRGYICRNFTGSSALLTRTHINYGVKGDVAVVRINSPNSKVNTLSKELHSEFSEVMNEIWASDQIRSAVLISSKPGCFIAGADINMLAACKTLQEVTQLSQEAQRIVEKLEKSTKPIVAAINGSCLGGGLEVAISCQYRIATKDRKTVLGTPEVLLGALPGAGGTQRLPKMVGVPAALDMMLTGRSIRADRAKKMGLVDQLVEPLGPGLKPPEERTIEYLEEVAITFAKGLADKKISPKRDKGLVEKLTAYAMTIPFVRQQVYKKVEEKVRKQTKGLYPAPLKIIDVVKTGIEQGSDAGYLCESQKFGELVMTKESKALMGLYHGQVLCKKNKFGAPQKDVKHLAILGAGLMGAGIAQVSVDKGLKTILKDATLTALDRGQQQVFKGLNDKVKKKALTSFERDSIFSNLTGQLDYQGFEKADMVIEAVFEDLSLKHRVLKEVEAVIPDHCIFASNTSALPISEIAAVSKRPEKVIGMHYFSPVDKMQLLEIITTEKTSKDTSASAVAVGLKQGKVIIVVKDGPGFYTTRCLAPMMSEVIRILQEGVDPKKLDSLTTSFGFPVGAATLVDEVGVDVAKHVAEDLGKVFGERFGGGNPELLTQMVSKGFLGRKSGKGFYIYQEGVKRKDLNSDMDSILASLKLPPKSEVSSDEDIQFRLVTRFVNEAVMCLQEGILATPAEGDIGAVFGLGFPPCLGGPFRFVDLYGAQKIVDRLKKYEAAYGKQFTPCQLLADHANSPNKKFYQ

SEQ ID NO: 1399 - DNA, 3229 bp, Homo sapiens
ggcacgaggcaacaacacggccctggtcgtcgtcgccgctgcggtaacggagcggtttgggtggcggagcctgcgttcgcgccttcccactcccctcgccaccgcccgagcccaggttatcctgaatacatgtctaacaattttccttgcaacgttagctgttgtttttcactgtttccaaaggatcaaaattgcttcagaaattggagacatatttgatttaaaaggaaaaacttgaacaaatggacaatatgtctattacgaatacaccaacaagtaatgatgcctgtctgagcattgtgcatagtttgatgtgccatagacaaggtggagagagtgaaacatttgcaaaaagagcaattgaaagtttggtaaagaagctgaaggagaaaaaagatgaattggattctttaataacagctataactacaaatggagctcatcctagtaaatgtgttaccatacagagaacattggatgggaggcttcaggtggctggtcggaaaggatttcctcatgtgatctatgcccgtctctggaggtggcctgatcttcacaaaaatgaactaaaacatgttaaatattgtcagtatgcgtttgacttaaaatgtgatagtgtctgtgtgaatccatatcactacgaacgagttgtatcacctggaattgatctctcaggattaacactgcagagtaatgctccatcaagtatgatggtgaaggatgaatatgtgcatgactttgagggacagccatcgttgtccactgaaggacattcaattcaaaccatccagcatccaccaagtaatcgtgcatcgacagagacatacagcaccccagctctgttagccccatctgagtctaatgctaccagcactgccaactttcccaacattcctgtggcttccacaagtcagcctgccagtatactggggggcagccatagtgaaggactgttgcagatagcatcagggcctcagccaggacagcagcagaatggatttactggtcagccagctacttaccatcataacagcactaccacctggactggaagtaggactgcaccatacacacctaatttgcctcaccaccaaaacggccatcttcagcaccacccgcctatgccgccccatcccggacattactggcctgttcacaatgagcttgcattccagcctcccatttccaatcatcctgctcctgagtattggtgttccattgcttactttgaaatggatgttcaggtaggagagacatttaaggttccttcaagctgccctattgttactgttgatggatacgtggacccttctggaggagatcgcttttgtttgggtcaactctccaatgtccacaggacagaagccattgagagagcaaggttgcacataggcaaaggtgtgcagttggaatgtaaaggtgaaggtgatgtttgggtcaggtgccttagtgaccacgcggtctttgtacagagttactacttagacagagaagctgggcgtgcacctggagatgctgttcataagatctacccaagtgcatatataaaggtctttgatttgcgtcagtgtcatcgacagatgcagcagcaggcggctactgcacaagctgcagcagctgcccaggcagcagccgtggcaggaaacatccctggcccaggatcagtaggtggaatagctccagctatcagtctgtcagctgctgctggaattggtgttgatgaccttcgtcgcttatgcatactcaggatgagttttgtgaaaggctggggaccggattacccaagacagagcatcaaagaaacaccttgctggattgaaattcacttacaccgggccctccagctcctagacgaagtacttcataccatgccgattgcagacccacaacctttagactgaggtcttttaccgttggggcccttaaccttatcaggatggtggactacaaaatacaatcctgtttataatctgaagatatatttcacttttgttctgctttatcttttcataaagggttgaaaatgtgtttgctgccttgctcctagcagacagaaactggattaaaacaattttttttttcctcttcagaacttgtcaggcatggctcagagcttgaagattaggagaaacacattcttattaattcttcacctgttatgtatgaaggaatcattccagtgctagaaaatttagccctttaaaacgtcttagagccttttatctgcagaacatcgatatgtatatcattctacagaataatccagtattgctgattttaaaggcagagaagttctcaaagttaattcacctatgttattttgtgtacaagttgttattgttgaacatacttcaaaaataatgtgccatgtgggtgagttaattttaccaagagtaactttactctgtgtttaaaaagtaagttaataatgtattgtaatctttcatccaaaatattttttgcaagttatattagtgaagatggtttcaattcagattgtcttgcaacttcagttttatttttgccaaggcaaaaaactcttaatctgtgtgtatattgagaatcccttaaaattaccagacaaaaaaatttaaaattacgtttgttattcctagtggatgactgttgatgaagtatacttttcccctgttaaacagtagttgtattcttctgtatttctaggcacaaggttggttgctaagaagcctataagaggaatttcttttccttcattcatagggaaaggttttgtattttttaaaacactaaaagcagcgtcactctacctaatgtctcactgttctgcaaaggtggcaatgcttaaactaaataatgaataaactgaatattttggaaactgctaaattctatgttaaatactgtgcagaataatggaaacattacagttcataataggtagtttggatatttttgtacttgatttgatgtgactttttttggtataatgtttaaatcatgtatgttatgatattgtttaaaattcagtttttgtatcttggggcaagactgcaaacttttttatatcttttggttattctaagccctttgccatcaatgatcatatcaattggcagtgactttgtatagagaatttaagtagaaaagttgcagatgtattgactgtaccacagacacaatatgtatgctttttacctagctggtagcataaataaaactgaatctcaacataaaaaaaaaaaaaaaaaaa

SEQ ID NO: 1400 - protein, 552 aa, Homo sapiens
MDNMSITNTPTSNDACLSIVHSLMCHRQGGESETFAKRAIESLVKKLKEKKDELDSLITAITTNGAHPSKCVTIQRTLDGRLQVAGRKGFPHVIYARLWRWPDLHKNELKHVKYCQYAFDLKCDSVCVNPYHYERVVSPGIDLSGLTLQSNAPSSMMVKDEYVHDFEGQPSLSTEGHSIQTIQHPPSNRASTETYSTPALLAPSESNATSTANFPNIPVASTSQPASILGGSHSEGLLQIASGPQPGQQQNGFTGQPATYHHNSTTTWTGSRTAPYTPNLPHHQNGHLQHHPPMPPHPGHYWPVHNELAFQPPISNHPAPEYWCSIAYFEMDVQVGETFKVPSSCPIVTVDGYVDPSGGDRFCLGQLSNVHRTEAIERARLHIGKGVQLECKGEGDVWVRCLSDHAVFVQSYYLDREAGRAPGDAVHKIYPSAYIKVFDLRQCHRQMQQQAATAQAAAAAQAAAVAGNIPGPGSVGGIAPAISLSAAAGIGVDDLRRLCILRMSFVKGWGPDYPRQSIKETPCWIEIHLHRALQLLDEVLHTMPIADPQPLD

SEQ ID NO: 1401 - DNA, 3839 bp, Homo sapiens
acgcggggataagtattgacattacacagtgttaacaatgcatccacagagcttggctgaagaggaaataaaaacagaacaggaggtggtagagggcatggatatctctactcgctccaaagatcctggctctgcagagagaacagcccagaaaagaaagttccccagccctccacattcttccaatggccactcgccgcaggacacatcaacaagccccattaaaaagaaaaagaaacctggcttactgaacagtaacaataaggagcagtcagaactaagacatggtccgttttactatatgaagcagccactcaccacagaccctgttgatgttgtaccgcaggatggacggaatgatttctactgctgggtttgtcaccgggaaggccaagtcctttgctgtgagctctgtccccgggtttatcacgctaagtgtctgagactgacatcggaaccagagggggactggtttgtcctgaatgtgagaaaattacagtagcagaatgcatcgagacccagagtaaagccatgacaatgctcaccattgaacagttatcctacctgctcaagtttgccattcagaaaatgaaacagccagggacagatgcattccagaagcccgttccattggaacagcaccctgactatgcggaatacatcttccatccaatggacctttgtacattggaaaagaatgcgaaaaagaaaatgtatggctgcacagaagccttcctggctgatgcaaagtggattttgcacaactgcatcatttataatgggggaaatcacaaattgacgcaaatagcgaaagtagtcatcaaaatctgtgaacatgagatgaatgaaatcgaagtatgtccagaatgttatctagctgcttgccaaaaacgagataactggttttgtgagccttgtagcaatccacatcctttggtctgggccaaactgaaggggtttccattctggcctgcaaaagctctaagggataaagacgggcaggtcgatgcccgattctttggacaacatgacagggcctgggttccaataaataattgctacctcatgtctaaagaaattcctttttctgtgaaaaagactaagagcatcttcaacagtgccatgcaagagatggaggtttacgtggagaacatccgcaggaagtttggggtttttaattactctccatttaggacaccctacacacccaacagccagtatcaaatgctgctcgatcccaccaaccccagcgccggcactgccaaggtagacaagcaggagaaggtcaagctcaactttgacatgacggcatcccccaagatcctgatgagcaagcctgtgctgagtgggggcacaggccgccggatttccttgtcggatatgccgcgctcccccatgagcacaaactcttctgtgcacacgggctccgacgtggagcaggatgctgagaagaaggccacgtcgagccacttcagtgcgagcgaggagtccatggacttcctggataagagcacagcttcaccagcctccaccaagacgggacaagcagggagtttatccggcagcccaaagcccttctctcctcaactgtcagctcctatcacgacgaaaacggacaaaacctccaccaccggcagcatcctgaatcttaacctggatcgaagcaaagctgagatggatttgaaggagctgagcgagtcggtccagcaacagtccacccctgttcctctcatctctcccaagcgccagattcgtagcaggttccagctgaatcttgacaagaccatagagagttgcaaagcacaattaggcataaatgaaatctcggaagatgtctatacggccgtagagcacagcgattcggaggattctgagaagtcagatagtagcgatagtgagtatatcagtgatgatgagcagaagtctaagaacgagccagaagacacagaggacaaagaaggttgtcagatggacaaagagccatctgctgttaaaaaaaagcccaagcctacaaacccagtggagattaaagaggagctgaaaagcacgtcaccagccagcgagaaggcagaccctggagcagtcaaggacaaggccagccctgagcctgagaaggacttttccgaaaaggcaaaaccttcacctcaccccataaaggataaactgaagggaaaagatgagacggattccccaacagtccatttgggcctggactctgattcagagagcgaacttgtcatagatttaggagaagaccattctgggcgggagggtcgaaaaaataagaaggaacccaaagaaccatctcccaaacaggatgttgtaggtaaaactccaccatccacgacggtgggcagccattctcccccggaaacaccggtgctcacccgctcttccgcccaaacttccgcggctggcgccacagccaccaccagcacgtcctccacggtcaccgtcacggccccggcccccgccgccacaggaagcccagtgaaaaagcagaggccgcttttaccgaaggagactgccccggccgtgcagcgggtcgtgtggaactcatcaactgtccagcagaaggagatcacacagagcccatccacgtccaccatcaccctggtgaccagcacacagtcatcggccctggtcaccagctcggggtccatgagcacccttgtgtcctcagtcaacgctgacctgcccatcgccactgcctcagctgatgtcgccgctgatattgccaagtacactagcaaaatgatggatgcaataaaaggaacaatgacagaaatatacaacgatctttctaaaaacactactggaagcacaatagctgagattcgcaggctgaggatcgagatagagaagctccagtggctgcaccagcaagagctctccgaaatgaaacacaacttagagctgaccatggcggagatgcggcagagcctggagcaggagcgggaccggctcatcgccgaggtgaagaagcagctggagttggagaagcagcaggcggtggatgagaccaagaagaagcagtggtgcgccaactgcaagaaggaggccatcttttactgctgttggaacactagctactgtgactacccctgccagcaagcccactggcctgagcacatgaagtcctgcacccagtcagctactgctcctcagcaggaagcggatgctgaggtgaacacagaaacactaaataagtcctcccaggggagctcctcgagcacacaatcagcaccttcagaaacggccagcgcctccaaagagaaggagacgtcagctgagaaaagcaaggagagtggctcgacccttgacctttctggctccagagagacgccctcctccattctcttaggctccaaccaaggctctgaccattcccggagtaataaatccagttggagcagcagtgatgagaagaggggatcgacacgttccgatcacaacaccagtaccagcacgaagagcctcctcccgaaagagtctcggctggacaccttctgggactagcagtgaatcgggacacaaaccacccaccccattgggagaaaaacccagacgccaggaaaagaagaaacaacaaaggcaggagaacagccactttcagacttgaaaatgacaaaaccctcagttgagcctgagcccccggcgcgggggctgctacactacaggacacccagcatcggctttgactgcagactgttcacccacacgagccctgtgcttttggtgtaaataatgtacaatttgtggatgtcattgaatctagaggactttcccctttttatatttgtattaactttaacttattaaaaaaaaaaaaaaaaaaa

SEQ ID NO: 1402 - protein, 614 aa, Homo sapiens
MDLKELSESVQQQSTPVPLISPKRQIRSRFQLNLDKTIESCKAQLGINEISEDVYTAVEHSDSEDSEKSDSSDSEYISDDEQKSKNEPEDTEDKEGCQMDKEPSAVKKKPKPTNPVEIKEELKSTSPASEKADPGAVKDKASPEPEKDFSEKAKPSPHPIKDKLKGKDETDSPTVHLGLDSDSESELVIDLGEDHSGREGRKNKKEPKEPSPKQDVVGKTPPSTTVGSHSPPETPVLTRSSAQTSAAGATATTSTSSTVTVTAPAPAATGSPVKKQRPLLPKETAPAVQRVVWNSSSVQQKEITQSPSTSTITLVTSTQSSPLVTSSGSMSTLVSSVNADLPIATASADVAADIAKYTSKMMDAIKGTMTEIYNDLSKNTTGSTIAEIRRLRIEIEKLQWLHQQELSEMKHNLELTMAEMRQSLEQERDRLIAEVKKQLELEKQQAVDETKKKQWCANCKKEAIFYCCWNTSYCDYPCQQAHWPEHMKSCTQSATAPQQEADAEVNTETLNKSSQGSSSSTQSAPSETASASKEKETSAEKSKESGSTLDLSGSRETPSSILLGSNQGSDHSRSNKSSWSSSDEKRGSTRSDHNTSTSTKSLLPKESRLDTFWD

SEQ ID NO: 1403 - DNA, 2428 bp, Homo sapiens
cagacgcgcgggcgggaagatggcggctgggttcaaaaccgtggaacctctggagtattacaggagatttctgaaagagaactgccgtcctgatggaagagaacttggtgaattcagaaccacaactgtcaacatcggttcaattagtaccgcagatggttctgctttagtgaagttgggaaatactacagtaatctgtggagttaaagcagtaagtctaaatatgtcctattgagatttgagttacaaagttagctttatttattagattgtaatatacacctgtaattctactcttgatttggtagttgggtgtcaatttttaatgtttaatttcccaagagctttcactatgagtgttagataatatgacccaagtttaatgactaagtgaacaattgtcaaatgtagcaaaatgaaacaacttttaaaatctgagtcaccattttaaaaaaattgttatatcatttgagacattaacagatttttggtgacatccttttagccagtgatgacatgtaatctgtgtaaatgtgtagaaaattgaaattgttgaaaagaaaaatttgagggaatactggctaccatttactgagtacttgctatgttccagacacctttttaggtgctttacagaattatccactttaatgcctataacaatcatttgttacttgtcttcacctcctgttttacagatgactttcagtaacctgtccaggtacataagactcataagtaaaacttagacataaatctgactccaaagcctgtgcttctttgactacagtctaccctgtgttatttaacctcagttgagattcttctttcgtaaacctggagtgatgtataacagtaagatttgagaacttgctccttgtcaggttttatgcctgggatttaacaggtctatctcatttggcccttattaacagtccctaggagtagacactattttcttcccatttgacaagatgaggagtttaaggtaagaggttaaataacttgcctgaagtctctcagccagtaagtatggctctgacatttgaactggcttagtaattgcagagcatttgcttttttttttttttgagacggagtcttgctctgtcgcccaggctggagtgcagtggcacgatgtcagctcactgcaacttccgtctcctgggttgaagtgattctcctgcctcggcctcccaagtagctgggattacaggcgcccgccaccatgcctggctaatttttgtatttttagtagagacggggttttgccatcttggccaggctggtctcaaactcctgacctcaggtgatccgcccgcctctgtgtcccaaagtgctgggattaccggtgtgagccaccgcgcccagctgagcttttgctctttaccactaaagcagcagttcctaaatcttgctctatcatctggagaacaaattaagattcttggctagtagttgggggcacaaacccagttactattttttaaaagatctccaggtaatcttgccgagcagcactgtagtgtagtccactgtactgtagtgccttcttatcttgtagagctattgtgaggatcagcaccaatgtccgtagaggccctgacacaattccctaagctgatatttgatagagccttccataactgattgctaaattgtcttcataatttttcagtagcttctttcaataggaaacatttctttgctactataggaatttgcagcaccatcaacagatgcccctgataaaggatacgttgattccggtctggacctcctggagaagaggcccaagtggctagccagttcattgcagatgtcattgaaaattcacagataattcagaaagaggacttatgcatttctccaggaaagcttgtctgggttctatactgtgatctcatttgcctcgactacgatggaaacattttggatgcctgcacatttgctttgctagcggctttaaaaaatgtacagttgcctgaagttactataaatgaagaaactgctttagcagaagttaatttaaagaagaaaagttatttgaatattagaactcatccagttgcaacttcctttgctgtgtttgatgacactttgcttatagttgaccctactggagaggaggaacatctggcaacaggaaccttaacgatagtaatggatgaggaaggcaaactctgttgtcttcacaaaccaggtggaagtgggctaactggagctaaacttcaggactgtatgagccgagcagttacaagacacaaagaagttaaaaaactgatggatgaagtaattaagagtatgaaacccaaataaacagccaccacattttcaaaacagatttgtaaaaattgtatttgttaacactgtgcacaaacgttttatactaaataaatatcaaactacattcttctgaaaaaaaaaa

SEQ ID NO: 1404 - DNA, 1119 bp, Homo sapiens
ggcacgaggcctgggcggctccgctagctgtttttcgtcttccctaggctatttctgccgggcgctccgcgaagatgcagctcaagccgatggagatcaaccccgagatgctgaacaaagtgctgtcccggctgggggtcgccggccagtggcgcttcgtggacgtgctggggctggaagaggagtctctgggctcggtgccagcgcctgcctgcgcgctgctgctgctgtttcccctcacggcccagcatgagaacttcaggaaaaagcagattgaagagctgaagggacaagaagttagtcctaaagtgtacttcatgaagcagaccattgggaattcctgtggcacaatcggacttattcacgcagtggccaataatcaagacaaactgggatttgaggatggatcagttctgaaacagtttctttctgaaacagagaaaatgtcccctgaagacagagcaaaatgctttgaaaagaatgaggccatacaggcagcccatgatgccgtggcacaggaaggccaatgtcgggtagatgacaaggtgaatttccattttattctgtttaacaacgtggatggccacctctatgaacttgatggacgaatgccttttccggtgaaccatggcgccagttcagaggacaccctgctgaaggacgctgccaaggtctgcagagaattcaccgagcgtgagcaaggagaagtccgcttctctgccgtggctctctgcaaggcagcctaatgctctgtgggagggactttgctgatttcccctcttcccttcaacatgaaaatatatacccccccatgcagtctaaaatgcttcagtacttgtgaaacacagctgttcttctgttctgcagacacgccttcccctcagccacacccaggcacttaagcacaagcagagtgcacagctgtccactgggccattgtggtgtgagcttcagatggtgaagcattctccccagtgtatgtcttgtatccgatatctaacgctttaaatggctactttggtttctgtctgtaagttaagaccttggatgtggtttaattgtttgtcctcaaaaggaataaaacttttctgctgataagataaaaaaaaaaaaaaaaaa

SEQ ID NO: 1405 - protein, 212 aa, Homo sapiens
MLNKVLSRLGVAGQWRFVDVLGLEEESLGSVPAPACALLLLFPLTAQHENFRKKQIEELKGQEVSPKVYFMKQTIGNSCGTIGLIHAVANNQDKLGFEDGSVLKQFLSETEKMSPEDRAKCFEKNEAIQAAHDAVAQEGQCRVDDKVNFHFILFNNVDGHLYELDGRMPFPVNHGASSEDTLLKDAAKVCREFTEREQGEVRFSAVALCKAA

SEQ ID NO: 1406 - DNA, 2167 bp, Homo sapiens
ggcacgaggccgttgccgccgccgccgctgccgccgtgctctcgctttgcccgccgccgcctaaggggggctggggccggggccagccatcactgccgttgccgggatgccgcgggtgtacatcggccgcctgagctaccaggcccgggagcgcgatgtggagcgcttctttaagggctacgggaagatcctggaggtggatctgaagaacggatatggttttgtggagtttgatgatctgcgtgatgcagatgatgctgtttatgaactgaatggcaaagacctttgtggtgagcgagtaattgttgagcatgcccgcggcccacggcgagatggcagttacggttctggacgcagtggatatggttatagaagaagtggccgagataaatatggccctcctactcgcacagagtacagacttattgtggagaatttgtcaagtcggtgcagctggcaagacctaaaggattatatgcgtcaggcaggagaagtgacttatgcagatgctcacaagggacgcaaaaatgaaggggtgattgaatttgtatcttattctgatatgaaaagagctttggaaaagttggatggaactgaagtcaatgggagaaaaatcagattagttgaagacaagccaggttccagacgacgccggtcctactccagaagccggagtcattcaaggtctcgctctcgaagcagacattcccgtaagagcagaagccgaagtggcagcagcaaaagcagtcattctaagagtagatctcggtccaggtcgggctcccgctcccggagcaagagccggagccggagccagagtcggagccggagcaagaaagagaaaagcaggagccccagcaaggaaaagagccgcagccgcagccatagcgctggcaagagccgcagcaagagcaaagaccaagctgaagagaagatccaaaacaatgacaatgtcgggaaacccaagagccggagtcctagcaggcataaaagtaagagcaaaagtcggagcaggagtcaggagaggagagtggaggaggagaagcgagggagtgtgagcaggggcaggagccaggagaagagcctccgccagagtcggagccggagcaggagcaaagggggcagcaggagccggagcaggagccgcagcaagagcaaggacaagaggaagggcaggaagagaagcagagaggagagccgcagtcgcagtcgcagccgcagcaagagtgagaggagcagaaagcgaggcagcaagcgagacagcaaggcgggcagcagcaagaagaagaagaaggaagacactgaccgctcccagtccagatctccatcccgctccgtgtcaaaggagcgggaacatgccaagtctgaatccagccagagggaaggtcgaggagagagtgagaatgctggcaccaatcaggagacccggtccaggtcgagatccaattccaaatcgaaaccaaaccttccatcagaatcacgctccagatcaaagtcagcttcaaaaacccgatctcggtccaagtctagatccaggtctgcttccagatcgccctcccgatctagatctaggtcccactcaaggtcctaactggctatggccacagctggaactacccgagaagtcttttgtacatgtttggtagccgtagcacaagtgattggagtagaacatgtcactgctgtacatttttaactcccctaatggtgtgtctataattgttaaatctaagtgcttcctctcagtaaagcctcctggcaccaggccttcctgctcgactgaaaaaaattttctctttgaaaatccccttttactcatggcccacagtagaatatccaaaacgccttggctttcaggcctggcctttcctacagggagctcagtaacctggacggctctaaggctggaatgaccacataggtaggtatggtgagttcaaccatttttgctcttgaattgatgcccttcgatgtatgccatttagtgaaagtgctaagtcttaagtttcctaccactttggtttcatatttttggacttaacaaagttgtgaatagcacagtcgaggaaaattgatacctgcagtaacccataggaaataaactgtagagttccatattctggtattgtgattatattgttttatattaaaaaaaaaaaaaaaaaaa

SEQ ID NO: 1407 - protein, 494 aa, Homo sapiens
MPRVYIGRLSYQARERDVERFFKGYGKILEVDLKNGYGFVEFDDLRDADDAVYELNGKDLCGERVIVEHARGPRRDGSYGSGRSGYGYRRSGRDKYGPPTRTEYRLIVENLSSRCSWQDLKDYMRQAGEVTYADAHKGRKNEGVIEFVSYSDMKRALEKLDGTEVNGRKIRLVEDKPGSRRRRSYSRSRSHSRSRSRSRHSRKSRSRSGSSKSSHSKSRSRSRSGSRSRSKSRSRSQSRSRSKKEKSRSPSKEKSRSRSHSAGKSRSKSKDQAEEKIQNNDNVGKPKSRSPSRHKSKSKSRSRSQERRVEEEKRGSVSRGRSQEKSLRQSRSRSRSKGGSRSRSRSRSKSKDKRKGRKRSREESRSRSRSRSKSERSRKRGSKRDSKAGSSKKKKKEDTDRSQSRSPSRSVSKEREHAKSESSQREGRGESENAGTNQETRSRSRSNSKSKPNLPSESRSRSKSASKTRSRSKSRSRSASRSPSRSRSRSHSRS

SEQ ID NO: 1408 - DNA, 1126 bp, Homo sapiens
gttctgcggtgctggtatttagagcgcagcggctgacgggccggatcgccttcgccgccgcccgcccgcaaaccttcgtgcccggcccgtcctcgcccccgcctccgccaccgcctcggcccgcagagcttgccccctccccacccgcagacatgtccgagtccaagagcggccccgagtatgcttcgtttttcgccgtcatgggcgcctcggccgccatggtcttcagcgccctgggcgctgcctatggcacagccaagagcggtaccggcattgcggccatgtctgtcatgcggccggagcagatcatgaagtccatcatcccagtggtcatggctggcatcatcgccatctacggcctggtggtggcagtcctcatcgccaactccctgaatgacgacatcagcctctacaagagcttcctccagctgggcgccggcctgagcgtgggcctgagcggcctggcagccggctttgccatcggcatcgtgggggacgctggcgtgcggggcaccgcccagcagccccgactattcgtgggcatgatcctgattctcatcttcgccgaggtgctcggcctctacggtctcatcgtcgccctcatcctctccacaaagtagaccctctccgagcccaccagccacagaatattatgtaaagaccacccctcctcattccagaacgaacagcctgacacatacgcacggggccgccgcccccagtagttggtcttgtacatgcgcagtgtcctagtgcccatcgtctgtttccccggccttgcccccgcccgccccgtgccgtggacatctgggcccactcatcgcccctccaggcccccggcgccccaccccctagagtgctctgtgtatgcggatgatttagaattgtcatttctctttactggatgtttatttataaagatctggcctgttcctgcgtctgcggagcggcccttgtctcccagctatctataaccttagctagagtgtcgccttgtgggttcctgttgctgagacttcctggatggagccgccctcaccgccgggcccgtggccctgcgcggagctgtgtccaataaagttcttggatgtgaaaaaaaaaaaaaaaaaaaaaaaaaaaaaaaaaa

SEQ ID NO: 1409 - protein, 155 aa, Homo sapiens
MSESKSGPEYASFFAVMGASAAMVFSALGAAYGTAKSGTGIAAMSVMRPEQIMKSIIPVVMAGIIAIYGLVVAVLIANSLNDDISLYKSFLQLGAGLSVGLSGLAAGFAIGIVGDAGVRGTAQQPRLFVGMILILIFAEVLGLYGLIVALILSTK

SEQ ID NO: 1410 - DNA, 5423 bp, Homo sapiens
gttatatggatgtatgcacttttttttgttgtttttttggatgcatgtcatcttgaatttcagggaaggtttaagtgttcttctgtttcttactgccatcaacctgaattccagaagatccagaatatctcccatttagtaagggtatttcttcatcccaacccaattctggcagctgcagtatttaacttgtcccacgatttttatccatttctctatcctcatcaaggaaagcctatatgccaccagcttaagactggtctggaagacaatgaaagtccctgacagttttcacagtgttttgttgcccctgaaaaggagatgggaaattttgagattactacagctaccttctcaagttccaggtctcacctgtgggcagggctgctcatctcttctataatagccctgggatcctgcctcaaggactctacacccagaggccctcttggcagctttggcagcctgcctgctctgcagtccccaccaccacagcaaggagttaggatcagtttcagggtcccttctttctctctggatttttttttttttctgcaagcagctaatgatgatctggtcagcccttcctgtaaaccagttgcacctgtgctctgttgtgcaacaatgccttcacatctttagtgtgagggtgctgctctcccctggtttccaactctgggaggtaccttttcattactatattcctttaggcacttcaactgggagttggatatggggctattgtcatacctcatggttttaaatttcatttcagaccagaaatctgtcctctgatgcctgttcaggaattcaggttgacagttttgtccccagtctcctttaaccagtctaagagctgtgttcctacctaccctgattcccaaagcaagttgttcatttatatattccaggggtacaggaaagcaatagcggcaaggagtctgcaactgcttcttctctttctctcccccgcagagagtccggagggctgtgctaccccaagaagaggaaggatcagggggtgggcaactggtaactgaagtcaccaagaaagaaggtaatgaacacctgccttttcaccccctctgccatactccagaaaggaagggcccacagttggctcaccctggctactcttatcagtgcagtctctttatctgttagagactcaagggctggactgagaaaaggcaaatcaagtactctgcactctgccaggggttgtgggggcagagagaagagctagaggcatcgtcctgggcttgagaactgtcaactccatgatgagaagctggttcttgccctgtctatatgactgtgtggcctcctagccttggtttcctcatcccatattatgggataatagcctgtggggctaaacatcagggctcttgtaggaggaagtcggggagggacatgtgaatgctttgtgtagttgacagtgtccatgacataacaacttcctctccaactcgatcagcaaacaaacactgaaccctcgtccgccccaggccctgtgctgggcactagggtcacacagaccacttgtgtcattttggaacttctggtctagtggggaaggcatccaagggagtaggtgatgggcccaaaaggaagggtcagctaaagggcagggggagctgagacgttggaggggtgaggggatcaggaggacttcatggataaaggggaattcacactgtgtccaggcatccaggtaaagttttatggagggtggcattccagggagcaaggaacaatgggagcaaaggcagggtgggtgggacttggtgaaaaggtcaggctggccagtgtgggtgctggtacatatgtcatcaactactattacagagttttggggcaggcaagaccaatacagggggacagtgggcctgtggttcactggtaactccccatgacatgggagtggaatgggcattggttttggagacagggttttgaatcttagctctatgtgacccggccaagttacttcaccctctctgagagtcagtttgcttatcgaaaaagaattgataatccttttagtgaaaattaaatgagatggcgcatatcaagtgcccagcctgataatgggtacacagtcaacacttggtcagtgctgctggtctgcccctccctagattcctgccagctgggctactcggccggtccctgcatgggaatgaccagcaggtatttctataatggtacatccatggcctgtgagactttccagtacggcggctgcatgggcaacggtaacaacttcgtcacagaaaaggagtgtctgcagacctgccgaactgtgggtgagtgcgggtccccacccctgtgcgctctgcaccctcaagaccctgtccctccagtaaaccacctgcgaattgaaaaggtagctaacagagggcattccagtggtagaactccaggcggtttcctgaaatcttaggaattccacctttggatgtggaggacctcgggcaaatcattttcttcctgtgggccccagtttccccatctgtcaacgagggatgaggtgttctagatgagcagggccctctggctcagcagtctcatgtatgtctgatcagcagtcacaagggtttctcaagttccatgcctctctccactccacagcggcctgcaatctccccatagtccggggcccctgccgagccttcatccagctctgggcatttgatgctgtcaaggggaagtgcgtcctcttcccctacgggggctgccagggcaacgggaacaagttctactcagagaaggagtgcagagagtactgcggtgtccctggtgatggtaggcagcctgcagggtgccaggctggccgaggggctgttggagtcgaggtgggagagccctgggaggagtaggggtctggagagctgagttctggactctgtacctggtaagcagcccatctactctctgaaatggggctgagcctggggccttaccccagctggaattgggccttggggagttattagccaggcactggcagagggtatgcagggctgactgaggagtggggcagagctgggttctaattttgcacctgcaacgttgagcaagtgccaatctgagtgtcagtattctcttgtaaaatgggacaaagcacctgcctcccagccttcccagtacctgacgcggagttagtactcagctaacagcaactgctcctaataataacgacaacgatacaatggtaacagtaatagcattccagggaagagcaaccattgaagatgtctgtgccttgattttcccactggaaaatggcacctgcggtaaaccagaagaggaaaaaaaaatctgatcatttcatggaataccctttggagataaatggttcagcaagcagaggtttctggccccaggtgacagctgccttcccttccctgagtgtccctgcctacggacccctccctgagtctctctgtgtccacaggtgatgaggagctgctgcgcttctccaactgacaactggccggtctgcaagtcagaggatggccagtgtctgtcccggggtcctgtggcaggcagcgccaagcaacctgggtccaaataaaaactaaattgtaaactcctgaaattctgtgtcctcattgttcattgtcatcacaagtgtaactaacagggtggcggaggggagaaaaagccagggtggggccatatgcaaccccagctttccccagaagtgaaaactgcgttggaaacataatagaactatcttcagtacatgacgttggctatgcaaattttgaaacaaatcaaagttctatttacaatagtgtaaaatgggattattttgttttgttgtaataaggctaggaaagaaaggaagacactctggggacttgtctctgggagaggtttggtggtcatcagtgacccaggctcagaagaaatgattgattgtgccctgctgtgcccaaggagctcagggcagacagcccacaaatgcctgaaataattcccctgtcctttgctgtacaaaacatctccccagggttttacttcagctgcagccatatccccagaaccagctgaccggagctggaaagccttcagctgtttctctgcatggccctggggagcccatcccctgggaccttcccctgggcctttgtcctggaaggagagtgctcactggccttcacattgtgtccagtgcaactgctgggccctggccaggccagaagcccttgatttgggctggcttctcctcacccttgggaaagggagtaggtgggctgtctagagcagctcaggacaaacttggcccaagaacacaactccaggatactccagtgtagacacacaggctttacaaacgtctgatttataaatatctcttgctaactgcatccacccacagccccgatggctgctgtggctgtggagggattggaggccccagctttgtgtgttctgaagtggagagctgacgctggcagaagaaacccaggcagggccctacctcctcttctctgtgggtgaccagcgtcctaagggccggtggctagttcagtcctgggttcgccccttgtgcccttagctcattggcttgagggaccaggcaggcaggaaggagggattccatacttctggttgaggggatgaacctggagacaaggatttgaggattgaaagctttgcagtcccctgggtcagacacatcaagaccctccctttgtctcccccaacatccaaagtgtggggcttacaggttccaacagagaagactgccctgagggacagcatctgtggtcacggcctggactttctgggcagaagcaggtggggtcaggtgcagggagacaggcaattgtccaggagaagtgagagcctccggcctgggactaacaaaggtcctcccatcctgtgtccacatcctgttccttccacacgtgcctcccataccagggccagccagccacggcagtttgaaggggccatgttgaagagtgatattttgaagtgacttgaactgaaagagaaaatgtttaaattggagggtgtgagctgcaggtgtacaggccagcttcagctggtggaaggaaacgttgctcacgaggtattttttttaaattttatttttttgagacaaggtctcgctctgtcacccaggctgcagtgcagtgccatgatcttggctccctgaatccttgacttcctgggctcaagcgatcctcccacctcggcctcctgagtagctgggactacaggcgcgtgccaccatgcctggctaatttttgtatttttgttgttgagacggggtttcaccatgttgcctgggctggtcttgaactcctgagcttaagcgatcctcccatcttggcttcacaaagtcttgggattacagacatgagccaccacgcctggccgaggtattttttcacagctct

SEQ ID NO: 1411 - protein, 352 aa, Homo sapiens
MRSLGALLLLLSACLAVSAGPVPTPPDNIQVQENFNISRIYGKWYNLAIGSTCPWLKKIMDRMTVSTLVLGEGATEAEISMTSTRWRKGVCEETSGAYEKTDTDGKFLYHKSKWNITMESYVVHTNYDEYAIFLTKKFSRHHGPTITAKLYGRAPQLRETLLQDFRVVAQGVGIPEDSIFTMADRGECVPGEQEPEPILIPRVRRAVLPQEEEGSGGGQLVTEVTKKEDSCQLGYSAGPCMGMTSRYFYNGTSMACETFQYGGCMGNGNNFVTEKECLQTCRTVAACNLPIVRGPCRAFIQLWAFDAVKGKCVLFPYGGCQGNGNKFYSEKECREYCGVPGDGDEELLRFSN

SEQ ID NO: 1412 - DNA, 4051 bp, Homo sapiens
ttacccttcctaaagtggaaggtgacctcaagggcccagaagctgacatcaagggcccaaaagtggacatcaacacccctgatgtggatgttcatggcccagactggcacctgaagatgcccaaggtgaaaatgcccaaattcagcatgcctggcttcaaaggagaaggtccagatgtggatgtgaacctgcccaaggctgacattgatgtctcaggacccaaagtggacgttgatgttcctgatgtgaatatcgaaggtccagatgcgaaactaaagggccccaagttcaagatgcctgagatgagcatcaaagcccccaagatctccatgcctgatattgacttaaacctgaaaggacccaaagtgaagggtgatgtggatgttacccttcctaaagtggaaggtgacctcaagggcccagaagctgacatcaagggcccaaaagtggacatcaacacccctgatgtggatgttcatggcccagactggcacctgaagatgcccaaggtgaaaatgcccaaattcagcatgcctggcttcaaaggagaaggtccagatgtggatgtgagcctgcccaaggccgacatcgatgtctcgggacccaaggtggacgttgatattccagatgtgaatatcgaaggtccagacccaaaactgaaggtccccaaggtcaagatgcctgaaataaatatcaaagctcccaagatctccatacctgatgttgacctggatttgaaaggacccaaagtaaaaggagattttgatgtgtctgtccctaaggttgaagggactttgaaaggcccagaagtagatcttaaaggtccacgtctggatttcgaaggccctgatgccaaactcagtggcccatctttgaagatgccatcgctggagatatctgctcctaaagtaactgctcctgatgttgatttgcatctcaaggcaccaaaaattggattttcaggtccgaagttagaaggtggtgaagtggacctcaagggacccaaagttgaagctccaagcttagatgtacacatggacagcccagatattaacatcgaagggccagatgttaaaatccccaaatttaagaaacccaagtttggatttgggccaaaaagccccaaagctgacatcaagtcaccttcactggatgtcactgttcctgaggcagagctgaaccttgagactcctgaaattagtgttggtggcaagggcaagaaaagtaagtttaaaatgcctaaaattcatatgagtggtcctaagattaaggccaaaaaacagggatttgacctgaatgttcctgggggtgaaattgatgccagcctcaaggctccggatgtagatgtcaacatcgcagggccggatgctgcactcaaagtcgacgtgaaatcgcccaaaaccaagaaaacgatgtttggaaaaatgtacttcccagatgtagagtttgacattaaatcacctaaatttaaagctgaggcccctctccctagccccaaactggagggtgaactccaggcacctgatctggaactttctttgccagcgattcacgtcgaaggtcttgacatcaaggcgaaggctcccaaggtcaagatgccagatgtggacatctcagtgccaaaaatagagggtgacctgaaaggccccaaagtgcaggcaaacttgggtgcacctgacatcaacatcgaaggcctagatgctaaagtcaaaacaccgtccttcggcatttctgcccctcaagtctccatccctgatgtgaatgtaaacttgaaaggaccaaagataaagggtgatgtccccagcgtgggactggaaggaccagatgtagatctgcaaggtccagaagcaaaaattaagttccccaagttttccatgcccaagatcggcatcccaggtgtgaaaatggagggtgggggagccgaggtccatgcccagctaccctctcttgaaggagacttgagaggaccagatgttaagctcgaagggcccgatgtttctctaaaggggccaggagtagacttaccttcagtgaacctctctatgccaaaagtctctgggcctgaccttgatctgaacttgaaaggaccaagtttgaagggagacctggatgcatctgttcccagcatgaaggtgcatgctccagggctcaacctcagtggtgtcggtggcaaaatgcaggtgggaggagacggtgtgaaagtgccagggatcgatgccacaacaaagcttaacgttggggcaccagatgtgacactgaggggaccaagcctgcagggagatctggctgtctctggtgacatcaaatgccctaaagtatccgtaggagctcctgatctaagcttggaggcatccgaaggcagcattaaacttcccaaaatgaagctgccccaatttggtatctctactccggggtccgacttgcacgtcaatgccaaggggccacaggtttctggcgaactgaaggggccaggtgtggatgtgaacctgaaagggtctcggatttcagcaccgaatgtggactttaacttggaaggaccaaaagtgaaagggagccttggggccactggtgagatcaaaggccccactgtcggaggaggtcttccaggcattggtgttcaaggcctagaaggaaacctccagatgcctggaattaagtcctctggatgtgatgtgaacctgccaggcgtgaatgtgaaactcccaactgggcagatttctgggcctgaaatcaaaggtggtctgaaaggttcagaagtaggtttccatggggctgctcctgatatcagtgtgaaggggcctgcctttaatatggcatctcctgagtcagattttggcatcaacttgaagggcccaaaaatcaaaggaggtgcggatgtttcagggggtgtcagtgccccagacatcagccttggtgaagggcatttgagtgttaaaggttccgggggtgagtggaagggaccccaagtctcctctgctctcaacttggacacatctaagtttgctgggggccttcatttctcaggaccaaaggtggaaggaggtgtgaaaggaggtcagattggactccaggctcctgggctgagtgtgtctgggcctcaaggtcacttggaaagtggatctggaaaagtaacattccctaaaatgaagatccccaaatttaccttctctggccgtgagctggttggcagagaaatgggggtggatgttcacttccctaaagcagaggccagcatccaagctggtgctggagacggcgagtgggaagagtctgaagtcaaactgaaaaagtccaagatcaaaatgcccaagtttaatttttccaaacctaaagggaaaggtggtgtcactggctcaccagaagcatcaatttctgggtccaaaggtgacctgaaaagttcaaaggccagcctgggctctctggaaggagaggcagaggccgaagcctcttcaccgaaaggcaaattctccttatttaaaagtaagaagccacggcaccgctcaaattcattcagtgatgaaagagagttctctggaccttccaccccgacggggacgctggagtttgaaggtggggaagtgtctctggaaggtgggaaagttaaagggaaacacgggaagctgaaattcggtacctttggtggattggggtcaaagagcaaaggtcattatgaggtgactgggagcgatgatgagacaggcaagttacaggggagtggggtgtccctggcctctaagaagtcccgactgtcctcctcttctagcaatgacagtgggaataaggttggcatccagcttcccgaggtggagctgtcagtttccacaaagaaagagtagcaggcctttgtatgtgtgtacatatatatatatataacaaaacatcagccttgggtggtgtgttcctatataaactccaaagggaaacacaccgactgcctcagcaatcatgcaaagaccttgcctggcccggtggcaagcgctgaaaaaccgaccgcctgtaggctcctggaactatacagataggtaaagagttccaagttcgtccggaattc

SEQ ID NO: 1413 - protein, 1277 aa, Homo sapiens
TLPKVEGDLKGPEADIKGPKVDINTPDVDVHGPDWHLKMPKVKMPKFSMPGFKGEGPDVDVNLPKADIDVSGPKVDVDVPDVNIEGPDAKLKGPKFKMPEMSIKAPKISMPDIDLNLKGPKVKGDVDVTLPKVEGDLKGPEADIKGPKVDINTPDVDVHGPDWHLKMPKVKMPKFSMPGFKGEGPDVDVSLPKADIDVSGPKVDVDIPDVNIEGPDPKLKVPKVKMPEINIKAPKISIPDVDLDLKGPKVKGDFDVSVPKVEGTLKGPEVDLKGPRLDFEGPDAKLSGPSLKMPSLEISAPKVTAPDVDLHLKAPKIGFSGPKLEGGEVDLKGPKVEAPSLDVHMDSPDINIEGPDVKIPKFKKPKFGFGPKSPKADIKSPSLDVTVPEAELNLETPEISVGGKGKKSKFKMPKIHMSGPKIKAKKQGFDLNVPGGEIDASLKAPDVDVNIAGPDAALKVDVKSPKTKKTMFGKMYFPDVEFDIKSPKFKAEAPLPSPKLEGELQAPDLELSLPAIHVEGLDIKAKAPKVKMPDVDISVPKIEGDLKGPKVQANLGAPDINIEGLDAKVKTPSFGISAPQVSIPDVNVNLKGPKIKGDVPSVGLEGPDVDLQGPEAKIKFPKFSMPKIGIPGVKMEGGGAEVHAQLPSLEGDLRGPDVKLEGPDVSLKGPGVDLPSVNLSMPKVSGPDLDLNLKGPSLKGDLDASVPSMKVHAPGLNLSGVGGKMQVGGDGVKVPGIDATTKLNVGAPDVTLRGPSLQGDLAVSGDIKCPKVSVGAPDLSLEASEGSIKLPKMKLPQFGISTPGSDLHVNAKGPQVSGELKGPGVDVNLKGSRISAPNVDFNLEGPKVKGSLGATGEIKGPTVGGGLPGIGVQGLEGNLQMPGIKSSGCDVNLPGVNVKLPTGQISGPEIKGGLKGSEVGFHGAAPDISVKGPAFNMASPESDFGINLKGPKIKGGADVSGGVSAPDISLGEGHLSVKGSGGEWKGPQVSSALNLDTSKFAGGLHFSGPKVEGGVKGGQIGLQAPGLSVSGPQGHLESGSGKVTFPKMKIPKFTFSGRELVGREMGVDVHFPKAEASIQAGAGDGEWEESEVKLKKSKIKMPKFNFSKPKGKGGVTGSPEASISGSKGDLKSSKASLGSLEGEAEAEASSPKGKFSLFKSKKPRHRSNSFSDEREFSGPSTPTGTLEFEGGEVSLEGGKVKGKHGKLKFGTFGGLGSKSKGHYEVTGSDDETGKLQGSGVSLASKKSRLSSSSSNDSGNKVGIQLPEVELSVSTKKE

SEQ ID NO: 1414 - DNA, 17400 bp, Homo sapiens
cgcctttcctgcgggcgtagttgctggctgctcgggcactgggacctcggcggcttggggacgctggccgcgaagtagggagcgcaggtggccgctcggggtgagggccctgggtcatggagcacttcttgctggaggtggcagccgcgccgctgcggttaatcgcagccaagaacgagaagagccgcagtgagttgggcaggttcttggccaagcaggtgtggacacctcaagatcgccagtgtgtcctgagtaccttagcacagttgcttttggataaggactgtactgtgctggttggtcgccagcttcgccctctccttttggatttgctggaaaggaatgccgaagccattaaagctggaggccaaatcaaccatgatctgcatgaacggctatgtgtgtcgatgagcaaactcattggtaaccatcctgatgtcctcccgtttgccctgagatatttcaaggacacatccccagtctttcaaagacttttcctagagagttcagatgctaatccagtacgctatggacgtaggaggatgaagctccgggacctaatggaagcagccttcaagtttctgcagcaggagcagtctgtgttccgggagctctgggactggagtgtgtgtgtccctctcctcagaagccatgacaccttggttcgctggtatacagccaattgtcttgctttggttacctgtatgaatgaagagcacaagttatcatttcttaagaagatatttaatagtgatgaattgatccatttcaggttgaggttattagaagaggcccagttgcaggacttggagaaggccttggttttggccaatccagaagtctccctttggcgtaagcagaaggagctgcagtacttacagggacatcttgtttcgtctgacctctcccctagggtgacagctgtttgtggtgtggtgctgcctgggcagctgccagcccctggagagctgggtggtaataggagttcttcacgtgaacaggagctggcccttaggtcttatgtgctggttgagtctgtctgcaaaagtcttcagaccctggctatggcggttgcttctcagaatgctgtgttgttggaaggaccaataggatgtggcaaaacttccttagttgaatatttagctgcagtgacaggtagaacaaagcctcctcagcttctcaaagtccagcttggagatcagactgacagtaagatgcttttggggatgtatcgctgcacagatgttcctggagagtttgtgtggcagcctggcaccctgacacaggcagccacaatgggccactggatccttctggaggatattgactatgcccccttagacgtggtttctgtgctgatccctctcttggagaatggagagctcttgattcctggccgaggtgactgtctgaaagtggcacctggatttcagttttttgcaaccaggagactcttgagctgtggaggaaattggtatcgaccgctaaacagtcatgctactttgctagacaaatattggaccaaaattcacctggataacctggataagagagaactgaatgaggttcttcagagcagatatcctagcctattggcagtggttgatcacctgcttgacatttatatccaacttactggagagaaacatcactcttggagtgatagttctgttggatgtgaacaggcacctgaagaagtttcagaagccagaagagaaaacaaaagaccaacccttgagggaagagaattatctctaagggatctgctgaattggtgtaataggattgcccatagctttgacagttcatctttatcagcatcattaaatatttttcaagaggctctagactgtttcacagcaatgctttctgagcatacaagcaaactgaaaatggcagaagttattggaagcaaattgaacatttctagaaaaaaggctgaattcttttgtcaactttataaaccagaaattgtgatcaatgagctagatttgcaagtgggtcgagtgcggcttctacggaaacaaagtgaggctgttcacctacagagggagaagttcactttcgctgctacacggccgtcctctgttctcatcgagcagcttgcagtgtgtgtcagcaaaggggagcctgtgttgctggtgggagagaccgggactggcaaaacctctaccatccaatacttggctcacattacaggccaccgtttgagggttgtcaatatgaatcaacaaagtgatactgcagacttgcttggaggttataaaccggtggaccataagcttatttggctacccttacgggaggcatttgaggaactctttgctcagacattttccaagaaacaaaactttacgttcttggggcacattcagacctgttacagacagaaacggtggcatgatctcctgagactaatgcagcatgtacacaagtctgctgttaacaaggatggaaaagacagtgaaactgggttactcataaaagagaaatgggaagcatttggtcttagactcaaccatgcccaacaacagatgaaaatgactgaaaataccttattgttcgcatttgtagagggtacattagctcaggctgtaaagaaaggagagtggatcttgttggatgagattaacttggctgctccagaaatactagaatgtctgagtggtttgcttgaaggatcttctggatccctggtgttgctggatcgaggagacacagagccactggttcggcatcctgacttccgtttatttgcctgtatgaatccagcaactgatgtaggcaaaagaaatctcccaccaggaataagaaacaggttcacagaactttatgtagaagaattagaaagcaaagaagacttacaggttcttattgtagattatctgaaaggattgagtgtgaacaagaatacagtgcaaggaatcataaacttctacacagctttgcggaaagagtctgggaccaaactggtggatggcactggccatagacctcactacagccttcggactctgtgccgggccctgcgatttgcagcctccaatccatgtggcaacattcagcgctcactctatgagggtttttgtttgggtttcttaacacagcttgacagggcatcacacccaatagttcagaagctcatctgtcaacacattgtccctggcaatgtcaagagtctgctgaagcagcctattccagagccaaaaggaggtcggcttatccaggttgaaggctactggattgcggtgggagacaaggagcctacaatagatgagacgtacattctgacatcttctgtgaagctgaacctgagagatatagtccgagttgtctctgcaggaacctatccagtgctgattcagggagagacatcagttggtaaaacaagcctgatccagtggctggctgcagctactggcaaccactgtgtgcgtattaataatcacgaacacacggatattcaggagtacattggttgttacacgtctgactcctcagggaagcttgtctttaaggaaggtgttcttattgatgccatgagaaaaggctattggattattttagatgaattaaatttggcccctactgatgtgttagaggcgctgaataggctgttggatgataaccgtgaattgctagtaacagaaacacaggaagttgttaaagcacaccctcggtttatgctttttgccacccaaaatcccccaggactttatggaggcagaaaggtcctttctagagccttcaggaatcggtttgtggaattgcactttgatgagttacctagctccgagttggaaacaatcttgcacaagcggtgtagtttgccaccctcctattgcagcaagttggttaaagtcatgctggatcttcagtcctatcgcagaagttcttcagtgtttgctggaaagcagggcttcatcacccttcgtgatctgttccgatgggctgaaagatacagattggctgagccgaccgagaaggagtatgactggctacagcatttagccaatgatggttatatgcttctggcaggtcgagtcaggaagcaggaggaaattgatgtgattcaagaagtccttgagaaacatttcaagaaaaaattgtgtcctcaatctcttttctccaaagaaaatgttctaaaattgctgggtaaattgtctactcagatatccacattggagtgtaactttggccatatcgtgtggactgagggcatgcggagactcgcgatgctagtgggaagggcattggaatttggtgaacctgtgctgctggttggagacactgggtgtgggaaaactactatctgtcaggtatttgcagccttggcaaatcagaaattatactctgtcagctgccacttacacatggagacatcagacttcctgggtggcctgcggccagtgagacaaaagccaaacgacaaggaagaaattgacacatcaagactctttgagtggcatgatgggcctctggttcaggccatgaaggaggacggctttttcctcttggatgagatctcattggccgatgactctgtcttggaaagactcaacagtgtccttgaagtagaaaagtctctggtattagctgaaaaaggcagtccagaggacaaggatagtgaaatagagctgttgactgctgggaaaaaatttcgtattctagcaaccatgaaccctgggggtgactttggaaaaaaggagctgtctcctgccttaagaaaccggtttacagaaatatggtgccctcaaagcacaagccgtgaagatttaattcagatcatcagtcataatcttcgtccaggattgtgtctgggcagaatagatcctaaagggtctgacatacctgaagtgatgctggatttcattgactggctgacccaccaagagtttggcagaaagtgtgtggtcagtatcagagatatcctgtcctgggttaacttcatgaacaaaatgggggaggaagctgctttgaaaaggccagagatcatctccactgtgacatcttttgtccatgctgcatgcctggtgtacatagatggaataggttcaggggtaacttcctctgggtttggtacagcccttttggcacgaaaagaatgtctgaaatttctaatcaagaggcttgccaagatagtacgacttacagaatatcagaaaaatgagttgaagatttatgacagaatgaaggccaaagaattcactggaatagataacctttggggaattcatccattttttataccaaggggacctgtcctacacaggaataatattgcagactatgcactcagtgcagggaccactgctatgaatgcacagaggctcttaagagctaccaaactgaagaagcccattctcctggagggttcccctggtgttggcaagacaagtttggtgggagcattagcaaaggcttcaggaaatacccttgttagaatcaacttatcagagcaaacggacatcacagacctgtttggagcagatctacctgttgaaggtggcaagggaggagagtttgcctggcgtgatggccccttactggcagctttgaaggcaggccattgggtggtgttggatgagcttaacctggcttctcagtctgtattggaaggactcaatgcttgttttgaccaccgaggagaaatctatgtgcctgagttaggaatgagctttcaagtgcagcatgaaaagacgaagatttttgggtgtcagaatccctttagacaaggaggtgggaggaaaggcttgcccaggtctttccttaacagattcactcaggtcttcgttgatccccttacagtaattgacatggagttcattgccagtactttgtttccagccattgagaaaaatattgttaagaaaatggttgctttcaataaccaaattgatcatgaagtgactgttgagaagaaatgggggcaaaaaggaggaccctgggaattcaacctccgggaccttttccgctggtgtcagttgatgctggttgaccagtcccctgggtgttatgatcctggtcagcatgtgtttttggtctatggtgaaagaatgagaaccgaagaggacaaaaaaaaggtcattgctgtattcaaggatgtgtttggttcaaattccaacccatacatgggaaccagactatttcgtatcactccctatgatgttcagttgggctactcagtcctttcccgtgggagctgtgttcctcacccgtcccgccatcccctgttgctcctgcaccagtcattccaacccctggagtcaatcatgaagtgtgtgcagatgagctggatggtcatcctggtcgggccagcctctgtgggcaagaccagcctggtccagcttctggcacaccttactggccacacattaaagatcatggctatgaacagtgcaatggatactactgagctgctgggtggatttgagcaggttgatcttatacgaccttggaggaggctgctagagaaggtggagggaactgtaagggcactgttaagggatagcctccttatcagtgctgatgatgcagaagtagtgctgcgagcctggagtcattttcttctgacatataagcctaagtgtcttggagaaggtggtaaagctatcacgatggagattgtcaacaaactagaagcagtgttattgcttatgcagcgactcaacaataaaatcaactcatactgcaaggcagagtttgccaaacttgttgaagagttccgaagctttggtgtgaagcttacgcagttggccagtggccatagccatggcacatttgaatgggttgacagcatgttggttcaggccctgaagtctggagactggcttctgatggacaatgttaacttctgcaacccatcagtgttggatcgtttgaatgctttgcttgaacccggaggtgtcctcactattagtgagagaggaatgatagatggatccactcccacgataacaccaaatcccaatttcagacttttcctctcgatggatcctgttcatggagatatatcccgagctatgaggaatcgtggacttgaaatctacatttcaggggaaggggatgcaagcaccccagacaacctggatttgaaagttctgctgcacagccttggattggtggggaacagtgtatgtgacatcctcttggctttacacacagagacccggagcactgttgtaggttctccaacatcttctgtatcaactctaatccagacagccatactaattgtccagtacctgcagcgagggctgagtttagacagagccttttctgaagcatgctgggaagtatatgtctgttcccagcattcaccagcaaaccggaagcttgtacaggctttactggagaaacatgtttcttctttgcgagcacatgaaacctggggagactccattcttggcatgggactgtggccagattctgtgccctcagctctctttgctactgaagattcacacctgtctacagtccgaagagatggacagatcttagtatattgtctcaacaggatgagcatgaaaaccagcagctggacaaggagtcagccttttaccttgcaagacttagagaaaattatgcagtcccccagccctgagaacctgaaattcaatgcagtcgaagtgaatacttactggatcgatgaaccagatgttttggtcatggctgttaaattgctcatagaaagagcaaccaatcaggattggatgctcagagttaaatggctttatcatttagccaagaatataccgcaggggcttgagtccatacaaattcatttggaagccagtgctgcatctctcaggaatttttactcacattccctctcaggtgcagtcagtaatgttttcaaaatattacaaccaaatacaacagatgaatttgtgatccctctggatccccgatggaatatgcaggctctggacatgattagaaatttgatggactttgacccacaaacagaccagcctgaccagctctttgcccttttagaatcagctgcaaacaagacaatcatatatcttgaccgggaaaaacgggtttttactgaagcaaatttggtttctgttggtagcaaaaagctaagagagagtgttttgagaatgtcctttgaattccatcaagatccagaaagctatcacactctgccccatgaaattgtggtcaatcttgctgctttttttgaactttgtgatgcactagtcctgctctgggtacagtcctcccagggaatggtgtctgatgccagtgccaatgagatcttaggttctctgcggtggcgggaccggttctggactgtggccgacacagtaaaagtagatgccccaggtctggcccttcttgccctccattggcactgggttttaaaacatctggtccaccagatcccccgacttctgatgaattatgaagacaaatattacaaagaagttcagactgtctcagaacatattcagaattgtctggggagccagactggtggcttcgctggtataaagaagttgcagaagttcctgggacgaccgtttccttttaaggacaagctggtggtggagtgtttttcacaactgaaggtccttaacaaagtccttgccatcagggagcagatgtctgcccttggggagagtggatggcaggaagacattaaccgtctccaagtggttgcttctcagtggacattaaagaaaagtctcctgcaagcctggggactgatcctcagagcaaatattttggaagatgtcagcctagatgaattgaagaattttgtgcatgctcagtgtttagaactgaaagccaaaggactctcacttggttttctggagaaaaagcatgatgaagcttcctccctgtcccatccagacttgacctccgtaatccacctcaccaggagtgttcagttgtggcctgcaatggagtacctggctatgctttggcggtacaaagtgacagctgattttatggcacaagcttgtctcagaagatgcagcaaaaatcaacaaccccagataaatgaggagataagtcacctcatctcattttgtctttatcacacacctgttacacctcaagagcttcgagatctgtggtccttgctgcatcatcagaaggtgtctcctgaagaaattacatctttgtggtccgagttatttaattccatgtttatgtctttctggagcagtactgtgaccacaaatccagagtactggctaatgtggaaccctttgcctggtatgcagcagagggaggcacccaagtctgttttggactccacattgaagggccccggcaatctcaatagacccatattctctaagtgctgctttgaagtcttaaccagcagctggagagcaagtccctgggatgtgagtggcctccccattctttcctcctctcacgtgaccctaggagagtgggttgagagaactcagcagctccaggacatcagttcgatgctttggactaacatggctatctcttcagtagcagaattcagacgcacggattcccaactccaggggcaggtgctgttccggcacctggcaggcctagcagagctgctcccagagtcccggcggcaggagtacatgcagaactgtgagcagctgctgcttgggagcagccaggccttccagcatgtgggccagacacttggggacatggctggtcaggaggtgctgcccaaggaactgctctgccagttgctcacctccctgcaccactttgttggtgaaggggagagtaagaggagcctgcctgagccagcccagcgtgggagcctctgggtgagcctcggcttgctccagattcagacatggcttccccaggcacgctttgaccctgcggtgaagagggagtacaagctcaattacgtcaaggaagagttacaccaactgcagtgtgaatggaagacccggaacctgtcatcccagctgcagactggaagagacctggaagatgaagtcgttgtcagctactctcatcctcacgttaggctgcttcgccaaaggatggatcggctggataatttaacctgtcacctgttgaagaaacaggcctttagaccccagctgcctgcctacgagtccctggttcaggagatccaccactacgtcaccagcatcgccaaggcccctgctgttcaggatctgctcacacggcttctgcaggccctccacatagatgggccacggtctgcccaagtagcccagagccttctaaaggaggaggcctcttggcagcagtcacaccaccagttccggaagcggctgtcagaggagtacaccttctatccagatgccgtgagcccactgcaggcatccatattgcagttacaacatggcatgaggctggtggcctctgagctccacacctcactccacagcagtatggttggtgcagacaggctggggaccctggccacagccttgctggctttcccatcggtgggccccaccttcccgacttactatgctcatgcagacactttgtgctcggtgaagtctgaggaggttctacgaggccttgggaagctaatcctcaagcgctcaggaggaaaggagctggaaggcaagggccagaaagcctgtcccactcgggagcagctgctgatgaatgctctcctttacctgcgctcccacgtgttatgcaagggagagttggaccagagggccctgcagctcttcagacatgtgtgtcaggaaatcatcagtgagtgggatgagcaggaacgcatagcccaagagaaggctgagcaggaaagcggcctgtatagatacaggagcaggaactctaggacagccctgagtgaagaggaggaggaagaacgggagttcagaaaacagttccccctgcatgaaaaggactttgcagatattttggtgcagccaacgttggaggagaacaaaggaacttcagatgggcaagaagaggaagcaggcacaaacccagctctcctctcccagaattcaatgcaggcagtaatgctgatacaccagcaattgtgtctcaactttgctcgatccctctggtatcaacagactctgccgccacatgaagcaaagcattacctcagcctgtttctgtcttgctatcagactggggcatcgcttgtgacacacttctaccccctgatgggagttgaactgaatgaccgactcttgggcagccaacttttggcctgtaccctctcccataacactctttttggggaggcaccctcagacctgatggtgaaacctgatgggccctatgacttctaccagcatcccaatgttccagaagcacggcagtgtcaacctgtgcttcaaggtttctcagaggctgtcagtcacttgctacaggactggccagaacacccagcgcttgaacagctcctggttgtaatggacagaattcgtagtttcccactttccagtcccatctcaaagttcctgaatggcttagagatccttctggcaaaggcacaggattgggaggaaaatgcaagtcgagctttgtctttgcggaaacatcttgatttgatcagtcagatgatcattcggtggcgtaaactggagctgaactgctggtccatgagtttggataatactatgaagcgccacaccgagaaatccaccaagcactggttctccatctatcagatgcttgagaagcacatgcaggaacaaacagaagaacaggaagatgacaaacagatgaccttgatgttgctggtcagcacattacaagcatttattgaaggatcctcgctgggagagttccatgtgcgacttcagatgttactggttttccattgtcatgtcttgctgatgccacaggttgaaggaaaggattcactttgcagtgttctatggaatttgtaccattattacaagcaattctttgaccgggtccaggccaaaattgtggaacttcgttcccccctagaaaaagaacttaaagaatttgttaagatttccaagtggaatgatgtcagcttctggtccattaagcaatctgtagaaaagacacacaggacactctttaaattcatgaagaaatttgaagcagtcctgagtgaaccctgccggtcatccctggtggagagtgacaaggaagaacagcctgactttttgcccaggccaacagatggagctgcaagtgaactgtcttccattcagaatctgaacagggcactgagggagaccctgttagcccaaccagcagctgggcaggccacaattccagagtggtgtcagggcgctgctccttccggcttggaaggggagcttctgcgtcgcttgccaaagctcaggaaacgcatgaggaagatgtgcctgacgttcatgaaggagagccccctgcctcgccttgtggagggccttgatcagttcacaggtgaagtgatttcctctgtgagtgagctgcagagcttaaaggtggaaccctctgcagagaaggagaagcagcggtcagaagccaagcacattctcatgcaaaaacagcgagctttgtcagacctctttaaacaccttgcaaaaattggtttgtcgtatcgcaaaggtcttgcttgggcccgttcaaaaaaccctcaagagatgcttcatcttcacccattagatctccagagcgcattgtccatcgtcagcagcactcaggaggctgattctaggctgcttacagaaatctcgtcttcatgggatggatgccagaagtatttttatcgctctcttgcacggcatgccaggcttaacgcagcactagcaactcctgccaaggaaatgggcatgggcaacgtggagaggtgcagagggttctcagcacatttgatgaagatgctcgtccgacagcggcgctccctgaccacgctcagtgagcagtggatcatcctcaggaacctcctcagctgtgtgcaagagattcacagcaggctgatggggccccaggcctaccccgtggccttcccccctcaggatggcgtgcagcagtggacagagcgcctgcagcacctggccatgcagtgccagatcctgcttgagcagctctcctggctcctccagtgctgccccagtgtagggccagctccaggccatggcaatgtccaggtactggggcagcctcctggcccctgcctggaaggaccagaacttagcaagggacaactttgtggagtagtgctggacctaattccttccaatctgagctacccatctccaatacctggaagtcagctgccctctggttgccggatgcggaaacaggatcacctttggcaacagtcaactacgagattaacagagatgctaaaaaccattaaaacagtgaaagctgacgtcgacaaaattagacagcagtcttgtgagactctctttcattcttggaaagattttgaagtttgctcttctgcgctgagttgcttgtcccaggtgtcagttcatttgcagggcctagagtccttgttcattcttccagggatggaggttgagcaaagagactcacaaatggcactagttgaaagtctggaatatgtaagaggagaaattagtaaagccatggctgactttactacctggaagacccatctgcttacttcagatagccaaggaggaaatcaaatgttggacgaaggatttgtggaagatttttcagagcaaatggaaattgccatccgagccatcctctgtgccatccagaacttagaagaaagaaagaatgaaaaagcagaggagaacactgaccaagcaagcccacaagaagattatgcaggctttgagagactgcaatcaggacatctaacaaaactcttagaggatgacttctgggccgatgtgagcactttgcacgtgcagaaaataatttctgccatctccgagctgttggagaggctgaaatcgtacggtgaggatggcacagcagcaaagcacctgttcttcagccaatcctgttccttgctggtgcgcctggtgccggtcctctccagctactcagacctcgtcctcttcttcctgaccatgtctttagcaactcaccgtagtactgcaaagctgctctctgtgcttgcccaggtctttacagagcttgcccagaagggattttgcttgcccaaagaatttatggaagattcagctggagagggagcaactgagttccatgactatgagggaggtggaattggagaaggcgagggcatgaaggatgtgagtgaccagatcggaaatgaagaacaggtggaagatacatttcagaagggtcaagaaaaagacaaagaggatcctgattcaaaatctgatattaagggcgaggataatgccattgagatgtcggaagattttgatgggaaaatgcatgatggggagcttgaagaacaagaagaggatgatgagaaatcagatagtgagggcggagacctggataaacacatgggcgatctcaatggtgaggaagctgacaaactagatgagaggctttggggtgatgatgatgaggaggaagatgaggaggaagaagacaataaaactgaagaaacaggaccaggaatggatgaggaagattctgaacttgttgctaaagatgacaacttggatagtggcaattcaaacaaagataaaagccagcaagataagaaggaagaaaaggaagaagcagaagctgatgatggtggacaaggtgaagacaaaattaatgaacaaatagatgagagggactatgatgaaaatgaggtggacccttaccatggcaatcaggaaaaggtgccagaacccgaggctttggaccttccagatgacttgaacctcgacagtgaagacaagaatggtggtgaggacaccgacaatgaagaaggagaagaagagaatcctttggagataaaagaaaaaccagaagaagcaggtcatgaagctgaggaaagaggagagaccgagaccgaccagaacgaaagtcagagtccacaggagcctgaggaaggccccagtgaagatgacaaggcagaaggggaagaggaaatggacacaggagctgatgaccaagatggagatgctgctcagcatcctgaagaacactctgaggagcagcagcagtctgtggaggaaaaagacaaggaagccgatgaagaaggtggagagaatggccctgctgaccaaggtttccagccccaggaggaagaagaacgggaggactctgatacagaggagcaggtgccagaggctttggagaggaaggagcatgcctcctgtgggcagactggtgtggagaacatgcagaacacacaggccatggagctggctggggccgcacctgagaaggagcaggggaaagaggaacacggaagtggagctgcagatgcaaaccaggcagaaggccatgaatcgaatttcattgcccagttggcctcccagaagcacaccaggaaaaacacacagagttttaagaggaaacctgggcaggctgacaatgaacgttccatgggtgatcacaatgagcgtgtgcacaagaggctgaggactgtggatacggacagccatgccgagcaggggccagctcagcagccccaggcccaggtggaggatgcagatgcattcgagcacattaaacaaggcagtgacgcatacgatgcacagacctatgatgtggccagcaaagaacagcaacagtctgcaaaagactctggcaaagatcaggaagaggaggagatagaggacacccttatggacacagaggagcaggaggagttcaaagcagcagacgtggagcagctgaagccagaggaaatcaagtcgggcaccacagcacccttgggctttgatgagatggaagtggagatccaaactgttaaaacagaggaagaccaagaccccagaacagacaaagcccataaggagacagaaaatgagaaaccagaaagaagccgagagtctaccattcatacagctcatcaattcctcatggacacgatcttccagccctttttaaaagatgtcaatgagctaagacaggagctggagagacagctggaaatgtggcagccacgtgaatctggaaacccagaggaggagaaggttgcagctgagatgtggcagagttacctgatcttaacagcgcctctttcacaacggttatgtgaagagcttcgtctcatattagagcctacccaggcagccaagctgaaaggagactatcgaactgggaaacgactaaacatacggaaagtcattccatacattgctagtcaatttcggaaagacaagatttggcttcgaaggaccaagcccagtaaacgccagtatcagatttgtttggctatcgatgactcttctagtatggtagacaatcataccaagcagcttgcatttgaatctttggctgtgattggaaatgctctaaccctcctggaagtgggtcagattgcagtgtgtagttttggagaatctgtaaagctgttacacccatttcatgagcagttcagtgattactctgggtcccagattctacgtctctgcaaattccaacaaaagaaaaccaagattgctcagtttctagagtctgttgccaacatgtttgcagctgctcagcagctctcgcagaacatcagttcagaaactgcacaactcctcctggtagtctctgatgggcgaggccttttccttgagggcaaagaaagagtcctggcagcagttcaggctgcccggaatgcaaatatctttgtcatctttgttgtattggacaatcccagttcacgggattctatcttggacattaaagtaccgatatttaaaggacctggagagatgcctgaaatccgatcctacatggaagagttcccattcccatactatatcattcttcgagatgtaaacgcacttcctgagacactcagcgatgccctcagacagtggtttgagttggtgacagcctctgaccacccatagaacagaaagaagagtccaaagtgagacttaactgtggtcagaaggtcacattgcttacccaggtgctcccttttggacaactacaaaaaattttattgtaatatttttattttacaacgtgatcttacagcctacagaatgctctctggctcccggctttgcctgggctgaggtttttataccaaacctggaagcagcagcaggtgcctgaactcgtaactagagaagagttatccttcttccctgccttggaagccctggcctgggaggaggtcataccccaccgttggagcccagctgcctgttttcttttgcaggggatctgggcacctgtgccttgaggagatgctgccaggagcatgggactctgacagtcctttgtataaaggactaaagggagctgcccttttgaccctgttctaagctctgccttgccaagcccatagtgtgtgcccaaaagctgtcaagtggccaagacagctcgtttctggag

SEQ ID NO: 1415 - protein, 5596 aa, Homo sapiens
MEHFLLEVAAAPLRLIAAKNEKSRSELGRFLAKQVWTPQDRQCVLSTLAQLLLDKDCTVLVGRQLRPLLLDLLERNAEAIKAGGQINHDLHERLCVSMSKLIGNHPDVLPFALRYFKDTSPVFQRLFLESSDANPVRYGRRRMKLRDLMEAAFKFLQQEQSVFRELWDWSVCVPLLRSHDTLVRWYTANCLALVTCMNEEHKLSFLKKIFNSDELIHFRLRLLEEAQLQDLEKALVLANPEVSLWRKQKELQYLQGHLVSSDLSPRVTAVCGVVLPGQLPAPGELGGNRSSSREQELALRSYVLVESVCKSLQTLAMAVASQNAVLLEGPIGCGKTSLVEYLAAVTGRTKPPQLLKVQLGDQTDSKMLLGMYRCTDVPGEFVWQPGTLTQAATMGHWILLEDIDYAPLDVVSVLIPLLENGELLIPGRGDCLKVAPGFQFFATRRLLSCGGNWYRPLNSHATLLDKYWTKIHLDNLDKRELNEVLQSRYPSLLAVVDHLLDIYIQLTGEKHHSWSDSSVGCEQAPEEVSEARRENKRPTLEGRELSLRDLLNWCNRIAHSFDSSSLSASLNIFQEALDCFTAMLSEHTSKLKMAEVIGSKLNISRKKAEFFCQLYKPEIVINELDLQVGRVRLLRKQSEAVHLQREKFTFAATRPSSVLIEQLAVCVSKGEPVLLVGETGTGKTSTIQYLAHITGHRLRVVNMNQQSDTADLLGGYKPVDHKLIWLPLREAFEELFAQTFSKKQNFTFLGHIQTCYRQKRWHDLLRLMQHVHKSAVNKDGKDSETGLLIKEKWEAFGLRLNHAQQQMKMTENTLLFAFVEGTLAQAVKKGEWILLDEINLAAPEILECLSGLLEGSSGSLVLLDRGDTEPLVRHPDFRLFACMNPATDVGKRNLPPGIRNRFTELYVEELESKEDLQVLIVDYLKGLSVNKNTVQGIINFYTALRKESGTKLVDGTGHRPHYSLRTLCRALRFAASNPCGNIQRSLYEGFCLGFLTQLDRASHPIVQKLICQHIVPGNVKSLLKQPIPEPKGGRLIQVEGYWIAVGDKEPTIDETYILTSSVKLNLRDIVRVVSAGTYPVLIQGETSVGKTSLIQWLAAATGNHCVRINNHEHTDIQEYIGCYTSDSSGKLVFKEGVLIDAMRKGYWIILDELNLAPTDVLEALNRLLDDNRELLVTETQEVVKAHPRFMLFATQNPPGLYGGRKVLSRAFRNRFVELHFDELPSSELETILHKRCSLPPSYCSKLVKVMLDLQSYRRSSSVFAGKQGFITLRDLFRWAERYRLAEPTEKEYDWLQHLANDGYMLLAGRVRKQEEIDVIQEVLEKHFKKKLCPQSLFSKENVLKLLGKLSTQISTLECNFGHIVWTEGMRRLAMLVGRALEFGEPVLLVGDTGCGKTTICQVFAALANQKLYSVSCHLHMETSDFLGGLRPVRQKPNDKEEIDTSRLFEWHDGPLVQAMKEDGFFLLDEISLADDSVLERLNSVLEVEKSLVLAEKGSPEDKDSEIELLTAGKKFRILATMNPGGDFGKKELSPALRNRFTEIWCPQSTSREDLIQIISHNLRPGLCLGRIDPKGSDIPEVMLDFIDWLTHQEFGRKCVVSIRDILSWVNFMNKMGEEAALKRPEIISTVTSFVHAACLVYIDGIGSGVTSSGFGTALLARKECLKFLIKRLAKIVRLTEYQKNELKIYDRMKAKEFTGIDNLWGIHPFFIPRGPVLHRNNIADYALSAGTTAMNAQRLLRATKLKKPILLEGSPGVGKTSLVGALAKASGNTLVRINLSEQTDITDLFGADLPVEGGKGGEFAWRDGPLLAALKAGHWVVLDELNLASQSVLEGLNACFDHRGEIYVPELGMSFQVQHEKTKIFGCQNPFRQGGGRKGLPRSFLNRFTQVFVDPLTVIDMEFIASTLFPAIEKNIVKKMVAFNNQIDHEVTVEKKWGQKGGPWEFNLRDLFRWCQLMLVDQSPGCYDPGQHVFLVYGERMRTEEDKKKVIAVFKDVFGSNSNPYMGTRLFRITPYDVQLGYSVLSRGSCVPHPSRHPLLLLHQSFQPLESIMKCVQMSWMVILVGPASVGKTSLVQLLAHLTGHTLKIMAMNSAMDTTELLGGFEQVDLIRPWRRLLEKVEGTVRALLRDSLLISADDAEVVLRAWSHFLLTYKPKCLGEGGKAITMEIVNKLEAVLLLMQRLNNKINSYCKAEFAKLVEEFRSFGVKLTQLASGHSHGTFEWVDSMLVQALKSGDWLLMDNVNFCNPSVLDRLNALLEPGGVLTISERGMIDGSTPTITPNPNFRLFLSMDPVHGDISRAMRNRGLEIYISGEGDASTPDNLDLKVLLHSLGLVGNSVCDILLALHTETRSTVVGSPTSSVSTLIQTAILIVQYLQRGLSLDRAFSEACWEVYVCSQHSPANRKLVQALLEKHVSSLRAHETWGDSILGMGLWPDSVPSALFATEDSHLSTVRRDGQILVYCLNRMSMKTSSWTRSQPFTLQDLEKIMQSPSPENLKFNAVEVNTYWIDEPDVLVMAVKLLIERATNQDWMLRVKWLYHLAKNIPQGLESIQIHLEASAASLRNFYSHSLSGAVSNVFKILQPNTTDEFVIPLDPRWNMQALDMIRNLMDFDPQTDQPDQLFALLESAANKTIIYLDREKRVFTEANLVSVGSKKLRESVLRMSFEFHQDPESYHTLPHEIVVNLAAFFELCDALVLLWVQSSQGMVSDASANEILGSLRWRDRFWTVADTVKVDAPGLALLALHWHWVLKHLVHQIPRLLMNYEDKYYKEVQTVSEHIQNCLGSQTGGFAGIKKLQKFLGRPFPFKDKLVVECFSQLKVLNKVLAIREQMSALGESGWQEDINRLQVVASQWTLKKSLLQAWGLILRANILEDVSLDELKNFVHAQCLELKAKGLSLGFLEKKHDEASSLSHPDLTSVIHLTRSVQLWPAMEYLAMLWRYKVTADFMAQACLRRCSKNQQPQINEEISHLISFCLYHTPVTPQELRDLWSLLHHQKVSPEEITSLWSELFNSMFMSFWSSTVTTNPEYWLMWNPLPGMQQREAPKSVLDSTLKGPGNLNRPIFSKCCFEVLTSSWRASPWDVSGLPILSSSHVTLGEWVERTQQLQDISSMLWTNMAISSVAEFRRTDSQLQGQVLFRHLAGLAELLPESRRQEYMQNCEQLLLGSSQAFQHVGQTLGDMAGQEVLPKELLCQLLTSLHHFVGEGESKRSLPEPAQRGSLWVSLGLLQIQTWLPQARFDPAVKREYKLNYVKEELHQLQCEWKTRNLSSQLQTGRDLEDEVVVSYSHPHVRLLRQRMDRLDNLTCHLLKKQAFRPQLPAYESLVQEIHHYVTSIAKAPAVQDLLTRLLQALHIDGPRSAQVAQSLLKEEASWQQSHHQFRKRLSEEYTFYPDAVSPLQASILQLQHGMRLVASELHTSLHSSMVGADRLGTLATALLAFPSVGPTFPTYYAHADTLCSVKSEEVLRGLGKLILKRSGGKELEGKGQKACPTREQLLMNALLYLRSHVLCKGELDQRALQLFRHVCQEIISEWDEQERIAQEKAEQESGLYRYRSRNSRTALSEEEEEEREFRKQFPLHEKDFADILVQPTLEENKGTSDGQEEEAGTNPALLSQNSMQAVMLIHQQLCLNFARSLWYQQTLPPHEAKHYLSLFLSCYQTGASLVTHFYPLMGVELNDRLLGSQLLACTLSHNTLFGEAPSDLMVKPDGPYDFYQHPNVPEARQCQPVLQGFSEAVSHLLQDWPEHPALEQLLVVMDRIRSFPLSSPISKFLNGLEILLAKAQDWEENASRALSLRKHLDLISQMIIRWRKLELNCWSMSLDNTMKRHTEKSTKHWFSIYQMLEKHMQEQTEEQEDDKQMTLMLLVSTLQAFIEGSSLGEFHVRLQMLLVFHCHVLLMPQVEGKDSLCSVLWNLYHYYKQFFDRVQAKIVELRSPLEKELKEFVKISKWNDVSFWSIKQSVEKTHRTLFKFMKKFEAVLSEPCRSSLVESDKEEQPDFLPRPTDGAASELSSIQNLNRALRETLLAQPAAGQATIPEWCQGAAPSGLEGELLRRLPKLRKRMRKMCLTFMKESPLPRLVEGLDQFTGEVISSVSELQSLKVEPSAEKEKQRSEAKHILMQKQRALSDLFKHLAKIGLSYRKGLAWARSKNPQEMLHLHPLDLQSALSIVSSTQEADSRLLTEISSSWDGCQKYFYRSLARHARLNAALATPAKEMGMGNVERCRGFSAHLMKMLVRQRRSLTTLSEQWIILRNLLSCVQEIHSRLMGPQAYPVAFPPQDGVQQWTERLQHLAMQCQILLEQLSWLLQCCPSVGPAPGHGNVQVLGQPPGPCLEGPELSKGQLCGVVLDLIPSNLSYPSPIPGSQLPSGCRMRKQDHLWQQSTTRLTEMLKTIKTVKADVDKIRQQSCETLFHSWKDFEVCSSALSCLSQVSVHLQGLESLFILPGMEVEQRDSQMALVESLEYVRGEISKAMADFTTWKTHLLTSDSQGGNQMLDEGFVEDFSEQMEIAIRAILCAIQNLEERKNEKAEENTDQASPQEDYAGFERLQSGHLTKLLEDDFWADVSTLHVQKIISAISELLERLKSYGEDGTAAKHLFFSQSCSLLVRLVPVLSSYSDLVLFFLTMSLATHRSTAKLLSVLAQVFTELAQKGFCLPKEFMEDSAGEGATEFHDYEGGGIGEGEGMKDVSDQIGNEEQVEDTFQKGQEKDKEDPDSKSDIKGEDNAIEMSEDFDGKMHDGELEEQEEDDEKSDSEGGDLDKHMGDLNGEEADKLDERLWGDDDEEEDEEEEDNKTEETGPGMDEEDSELVAKDDNLDSGNSNKDKSQQDKKEEKEEAEADDGGQGEDKINEQIDERDYDENEVDPYHGNQEKVPEPEALDLPDDLNLDSEDKNGGEDTDNEEGEEENPLEIKEKPEEAGHEAEERGETETDQNESQSPQEPEEGPSEDDKAEGEEEMDTGADDQDGDAAQHPEEHSEEQQQSVEEKDKEADEEGGENGPADQGFQPQEEEEREDSDTEEQVPEALERKEHASCGQTGVENMQNTQAMELAGAAPEKEQGKEEHGSGAADANQAEGHESNFIAQLASQKHTRKNTQSFKRKPGQADNERSMGDHNERVHKRLRTVDTDSHAEQGPAQQPQAQVEDADAFEHIKQGSDAYDAQTYDVASKEQQQSAKDSGKDQEEEEIEDTLMDTEEQEEFKAADVEQLKPEEIKSGTTAPLGFDEMEVEIQTVKTEEDQDPRTDKAHKETENEKPERSRESTIHTAHQFLMDTIFQPFLKDVNELRQELERQLEMWQPRESGNPEEEKVAAEMWQSYLILTAPLSQRLCEELRLILEPTQAAKLKGDYRTGKRLNIRKVIPYIASQFRKDKIWLRRTKPSKRQYQICLAIDDSSSMVDNHTKQLAFESLAVIGNALTLLEVGQIAVCSFGESVKLLHPFHEQFSDYSGSQILRLCKFQQKKTKIAQFLESVANMFAAAQQLSQNISSETAQLLLVVSDGRGLFLEGKERVLAAVQAARNANIFVIFVVLDNPSSRDSILDIKVPIFKGPGEMPEIRSYMEEFPFPYYIILRDVNALPETLSDALRQWFELVTASDHP

SEQ ID NO: 1416 - DNA, 982 bp, Homo sapiens
agacaattttcagcaggaagaagtagaaaggataaaatggatcctgcaccacgggaacctcacagcacctcacttcttttggttttctttctctttggggcacctctggactcactccccagcatgaaggcgctgagcccggtgcgcggctgctacgaggcggtgtgctgcctgtcggaacgcagtctggccatcgcccggggccgagggaagggcccggcagctgaggagccgctgagcttgctggacgacatgaaccactgctactcccgcctgcgggaactggtacccggagtcccgagaggcactcagcttagccaggtggaaatcctacagcgcgtcatcgactacattctcgacctgcaggtagtcctggccgagccagcccctggaccccctgatggcccccaccttcccatccagacagccgagctcgctccggaacttgtcatctccaacgacaaaaggagcttttgccactgactcggccgtgtcctgacacctccagaacgcaggtgctggcgcccgttctgcctgggaccccgggaacctctcctgccggaagccggacggcagggatgggccccaacttcgccctgcccacttgacttcaccaaatcccttcctggagactgaacctggtgctcaggagcgaaggactgtgaacttgtggcctgaagagccagagctagctctggccaccagctgggcgacgtcaccctgctcccaccccaccccaagttctaaggtcttttcagagcgtggaggtgtggaaggagtggctgctctccaaactatgccaaggcggcggcagagctggtcttctggtctccttggagaaaggttctgttgccctgatttatgaactctataatagagtatataggttttgtaccttttttacaggaaggtgactttctgtaacaatgcgatgtatattaaactttttataaaagttaacattttgcataataaacgattt

SEQ ID NO: 1417 - protein, 148 aa, Homo sapiens
MDPAPREPHSTSLLLVFFLFGAPLDSLPSMKALSPVRGCYEAVCCLSERSLAIARGRGKGPAAEEPLSLLDDMNHCYSRLRELVPGVPRGTQLSQVEILQRVIDYILDLQVVLAEPAPGPPDGPHLPIQTAELAPELVISNDKRSFCH

SEQ ID NO: 1418 - DNA, 2428 bp, Homo sapiens
gggagcgcggcgcggccgccgcgtgcgcgagccggggttgcagcccagccgggactttccagccggcggcagccgcggcggccgccggctcttccccgccccccgtcatggggcagcccggggagcagaacgctgcggaccgcggcggaggacgcgcccggcgcccctgagccggccgagcggcgacggaccgcgagaactcctctttcctaaaatggagtcgagtaaaaagatggactctcctggcgcgctgcagactaacccgccgctaaagctgcacactgaccgcagtgctgggacgccagtttttgtccctgaacaaggaggttacaaggaaaagtttgtgaagaccgtggaggacaagtacaagtgtgagaagtgccacctggtgctgtgcagcccgaagcagaccgagtgtgggcaccgcttctgcgagagctgcatggcggccctgctgagctcttcaagtccaaaatgtacagcgtgtcaagagagcatcgttaaagataaggtgtttaaggataattgctgcaagagagaaattctggctcttcagatctattgtcggaatgaaagcagaggttgtgcagagcagttaatgctgggacatctgctggtgcatttaaaaaatgattgccattttgaagaacttccatgtgtgcgtcctgactgcaaagaaaaggtcttgaggaaagacctgcgagaccacgtggagaaggcgtgtaaataccgggaagccacatgcagccactgcaagagtcaggttccgatgatcgcgctgcagaaacacgaagacaccgactgtccctgcgtggtggtgtcctgccctcacaagtgcagcgtccagactctcctgaggagcgagttgagtgcacacttgtcagagtgtgtcaatgcccccagcacctgtagttttaagcgctatggctgcgtttttcaggggacaaaccagcagatcaaggcccacgaggccagctccgccgtgcagcacgtcaacctgctgaaggagtggagcaactcgctcgaaaagaaggtttccttgttgcagaatgaaagtgtagaaaaaaacaagagcatacaaagtttgcacaatcagatatgtagctttgaaattgaaattgagagacaaaaggaaatgcttcgaaataatgaatccaaaatccttcatttacagcgagtgatagacagccaagcagagaaactgaaggagcttgacaaggagatccggcccttccggcagaactgggaggaagcagacagcatgaagagcagcgtggagtccctccagaaccgcgtgaccgagctggagagcgtggacaagagcgcggggcaagtggctcggaacacaggcctgctggagtcccagctgagccggcatgaccagatgctgagtgtgcacgacatccgcctagccgacatggacctgcgcttccaggtcctggagaccgccagctacaatggagtgctcatctggaagattcgcgactacaagcggcggaagcaggaggccgtcatggggaagaccctgtccctttacagccagcctttctacactggttactttggctataagatgtgtgccagggtctacctgaacggggacgggatggggaaggggacgcacttgtcgctgttttttgtcatcatgcgtggagaatatgatgccctgcttccttggccgtttaagcagaaagtgacactcatgctgatggatcaggggtcctctcgacgtcatttgggagatgcattcaagcccgaccccaacagcagcagcttcaagaagcccactggagagatgaatatcgcctctggctgcccagtctttgtggcccaaactgttctagaaaatgggacatatattaaagatgatacaatttttattaaagtcatagtggatacttcggatctgcccgatccctgataagtagctggggaggtggatttagcagaaggcaactcctctgggggatttgaaccggtctgtcttcactgaggtcctcgcgctcagaaaaggaccttgtgagacggaggaagcggcagaaggcggacgcgtgccggcgggaggagccacgcgtgagcacacctgacacgttttataatagactagccacacttcactctgaagaattatttatccttcaacaagataaatattgctgtcagagaaggttttcattttcatttttaaagatctagttaattaaggtggaaaacatatatgctaaacaaaagaaacatgatttttcttccttaaacttgaacaccaaaaaaacacacacacacacacacgtggggatagctggacatgtcagcatgttaagtaaaaggagaatttatgaaatagtaatgcaattctgatatcttctttctaaaattcaagagtgcaattttgtttcaaatacagtatattgtctatttttaaggcctc

SEQ ID NO: 1419 - protein, 568 aa, Homo sapiens
MESSKKMDSPGALQTNPPLKLHTDRSAGTPVFVPEQGGYKEKFVKTVEDKYKCEKCHLVLCSPKQTECGHRFCESCMAALLSSSSPKCTACQESIVKDKVFKDNCCKREILALQIYCRNESRGCAEQLMLGHLLVHLKNDCHFEELPCVRPDCKEKVLRKDLRDHVEKACKYREATCSHCKSQVPMIALQKHEDTDCPCVVVSCPHKCSVQTLLRSELSAHLSECVNAPSTCSFKRYGCVFQGTNQQIKAHEASSAVQHVNLLKEWSNSLEKKVSLLQNESVEKNKSIQSLHNQICSFEIEIERQKEMLRNNESKILHLQRVIDSQAEKLKELDKEIRPFRQNWEEADSMKSSVESLQNRVTELESVDKSAGQVARNTGLLESQLSRHDQMLSVHDIRLADMDLRFQVLETASYNGVLIWKIRDYKRRKQEAVMGKTLSLYSQPFYTGYFGYKMCARVYLNGDGMGKGTHLSLFFVIMRGEYDALLPWPFKQKVTLMLMDQGSSRRHLGDAFKPDPNSSSFKKPTGEMNIASGCPVFVAQTVLENGTYIKDDTIFIKVIVDTSDLPDP

SEQ ID NO: 1420 - DNA, 2567 bp, Homo sapiens
gggagcgcggcgcggccgccgcgtgcgcgagccggggttgcagcccagccgggactttccagccggcggcagccgcggcggccgccggctcttccccgccccccgtcatggggcagcccggggagcagaacgctgcggaccgcggcggaggacgcgcccggcgcccctgagccggccgagcggcgacggaccgcgagatgaggaaaatgaggcccaaagaagtgatgccacttggttaaggtcccagagcaggtcagaatcagacctaggatcagaaacctggctcctggctcctggctccctactcttctaaggatcgctgtcctgacagaagagaactcctctttcctaaaatggagtcgagtaaaaagatggactctcctggcgcgctgcagactaacccgccgctaaagctgcacactgaccgcagtgctgggacgccagtttttgtccctgaacaaggaggttacaaggaaaagtttgtgaagaccgtggaggacaagtacaagtgtgagaagtgccacctggtgctgtgcagcccgaagcagaccgagtgtgggcaccgcttctgcgagagctgcatggcggccctgctgagctcttcaagtccaaaatgtacagcgtgtcaagagagcatcgttaaagataaggtgtttaaggataattgctgcaagagagaaattctggctcttcagatctattgtcggaatgaaagcagaggttgtgcagagcagttaatgctgggacatctgctggtgcatttaaaaaatgattgccattttgaagaacttccatgtgtgcgtcctgactgcaaagaaaaggtcttgaggaaagacctgcgagaccacgtggagaaggcgtgtaaataccgggaagccacatgcagccactgcaagagtcaggttccgatgatcgcgctgcagaaacacgaagacaccgactgtccctgcgtggtggtgtcctgccctcacaagtgcagcgtccagactctcctgaggagcgagttgagtgcacacttgtcagagtgtgtcaatgcccccagcacctgtagttttaagcgctatggctgcgtttttcaggggacaaaccagcagatcaaggcccacgaggccagctccgccgtgcagcacgtcaacctgctgaaggagtggagcaactcgctcgaaaagaaggtttccttgttgcagaatgaaagtgtagaaaaaaacaagagcatacaaagtttgcacaatcagatatgtagctttgaaattgaaattgagagacaaaaggaaatgcttcgaaataatgaatccaaaatccttcatttacagcgagtgatagacagccaagcagagaaactgaaggagcttgacaaggagatccggcccttccggcagaactgggaggaagcagacagcatgaagagcagcgtggagtccctccagaaccgcgtgaccgagctggagagcgtggacaagagcgcggggcaagtggctcggaacacaggcctgctggagtcccagctgagccggcatgaccagatgctgagtgtgcacgacatccgcctagccgacatggacctgcgcttccaggtcctggagaccgccagctacaatggagtgctcatctggaagattcgcgactacaagcggcggaagcaggaggccgtcatggggaagaccctgtccctttacagccagcctttctacactggttactttggctataagatgtgtgccagggtctacctgaacggggacgggatggggaaggggacgcacttgtcgctgttttttgtcatcatgcgtggagaatatgatgccctgcttccttggccgtttaagcagaaagtgacactcatgctgatggatcaggggtcctctcgacgtcatttgggagatgcattcaagcccgaccccaacagcagcagcttcaagaagcccactggagagatgaatatcgcctctggctgcccagtctttgtggcccaaactgttctagaaaatgggacatatattaaagatgatacaatttttattaaagtcatagtggatacttcggatctgcccgatccctgataagtagctggggaggtggatttagcagaaggcaactcctctgggggatttgaaccggtctgtcttcactgaggtcctcgcgctcagaaaaggaccttgtgagacggaggaagcggcagaaggcggacgcgtgccggcgggaggagccacgcgtgagcacacctgacacgttttataatagactagccacacttcactctgaagaattatttatccttcaacaagataaatattgctgtcagagaaggttttcattttcatttttaaagatctagttaattaaggtggaaaacatatatgctaaacaaaagaaacatgatttttcttccttaaacttgaacaccaaaaaaacacacacacacacacacgtggggatagctggacatgtcagcatgttaagtaaaaggagaatttatgaaatagtaatgcaattctgatatcttctttctaaaattcaagagtgcaattttgtttcaaatacagtatattgtctatttttaaggcctc

SEQ ID NO: 1421 - DNA, 2492 bp, Homo sapiens
gggagcgcggcgcggccgccgcgtgcgcgagccggggttgcagcccagccgggactttccagccggcggcagccgcggcggccgccggctcttccccgccccccgtcatggggcagcccggggagcagaacgctgcggaccgcggcggaggacgcgcccggcgcccctgagccggccgagcggcgacggaccgcgagatgaggaaaatgaggcccaaagaagtgatgccacttggttaaggtcccagagcaggtcagaatcagacctaggatcagaaacctggctcctggctcctggctccctactcttctaaggatcgctgtcctgacagaagagaactcctctttcctaaaatggagtcgagtaaaaagatggactctcctggcgcgctgcagactaacccgccgctaaagctgcacactgaccgcagtgctgggacgccagtttttgtccctgaacaaggaggttacaaggaaaagtttgtgaagaccgtggaggacaagtacaagtgtgagaagtgccacctggtgctgtgcagcccgaagcagaccgagtgtgggcaccgcttctgcgagagctgcatggcggccctgctgagctcttcaagtccaaaatgtacagcgtgtcaagagagcatcgttaaagataaggtgtttaaggataattgctgcaagagagaaattctggctcttcagatctattgtcggaatgaaagcagaggttgtgcagagcagttaatgctgggacatctgctggtgcatttaaaaaatgattgccattttgaagaacttccatgtgtgcgtcctgactgcaaagaaaaggtcttgaggaaagacctgcgagaccacgtggagaaggcgtgtaaataccgggaagccacatgcagccactgcaagagtcaggttccgatgatcgcgctgcagaaacacgaagacaccgactgtccctgcgtggtggtgtcctgccctcacaagtgcagcgtccagactctcctgaggagcgaggggacaaaccagcagatcaaggcccacgaggccagctccgccgtgcagcacgtcaacctgctgaaggagtggagcaactcgctcgaaaagaaggtttccttgttgcagaatgaaagtgtagaaaaaaacaagagcatacaaagtttgcacaatcagatatgtagctttgaaattgaaattgagagacaaaaggaaatgcttcgaaataatgaatccaaaatccttcatttacagcgagtgatagacagccaagcagagaaactgaaggagcttgacaaggagatccggcccttccggcagaactgggaggaagcagacagcatgaagagcagcgtggagtccctccagaaccgcgtgaccgagctggagagcgtggacaagagcgcggggcaagtggctcggaacacaggcctgctggagtcccagctgagccggcatgaccagatgctgagtgtgcacgacatccgcctagccgacatggacctgcgcttccaggtcctggagaccgccagctacaatggagtgctcatctggaagattcgcgactacaagcggcggaagcaggaggccgtcatggggaagaccctgtccctttacagccagcctttctacactggttactttggctataagatgtgtgccagggtctacctgaacggggacgggatggggaaggggacgcacttgtcgctgttttttgtcatcatgcgtggagaatatgatgccctgcttccttggccgtttaagcagaaagtgacactcatgctgatggatcaggggtcctctcgacgtcatttgggagatgcattcaagcccgaccccaacagcagcagcttcaagaagcccactggagagatgaatatcgcctctggctgcccagtctttgtggcccaaactgttctagaaaatgggacatatattaaagatgatacaatttttattaaagtcatagtggatacttcggatctgcccgatccctgataagtagctggggaggtggatttagcagaaggcaactcctctgggggatttgaaccggtctgtcttcactgaggtcctcgcgctcagaaaaggaccttgtgagacggaggaagcggcagaaggcggacgcgtgccggcgggaggagccacgcgtgagcacacctgacacgttttataatagactagccacacttcactctgaagaattatttatccttcaacaagataaatattgctgtcagagaaggttttcattttcatttttaaagatctagttaattaaggtggaaaacatatatgctaaacaaaagaaacatgatttttcttccttaaacttgaacaccaaaaaaacacacacacacacacacgtggggatagctggacatgtcagcatgttaagtaaaaggagaatttatgaaatagtaatgcaattctgatatcttctttctaaaattcaagagtgcaattttgtttcaaatacagtatattgtctatttttaaggcctc

SEQ ID NO: 1422 - protein, 543 aa, Homo sapiens
MESSKKMDSPGALQTNPPLKLHTDRSAGTPVFVPEQGGYKEKFVKTVEDKYKCEKCHLVLCSPKQTECGHRFCESCMAALLSSSSPKCTACQESIVKDKVFKDNCCKREILALQIYCRNESRGCAEQLMLGHLLVHLKNDCHFEELPCVRPDCKEKVLRKDLRDHVEKACKYREATCSHCKSQVPMIALQKHEDTDCPCVVVSCPHKCSVQTLLRSEGTNQQIKAHEASSAVQHVNLLKEWSNSLEKKVSLLQNESVEKNKSIQSLHNQICSFEIEIERQKEMLRNNESKILHLQRVIDSQAEKLKELDKEIRPFRQNWEEADSMKSSVESLQNRVTELESVDKSAGQVARNTGLLESQLSRHDQMLSVHDIRLADMDLRFQVLETASYNGVLIWKIRDYKRRKQEAVMGKTLSLYSQPFYTGYFGYKMCARVYLNGDGMGKGTHLSLFFVIMRGEYDALLPWPFKQKVTLMLMDQGSSRRHLGDAFKPDPNSSSFKKPTGEMNIASGCPVFVAQTVLENGTYIKDDTIFIKVIVDTSDLPDP

SEQ ID NO: 1423 - DNA, 2631 bp, Homo sapiens
ggcacgaggaacaacctatttgcaaagttggcgcaaacattcctgcctgacaggaccatggacacaggttgtagagatagagatggctctggctgtgcattcagcagattctgtagatagaattaataggacttggatgggattgtggtgagagaaagtgaaatgaaagataagttctagtttggaagttttaacaactgaatgtttaaactcaaatagacacaaaatattggaagagtggcaggtttgggaggatgagacaatcaactgtttggttgagccacgttaggtttgaaatgtctacgggatcccgtggggagaggttatatcagactggagcaccagagagaggccaaggctgatagtttagatgaaaagagagcatgatattttaagccctgagactggataatatcacctatagaaagactatatagagataagagaggtggggaacaagtaaaagctgcgggacactcctaaatttagagtcaaatttagagcagaaaatactagcaaaggggactgaaaagcggtggccaattgagcttcaaatgcaagtgaaagtgtgttgtgtgtacatttatcatctcatggcacaggaaaaacgtgatttaaggagaaggaagcgatccaatgggaagaagagatccaatggatcctctatcacgaagatattgagataagaaccaatatggatttgcacccactgcatttgcagccttgaggtcataagcatcctcaggaaaatgcaccaggtgctgctggcaagatggaaaccaacttctccactcctctgaatgaatatgaagaagtgtcctatgagtctgctggctacactgttctgcggatcctcccattggtggtgcttggggtcacctttgtcctcggggtcctgggcaatgggcttgtgatctgggtggctggattccggatgacacgcacagtcaccaccatctgttacctgaacctggccctggctgacttttctttcacggccacattaccattcctcattgtctccatggccatgggagaaaaatggccttttggctggttcctgtgtaagttaattcacatcgtggtggacatcaacctctttggaagtgtcttcttgattggtttcattgcactggaccgctgcatttgtgtcctgcatccagtctgggcccagaaccaccgcactgtgagtctggccatgaaggtgatcgtcggaccttggattcttgctctagtccttaccttgccagttttcctctttttgactacagtaactattccaaatggggacacatactgtactttcaactttgcatcctggggtggcacccctgaggagaggctgaaggtggccattaccatgctgacagccagagggattatccggtttgtcattggctttagcttgccgatgtccattgttgccatctgctatgggctcattgcagccaagatccacaaaaagggcatgattaaatccagccgtcccttacgggtcctcactgctgtggtggcttctttcttcatctgttggtttccctttcaactggttgcccttctgggcaccgtctggctcaaagagatgttgttctatggcaagtacaaaatcattgacatcctggttaacccaacgagctccctggccttcttcaacagctgcctcaaccccatgctttacgtctttgtgggccaagacttccgagagagactgatccactccctgcccaccagtctggagagggccctgtctgaggactcagccccaactaatgacacggctgccaattctgcttcacctcctgcagagactgagttacaggcaatgtgaggatggggtcagggatattttgagttctgttcatcctaccctaatgccagttccagcttcatctacccttgagtcatattgaggcattcaaggatgcacagctcaagtatttattcaggaaaaatgcttttgtgtccctgatttggggctaagaaatagacagtcaggctactaaaatattagtgttattttttgttttttgacttctgcctataccctggggtaagtggagttgggaaatacaagaagagaaagaccagtggggatttgtaagacttagatgagatagcgcataataaggggaagactttaaagtataaagtaaaatgtttgctgtaggttttttatagctattaaaaaaaatcagattatggaagttttcttctatttttagtttgctaagagttttctgtttctttttcttacatcatgagtggactttgcattttatcaaatgcattttctacatgtattaagatggtcatattattcttcttcttttatgtaaatcattataaataatgttcattaagttctgaatgttaaactactcttgaattcctggaataaaccacacttagtcctgatgtactttaaatatttatatctcacaggagttggttagaatttctgtgtttatgtttatatactgttatttcactttttctactatccttgctaagttttcatagaaaataaggaacaaagagaaacttgtaatggtctctgaaaaggaattgagaagtaattcctctgattctgttttctggtgttatatctttattaaatattcagaaaaattc

SEQ ID NO: 1424 - protein, 351 aa, Homo sapiens
METNFSTPLNEYEEVSYESAGYTVLRILPLVVLGVTFVLGVLGNGLVIWVAGFRMTRTVTTICYLNLALADFSFTATLPFLIVSMAMGEKWPFGWFLCKLIHIVVDINLFGSVFLIGFIALDRCICVLHPVWAQNHRTVSLAMKVIVGPWILALVLTLPVFLFLTTVTIPNGDTYCTFNFASWGGTPEERLKVAITMLTARGIIRFVIGFSLPMSIVAICYGLIAAKIHKKGMIKSSRPLRVLTAVVASFFICWFPFQLVALLGTVWLKEMLFYGKYKIIDILVNPTSSLAFFNSCLNPMLYVFVGQDFRERLIHSLPTSLERALSEDSAPTNDTAANSASPPAETELQAM

SEQ ID NO: 1425 - DNA, 2435 bp, Homo sapiens
cgccgtcggggcggagcggtgtcgcgaggctgcatcccggccggcggttccggagcctcgcgtctggggaggcgcggcccgggacgctcgagcttagggagatctgccttctggagactgcgccgtcctcccgggagagccagaaagaggacatggctgctgggcagcgggaagcgaggccccaggtgtcactgacgtttgaggatgtggctgtgctgtttacccgagatgagtggagaaagctggccccttctcagagaaacttgtaccgggatgtgatgctggagaactataggaacctggtctcactggggctcccatttaccaaaccaaaagtgatctccctgttgcagcaaggagaagatccctgggaggtggagaaagacggttctggcgtctcctctctaggatcgaagagcagtcataaaaccacaaagtcaacgcaaacacaagactcttcatttcagggactgatactgaaaagatccaacaggaatgtaccttgggatttgaaattagaaaagccttacatatatgaaggcagattagagaaaaagcaggataaaaagggaagttttcagatagtttcagccacccacaaaaaaatccccactatagaaagaagccataaaaatactgaattgagccaaaacttcagcccaaagtcagtgcttattaggcaacagatacttcccagagaaaaaacaccaccaaaatgtgaaatacaaggaaacagcctcaaacagaattcacaattacttaatcaaccaaaaattacagcagataaacgctataaatgtagtctgtgtgaaaaaaccttcattaacacttcatcccttcgtaaacatgagaaaaaccatagtggagagaaactatttaagtgtaaagaatgttcaaaagcctttagccaaagttcagctcttattcaacatcaaataacacatactggagagaaaccctacatatgtaaagaatgtgggaaagcctttactctcagtacatccctttataaacatctaagaacccatactgtggagaaatcctacagatgtaaagaatgtggtaaatccttcagccgaaggtcaggcctttttatacatcaaaaaattcatgctgaagaaaacccttgtaagtataatccgggtaggaaggcatctagttgcagcacatccctttctggatgtcaaagaattcattctagaaagaagtcctacttatgtaatgaatgtggcaacacctttaagtctagctcatcccttcgttatcatcagagaattcacactggagagaagccttttaaatgtagtgaatgtgggagagccttcagccagagtgcctctcttattcaacatgaaagaattcacaccggagaaaagccctatagatgcaatgaatgtgggaaaggctttacttctatttcacgacttaatagacaccgaatcattcatactggagagaagtattataattgtaatgaatgtggtaaagccttaagctcccactcaacacttattattcacgagcgaattcatactggagaaaaaccatgtaaatgtaaagtatgtggaaaagccttcagacagagttcagctctcattcaacatcagagaatgcatactggagaaagaccctataaatgtaacgagtgtgggaaaacattcaggtgtaactcatcacttagtaatcaccagagaattcatactggagagaaaccatatcgatgtgaggaatgtgggatatcttttggccaaagttcagctcttattcagcatcgaaggattcatacaggagaaaaaccctttaaatgtaatacatgtggaaaaacttttagacaaagctcatcacgtattgcacatcagagaattcatactggagagaaaccctatgaatgtaatacatgtgggaaacttttcaaccataggtcatcccttactaatcattataaaattcatatcgaagaggacccctagaaagtagatttgtatgtgtgaaagccttaaaccaaagctcatcgaagaatacatccttgagagagatgtaataaatgtaatggatgtgaaaaaaactgtaataatttagccctcattaggtatttaatcccatggataaacctcagctatataatagatatgaggaaagtgtttgtgcctgtcagacacttaaaaaaataacctgagatgaagaatttacaattgaagacattgactttagccatttgtgaaatgggtttgctttttcccttttcctacagacgtatatgctagatgtcacgtgatcatcagaaacagatatccgagtgggtggggaggtgtgctttagatttctcattagaagaccaccaaactggtaatatttttatagcattttaatagcttgatcaaattgtacctttttagagaaaaggaccaaaataaaagaaaaatgaattatgaact

SEQ ID NO: 1426 - protein, 605 aa, Homo sapiens
MAAGQREARPQVSLTFEDVAVLFTRDEWRKLAPSQRNLYRDVMLENYRNLVSLGLPFTKPKVISLLQQGEDPWEVEKDGSGVSSLGSKSSHKTTKSTQTQDSSFQGLILKRSNRNVPWDLKLEKPYIYEGRLEKKQDKKGSFQIVSATHKKIPTIERSHKNTELSQNFSPKSVLIRQQILPREKTPPKCEIQGNSLKQNSQLLNQPKITADKRYKCSLCEKTFINTSSLRKHEKNHSGEKLFKCKECSKAFSQSSALIQHQITHTGEKPYICKECGKAFTLSTSLYKHLRTHTVEKSYRCKECGKSFSRRSGLFIHQKIHAEENPCKYNPGRKASSCSTSLSGCQRIHSRKKSYLCNECGNTFKSSSSLRYHQRIHTGEKPFKCSECGRAFSQSASLIQHERIHTGEKPYRCNECGKGFTSISRLNRHRIIHTGEKYYNCNECGKALSSHSTLIIHERIHTGEKPCKCKVCGKAFRQSSALIQHQRMHTGERPYKCNECGKTFRCNSSLSNHQRIHTGEKPYRCEECGISFGQSSALIQHRRIHTGEKPFKCNTCGKTFRQSSSRIAHQRIHTGEKPYECNTCGKLFNHRSSLTNHYKIHIEEDP

SEQ ID NO: 1427 - DNA, 5307 bp, Homo sapiens
  misc_feature (4242)..(4242): n is a, c, g, or t
  misc_feature (4471)..(4471): n is a, c, g, or t
  misc_feature (4523)..(4523): n is a, c, g, or t
  misc_feature (4529)..(4529): n is a, c, g, or t
  misc_feature (4531)..(4531): n is a, c, g, or t
  misc_feature (4545)..(4545): n is a, c, g, or t
attccctcggcgggccgagcctcccctctctcccgcccctcctcctccctttcccacccctcggagtagagctgcacatgcggctgctccctgctccgtcccgcccagccactgtcgcgcaggaacgggtccctgcagcccccagccgatggcaggacagtagccgcctgtcagaggtcgtgaacggctgaggcagacgcagcggctcccgggcctcaagagagtggatgtctccggaggccatgggctacccggaggtggagcgcagggaactcctgcctgcagcagcgccgcgggagcgagggagccagggctgcgggtgtggcggggcccctgcccgggcgggcgaagggaacagctgcctgctcttcctgggtttctttggcctctcgctggccctccacctgctgacgttgtgctgctacctagagttgcgctcggagttgcggcgggaacgtggagccgagtcccgccttggcggctcgggcacccctggcacctctggcaccctaagcagcctcggtggcctcgaccctgacagccccatcaccagtcaccttgggcagccgtcacctaagcagcagccattggaaccgggagaagccgcactccactctgactcccaggacgggcaccagatggccctattgaatttcttcttccctgatgaaaagccatactctgaagaagaaagtaggcgtgttcgccgcaataaaagaagcaaaagcaatgaaggagcagatggcccagttaaaaacaagaaaaagggaaagaaagcaggacctcctggacccaatggccctccaggacccccaggacctccaggaccccagggacccccaggaattccagggattcctggaattccaggaacaactgttatgggaccacctggtcctccaggtcctcctggtcctcaaggaccccctggcctccagggaccttctggtgctgctgataaagctggaactcgagaaaaccagccagctgtggtgcatctacagggccaagggtcagcaattcaagtcaagaatgatctttcaggtggagtgctcaatgactggtctcgcatcactatgaaccccaaggtgtttaagctacatccccgcagcggggagctggaggtactggtggacggcacctacttcatctatagtcaggtagaagtatactacatcaacttcactgactttgccagctatgaggtggtggtggatgagaagcccttcctgcagtgcacacgcagcatcgagacgggcaagaccaactacaacacttgctataccgcaggcgtctgcctcctcaaggcccggcagaagatcgccgtcaagatggtgcacgctgacatctccatcaacatgagcaagcacaccacgttctttggggccatcaggctgggtgaagcccctgcatcctagattccccccattttgcctctgtccgtgccccttccctgggtttgggagccaggactcccagaacctctaagtgctgctgtggagtgaggtgtattggtgttgcagccgcagagaaatgccccagtgttatttattccccagtgactccagggtgacaaggcctgcttgactttccagaatgaccttgagttaacaggacagttgatggagccccagggtttacatgaagcagaaccttctttggttccatgttgactgacttatggcatgactcttcaaccccgaggtccctgttgtcagatctattgtttgttgcactaaaatgaggatccagggcagcaggccagagaaagcaaaggtgcactccagactctgggggtggacatctgaccccaagggggctgctgctcctctcttgggtagggtagtggctggggtggagtgggaagkgagcattgcagcctaagaagaaggccagagagggaaaaggcaggtgcttttggcagagaccataagagaaacctgccaaggagcatccttggcagtgggaatgttctttctgctctatactgtggcctgcaggagggttggagtgctcttcccactccagctgacagccacaccgtggcagcttgctgggctttgggaagtttgctgtgctttggaacaatcacagggaatggccacaaacctgcccgcctaagaccctgaatccgtacttgggtcacatgactctcattttatttacagctgtgctccacactcagaaaattccctggggtcaccttctagttgcccccattcccagcctgactagaactcctgtcttctttctccatggagcctacctctgtctgagacaggtgcctaacctgggacctgtggtcatgtgagtctgggatattctttagcttacctgggcacagacagaattttccatttattaagcagtacagatgtttttcatccattcctaatcaaattctgtctggggacgaagggttggacgggatgacctccagaagtcccttcaatttctagtacctgtgactcttagccctcaccacagccttctaaattcccaaatcctagactgctcctgggcattagcaaggcagagcctttttacctggcctagaaagggcaaggggtgaggataggacagagggattttgttcaagtttgctgcaacccaagtggacgttaggccaggccttatctgaaaggccagcagctgatgctgtactaacccagtctttcttcactctggcttcaaaaagccacagcagagcattgtcaccgcaggtccccatgctgctcccctaaagccaggctcaggagaagccagtgtctaggcactgagcagggatctgccccctagttcaggtccaaattcaccttcccctaaaccccaagcttcccaacagatcatatggtaggaccctcgagagccttacttcaaagtgcctgggctcagcctggtttctgggtgctagatccagcccaaacctgggaaggccagccttgtacagtctgctcctcttgttcctgaaatgtgtttccttttcaggagatggggaataatttccttcaggcagctgaaattcaccaagaacagcgggtacttatttctcaagctgtgccttccctttctaagcaaccacactgcttggcccttcaagggtcagggtgagacgtgatgggctaggcctccgttgtctggttgctaatgacagccttgcaacccaaggtgaggtgaactccaggcatgtgtctggccctaactcctataaagtgcctcggacagtccgcagttgtagcagaaaccaacaagaaccactccttcatgtttggaaaataatttctcttgtattatctcctttgaagaaggcaaggctgataatatgacaaacatcattgtttagatgaggctcagagaggtagcactctcagagtgttttgaccagtttaagccgcagacctggagcttcagccaggtctgactccaaagctgttccattacaccacagcattgtgtggaatttgaggtctagagagaaccaataaaagtggtaattgggaactgaaatccttgagagttccggggagaaacccagagatgcctgatttcattcctcgatggtaatacccgtcctctcggctgccaggggctctgtggcaaaaagagtcagacatttctttggaaaacagcgaacagccttagagctcttgtgttcagaagaatcttcctggcacaatgttggagcagcaggcctctgggacccacagaacttgtggcctttatgttctttcacccatcctaggaaccagccaaccatcatgtgtagagcccctactgtgggcaaagtcctcctttcattaccctacagacagcttacaggagccagcctgcttcccacaactactagtgtgactccttatctctttccaccataccttagagactttgatactaccagggtctctcagggatggagggaagacctgaaagagaggactggttctgaggccagaaaggtgtgaggagagaggaggaaaagtcttcctaattgtgcccctaaagagcatcctgataccattctattctccagacatggaggggatgataaaggaaataggatctccactggacccttgattcattctgaaccctccaaaggaactctaagagggcgagggatgatgagggaagcaataggtagctggggagccctattgctgctaagtcattggcaaagtgcaaagcaatttactgatgagagaatgtggaaatagatgtgcagtttggaattatgttggtgtnaatttgccagaggaccaatgcttgcatggagaatggacgaggacatttgtgggcaagcagatgacagaggtttgaaggagaatggcatggcaggagtctctgccagttacttgggcttcaacagccaagctggcacaaaagacagctggcggaggctgctcggctactggttacctggagaagtagtatttgcctatttcccccttcatccatcctgagccaaatttcntttgctgaacaggaaagagcyaggaaccctggaggtaaacaaagactttgancctgtntnagtgtatgtgtttntgtaacttcctgtggagtgcaaatagattcagagaaatttagagctaaaaaggcccttagagggaatctagcccaacctacattccaccctgttacttatgtagaaactgaggcccagagagggaagatgacctgccccaagtggtgagcaagcaccaacctccagactcagcagagtgagggggtaaagcagttcctgtcccacatggccatcttctttcttccacccacaaactccaggctggaagtacttggcccccttcaggagcctggccaggcagggagagagtagctgcagccttcatcagaactcttcctcctcccaaggcattctcccagctctagcctctggactggaaagcacaagactggcccagtgccagcaagtccttaggctactgtaatgctgcctcaggacccatccctgcctggaggctcctctaggccctgtgagcacaaagaagaaagctgatttttgtcttttaatccatttcaggactctctccaggagggctcggggtgtgtcatttctatattcctccagctgggattggggggtgggctttgttgtgagaatggcctggagcaggcccaatgctgcttttgggggtcagcatccagtgtgagatactgtgtatataaactatatataatgtatataaactgggatgtaagtttgtgtaaattaatgttttattctttgcaaataaaacgctttccccgtcaaaaaaaaaaaaaaaaaaaaaaaaaaaaaaaaaaaaa

SEQ ID NO: 1428 - protein, 391 aa, Homo sapiens
MGYPEVERRELLPAAAPRERGSQGCGCGGAPARAGEGNSCLLFLGFFGLSLALHLLTLCCYLELRSELRRERGAESRLGGSGTPGTSGTLSSLGGLDPDSPITSHLGQPSPKQQPLEPGEAALHSDSQDGHQMALLNFFFPDEKPYSEEESRRVRRNKRSKSNEGADGPVKNKKKGKKAGPPGPNGPPGPPGPPGPQGPPGIPGIPGIPGTTVMGPPGPPGPPGPQGPPGLQGPSGAADKAGTRENQPAVVHLQGQGSAIQVKNDLSGGVLNDWSRITMNPKVFKLHPRSGELEVLVDGTYFIYSQVEVYYINFTDFASYEVVVDEKPFLQCTRSIETGKTNYNTCYTAGVCLLKARQKIAVKMVHADISINMSKHTTFFGAIRLGEAPAS

SEQ ID NO: 1429 - DNA, 2255 bp, Homo sapiens
ctgcctgcgttagcggcggtggaggaggaggcagagaggagtggagggcggagtagacggaggaggctgctgcagagaagaaagtgtcagagccggttcggctttagagtgtggtgaagggtacttttcatggtgcatggaaggaaagccaatgcgcaggtgtaccaacattcgaccaggagagactggaatggatgtaacaagccgctgcacccttggagaccccaacaaactgccagaaggggttccccaacctgcccgcatgccctatatctcagacaagcaccctcgacaaaccttggaagtgattaaccttctgagaaagcaccgggagctatgtgatgtggtgctagttgtgggcgccaagaagatatatgcccatcgagtcattttgtcagcctgtagtccctacttccgagctatgtttacaggagaattggcagagagccgtcagacagaagtagtgatccgagacattgacgagagggctatggaattactgattgactttgcgtatacctcccagataacagtagaagagggcaatgttcagactcttctgccagctgcttgcctcctccagctggcagaaatacaggaagcctgctgtgaattcttaaagagacaattagatccttctaactgcctgggcattcgggcttttgctgacacacattcatgtcgtgagttgctaaggatagcagacaagttcacccaacataactttcaagaggtaatggagagtgaagagttcatgttgcttccagccaatcaactcattgatataatatccagtgatgagctaaacgttcgcagtgaagaacaagtgttcaatgcagtgatggcctgggtcaaatacagtattcaggaaagacgtcctcaattaccccaggtgctgcagcatgttcgtttgcctttgcttagtcccaagttcctggtcggcacagtaggctctgatcccctcatcaaaagtgatgaagaatgcagagacttggtagatgaggctaaaaactacctcctattgccgcaagaacgaccactaatgcaaggaccaaggacgagaccacggaaacctatccgatgtggggaagtactctttgcagttggtggttggtgcagtggagatgccatttccagtgttgaacgatatgatccacagaccaatgaatggagaatggtggcttcaatgagcaaaaggagatgcggagttggggtcagtgttcttgatgatctgttatatgcagtaggaggccatgatggatcctcttatctcaatagtgttgaaaggtatgaccccaaaacaaaccagtggagcagtgatgtggcccctacaagcacctgcaggacaagtgttggtgtagcagtacttggaggctttctttatgctgtgggtggccaggatggtgtgtcttgcctcaacattgttgagaggtatgatccgaaggagaacaagtggactcgggtagcttctatgagtaccagaagactaggtgtggctgtggctgtgttaggagggttcttatatgctgtaggtggctctgacgggacatctcctctcaacacagtggaacgttacaatcctcaggaaaacagatggcacactatagcccctatggggacccggaggaaacacctaggctgtgcagtatatcaggacatgatctatgctgtaggaggtagagatgacactacagagctgagcagtgctgagagatacaaccccagaaccaaccagtggtctccagtggtggccatgacatcacgccgtagtggagttggcctggcagtggtcaatggacagctcatggcagtaggaggttttgatggcacaacatacttgaagaccatagaagtttttgatcctgatgccaatacatggaggttatatggcgggatgaattaccgtcggctatggggtggcgtaggagttattaaaatgacacattgtgaatcccatatttggtgaacacagagaagacagtcttgtatatattcctctgtattctggggagctttgaccttggagctttgtacagcttgagaaaacattagaacaaattttattatttgccggtgcctcaacaaatggaaatacaatccaatgaaagtacttcacctgcaagatgcacaataattttcaactctgtgcagaagaatatttatttttggttttaatttatcatggttttttgttgttttcgttttgaacttatccttcctcccacaaaaaaaaaaaaaaaaaaaaaaaaaaaaaa

SEQ ID NO: 1430 - protein, 609 aa, Homo sapiens
MEGKPMRRCTNIRPGETGMDVTSRCTLGDPNKLPEGVPQPARMPYISDKHPRQTLEVINLLRKHRELCDVVLVVGAKKIYAHRVILSACSPYFRAMFTGELAESRQTEVVIRDIDERAMELLIDFAYTSQITVEEGNVQTLLPAACLLQLAEIQEACCEFLKRQLDPSNCLGIRAFADTHSCRELLRIADKFTQHNFQEVMESEEFMLLPANQLIDIISSDELNVRSEEQVFNAVMAWVKYSIQERRPQLPQVLQHVRLPLLSPKFLVGTVGSDPLIKSDEECRDLVDEAKNYLLLPQERPLMQGPRTRPRKPIRCGEVLFAVGGWCSGDAISSVERYDPQTNEWRMVASMSKRRCGVGVSVLDDLLYAVGGHDGSSYLNSVERYDPKTNQWSSDVAPTSTCRTSVGVAVLGGFLYAVGGQDGVSCLNIVERYDPKENKWTRVASMSTRRLGVAVAVLGGFLYAVGGSDGTSPLNTVERYNPQENRWHTIAPMGTRRKHLGCAVYQDMIYAVGGRDDTTELSSAERYNPRTNQWSPVVAMTSRRSGVGLAVVNGQLMAVGGFDGTTYLKTIEVFDPDANTWRLYGGMNYRRLWGGVGVIKMTHCESHIW

SEQ ID NO: 1431 - DNA, 8257 bp, Homo sapiens
taaatttaaaggcggggcggcctgtgagccctgaagtgccggccgcggagggtcctggccattttggtgggaccagttcagcctgataggatggcggaggaaggagccgtggccgtctgcgtgcgagtgcggccgctgaacagcagagaagaatcacttggagaaactgcccaagtttactggaaaactgacaataatgtcatttatcaagttgatggaagtaaatccttcaattttgatcgtgtctttcatggtaatgaaactaccaaaaatgtgtatgaagaaatagcagcaccaatcatcgattctgccatacaaggctacaatggtactatatttgcctatggacagactgcttcaggaaaaacatataccatgatgggttcagaagatcatttgggagttatacccagggcaattcatgacattttccaaaaaattaagaagtttcctgatagggaatttctcttacgtgtatcttacatggaaatatacaatgaaaccattacagatttactctgtggcactcaaaaaatgaaacctttaattattcgagaagatgtcaataggaatgtgtatgttgctgatctcacagaagaagttgtatatacatcagaaatggctttgaaatggattacaaagggagaaaagagcaggcattatggagaaacaaaaatgaatcaaagaagcagtcgttctcataccatctttaggatgattttggaaagcagagagaagggtgaaccttctaattgtgaaggatctgttaaggtatcccatttgaatttggttgatcttgcaggcagtgaaagagctgctcaaacaggcgctgcaggtgtgcggctcaaggaaggctgtaatataaatcgaagcttatttattttgggacaagtgatcaagaaacttagtgatggacaagttggtggtttcataaattatcgagatagcaagttaacacgaattcttcagaattccttgggaggaaatccaaagacacgtattatctgcacaattactccagtatcttttgatgaaactcttactgctctccagtttgccagtactgctaaatatatgaagaatactccttatgttaatgaggtatcaactgatgaagctctcctgaaaaggtatagaaaagaaataatggatcttaaaaaacaattagaggaggtttctttagagacgcgggctcaggcaatggaaaaagaccaattggcccaacttttggaagaaaaagatttgcttcagaaagtacagaatgagaaaattgaaaacttaacacggatgctggtgacctcttcttccctcacgttgcaacaggaattaaaggctaaaagaaaacgaagagttacttggtgccttggcaaaattaacaaaatgaagaactcaaactatgcagatcaatttaatataccaacaaatataacaacaaaaacacataagctttctataaatttattacgagaaattgatgaatctgtctgttcagagtctgatgttttcagtaacactcttgatacattaagtgagatagaatggaatccagcaacaaagctactaaatcaggagaatatagaaagtgagttgaactcacttcgtgctgactatgataatctggtattagactatgaacaactacgaacagaaaaagaagaaatggaattgaaattaaaagaaaagaatgatttggatgaatttgaggctctagaaagaaaaactaaaaaagatcaagagatgcaactaattcatgaaatttcgaacttaaagaatttagttaagcatcgagaagtatataatcaagatcttgagaatgaactcagttcaaaagtagagctgcttagagaaaaggaagaccagattaagaagctacaggaatacatagactctcaaaagctagaaaatataaaaatggacttgtcatactcattggaaagcattgaagacccaaaacaaatgaagcagactctgtttgatgctgaaactgtagcccttgatgccaagagagaatcagcctttcttagaagtgaaaatctggagttgaaggagaaaatgaaagaacttgcaactacatacaagcaaatggaaaatgatattcagttatatcaaagccaattggaggcaaaaaagaaaatgcaagttgatctggagaaagaattacaatctgcttttaatgagataacaaaactcacctcccttatagatggcaaagttccaaaagatttgctctgtaatttggaattggaaggaaagattactgatcttcagaaagaactaaataaagaagttgaagaaaatgaagctttgcgggaagaagtcattttgctttcagaattgaaatctttaccttctgaagtagaaaggctgaggaaagagatacaagacaaatctgaagagctccatataataacatcagaaaaagataaattgttttctgaagtagttcataaggagagtagagttcaaggtttacttgaagaaattgggaaaacaaaagatgacctagcaactacacagtcgaattataaaagcactgatcaagaattccaaaatttcaaaacccttcatatggactttgagcaaaagtataagatggtccttgaggagaatgagagaatgaatcaggaaatagttaatctctctaaagaagcccaaaaatttgattcgagtttgggtgctttgaagaccgagctttcttacaagacccaagaacttcaggagaaaacacgtgaggttcaagaaagactaaatgagatggaacagctgaaggaacaattagaaaatagagattctccgctgcaaactgtagaaagggagaaaacactgattactgagaaactgcagcaaactttagaagaagtaaaaactttaactcaagaaaaagatgatctaaaacaactccaagaaagcttgcaaattgagagggaccaactcaaaagtgatattcacgatactgttaacatgaatatagatactcaagaacaattacgaaatgctcttgagtctctgaaacaacatcaagaaacaattaatacactaaaatcgaaaatttctgaggaagtttccaggaatttgcatatggaggaaaatacaggagaaactaaagatgaatttcagcaaaagatggttggcatagataaaaaacaggatttggaagctaaaaatacccaaacactaactgcagatgttaaggataatgagataattgagcaacaaaggaagatattttctttaatacaggagaaaaatgaactccaacaaatgttagagagtgttatagcagaaaaggaacaattgaagactgacctaaaggaaaatattgaaatgaccattgaaaaccaggaagaattaagacttcttggggatgaacttaaaaagcaacaagagatagttgcacaagaaaagaaccatgccataaagaaagaaggagagctttctaggacctgtgacagactggcagaagttgaagaaaaactaaaggaaaagagccagcaactccaagaaaaacagcaacaacttcttaatgtacaagaagagatgagtgagatgcagaaaaagattaatgaaatagagaatttaaagaatgaattaaagaacaaagaattgacattggaacatatggaaacagagaggcttgagttggctcagaaacttaatgaaaattatgaggaagtgaaatctataaccaaagaaagaaaagttctaaaggaattacagaagtcatttgaaacagagagagaccaccttagaggatatataagagaaattgaagctacaggcctacaaaccaaagaagaactaaaaattgctcatattcacctaaaagaacaccaagaaactattgatgaactaagaagaagcgtatctgagaagacagctcaaataataaatactcaggacttagaaaaatcccataccaaattacaagaagagatcccagtgcttcatgaggaacaagagttactgcctaatgtgaaaaaagtcagtgagactcaggaaacaatgaatgaactggagttattaacagaacagtccacaaccaaggactcaacaacactggcaagaatagaaatggaaaggctcaggttgaatgaaaaatttcaagaaagtcaggaagagataaaatctctaaccaaggaaagagacaaccttaaaacgataaaagaagcccttgaagttaaacatgaccagctgaaagaacatattagagaaactttggctaaaatccaggagtctcaaagcaaacaagaacagtccttaaatatgaaagaaaaagacaatgaaactaccaaaatcgtgagtgagatggagcaattcaaacccaaagattcagcactactaaggatagaaatagaaatgctcggattgtccaaaagacttcaagaaagtcatgatgaaatgaaatctgtagctaaggagaaagatgacctacagaggctgcaagaagttcttcaatctgaaagtgaccagctcaaagaaaacataaaagaaattgtagctaaacacctggaaactgaagaggaacttaaagttgctcattgttgcctgaaagaacaagaggaaactattaatgagttaagagtgaatctttcagagaaggaaactgaaatatcaaccattcaaaagcagttagaagcaatcaatgataaattacagaacaagatccaagagatttatgagaaagaggaacaacttaatataaaacaaattagtgaggttcaggaaaacgtgaatgaactgaaacaattcaaggagcatcgcaaagccaaggattcagcactacaaagtatagaaagtaagatgctcgagttgaccaacagacttcaagaaagtcaagaagaaatacaaattatgattaaggaaaaagaggaaatgaaaagagtacaggaggcccttcagatagagagagaccaactgaaagaaaacactaaagaaattgtagctaaaatgaaagaatctcaagaaaaagaatatcagtttcttaagatgacagctgtcaatgagactcaggagaaaatgtgtgaaatagaacacttgaaggagcaatttgagacccagaagttaaacctggaaaacatagaaacggagaatataaggttgactcagatactacatgaaaaccttgaagaaatgagatctgtaacaaaagaaagagatgaccttaggagtgtggaggagactctcaaagtagagagagaccagctcaaggaaaaccttagagaaactataactagagacctagaaaaacaagaggagctaaaaattgttcacatgcatctgaaggagcaccaagaaactattgataaactaagagggattgtttcagagaaaacaaatgaaatatcaaatatgcaaaaggacttagaacactcaaatgatgccttaaaagcacaggatctgaaaatacaagaggaactaagaattgctcacatgcatctgaaagagcagcaggaaactattgacaaactcagaggaattgtttctgagaagacagataaactatcaaatatgcaaaaagatttagaaaattcaaatgctaaattacaagaaaagattcaagaacttaaggcaaatgaacatcaacttattacgttaaaaaaagatgtcaatgagacacagaaaaaagtgtctgaaatggagcaactaaagaaacaaataaaagaccaaagcttaactctgagtaaattagaaatagagaatttaaatttggctcaagaacttcatgaaaaccttgaagaaatgaaatctgtaatgaaagaaagagataatctaagaagagtagaggagacactcaaactggagagagaccaactcaaggaaagcctgcaagaaaccaaagctagagatctggaaatacaacaggaactaaaaactgctcgtatgctatcaaaagaacacaaagaaactgttgataaacttagagaaaaaatttcagaaaagacaattcaaatttcagacattcaaaaggatttagataaatcaaaagatgaattacagaaaaagatccaagaacttcagaaaaaagaacttcaactgcttagagtgaaagaagatgtcaatatgagtcataaaaaaattaatgaaatggaacagttgaagaagcaatttgagccaaactatctatgcaagtgtgagatggataacttccagttgactaagaaacttcatgaaagccttgaagaaataagaattgtagctaaagaaagagatgagctaaggaggataaaagaatctctcaaaatggaaagggaccaattcatagcaaccttaagggaaatgatagctagagaccgacagaaccaccaagtaaaacctgaaaaaaggttactaagtgatggacaacagcaccttatggaaagcctgagagaaaagtgctctagaataaaagagcttttgaagagatactcagagatggatgatcattatgagtgcttgaatagattgtctcttgacttggagaaggaaattgaattccacagaatcatgaagaaactgaagtatgtgttaagctatgttacaaaaataaaagaagaacaacatgaatgcatcaataaatttgaaatggattttattgatgaagtggaaaagcaaaaggaattgctaattaaaatacagcaccttcaacaagattgtgatgtaccatccagagaattaagggatctcaaattgaaccagaatatggatctacatattgaggaaattctcaaagatttctcagaaagtgagttccctagcataaagactgaatttcaacaagtactaagtaataggaaagaaatgacacagtttttggaagagtggttaaatactcgttttgatatagaaaagcttaaaaatggcatccagaaagaaaatgataggatttgtcaagtgaataacttctttaataacagaataattgccataatgaatgaatcaacagagtttgaggaaagaagtgctaccatatccaaagagtgggaacaggacctgaaatcactgaaagagaaaaatgaaaaactatttaaaaactaccaaacattgaagacttccttggcatctggtgcccaggttaatcctaccacacaagacaataagaatcctcatgttacatcaagagctacacagttaaccacagagaaaattcgagagctggaaaattcactgcatgaagctaaagaaagtgctatgcataaggaaagcaagattataaagatgcagaaagaacttgaggtgactaatgacataatagcaaaacttcaagccaaagttcatgaatcaaataaatgccttgaaaaaacaaaagagacaattcaagtacttcaggacaaagttgctttaggagctaagccatataaagaagaaattgaagatctcaaaatgaagcttgtgaaaatagacctagagaaaatgaaaaatgccaaagaatttgaaaaggaaatcagtgctacaaaagccactgtagaatatcaaaaggaagttataaggctattgagagaaaatctcagaagaagtcaacaggcccaagatacctcagtgatatcagaacatactgatcctcagccttcaaataaacccttaacttgtggaggtggcagcggcattgtacaaaacacaaaagctcttattttgaaaagtgaacatataaggctagaaaaagaaatttctaagttaaagcagcaaaatgaacagctaataaaacaaaagaatgaattgttaagcaataatcagcatctttccaatgaggtcaaaacttggaaggaaagaacccttaaaagagaggctcacaaacaagtaacttgtgagaattctccaaagtctcctaaagtgactggaacagcttctaaaaagaaacaaattacaccctctcaatgcaaggaacggaatttacaagatcctgtgccaaaggaatcaccaaaatcttgtttttttgatagccgatcaaagtctttaccatcacctcatccagttcgctattttgataactcaagtttaggcctttgtccagaggtgcaaaatgcaggagcagagagtgtggattctcagccaggtccttggcacgcctcctcaggcaaggatgtgcctgagtgcaaaactcagtagactcctctttgtcacttctctggagatccagcattccttatttggaaatgactttgtttatgtgtctatccctggtaatgatgttgtagtgcagcttaatttcaattcagtctttactttgccactagagttgaaagataagggaacaggaaatgaatgcattgtggtaatttag

SEQ ID NO: 1432 - protein, 2663 aa, Homo sapiens
MAEEGAVAVCVRVRPLNSREESLGETAQVYWKTDNNVIYQVDGSKSFNFDRVFHGNETTKNVYEEIAAPIIDSAIQGYNGTIFAYGQTASGKTYTMMGSEDHLGVIPRAIHDIFQKIKKFPDREFLLRVSYMEIYNETITDLLCGTQKMKPLIIREDVNRNVYVADLTEEVVYTSEMALKWITKGEKSRHYGETKMNQRSSRSHTIFRMILESREKGEPSNCEGSVKVSHLNLVDLAGSERAAQTGAAGVRLKEGCNINRSLFILGQVIKKLSDGQVGGFINYRDSKLTRILQNSLGGNPKTRIICTITPVSFDETLTALQFASTAKYMKNTPYVNEVSTDEALLKRYRKEIMDLKKQLEEVSLETRAQAMEKDQLAQLLEEKDLLQKVQNEKIENLTRMLVTSSSLTLQQELKAKRKRRVTWCLGKINKMKNSNYADQFNIPTNITTKTHKLSINLLREIDESVCSESDVFSNTLDTLSEIEWNPATKLLNQENIESELNSLRADYDNLVLDYEQLRTEKEEMELKLKEKNDLDEFEALERKTKKDQEMQLIHEISNLKNLVKHREVYNQDLENELSSKVELLREKEDQIKKLQEYIDSQKLENIKMDLSYSLESIEDPKQMKQTLFDAETVALDAKRESAFLRSENLELKEKMKELATTYKQMENDIQLYQSQLEAKKKMQVDLEKELQSAFNEITKLTSLIDGKVPKDLLCNLELEGKITDLQKELNKEVEENEALREEVILLSELKSLPSEVERLRKEIQDKSEELHIITSEKDKLFSEVVHKESRVQGLLEEIGKTKDDLATTQSNYKSTDQEFQNFKTLHMDFEQKYKMVLEENERMNQEIVNLSKEAQKFDSSLGALKTELSYKTQELQEKTREVQERLNEMEQLKEQLENRDSPLQTVEREKTLITEKLQQTLEEVKTLTQEKDDLKQLQESLQIERDQLKSDIHDTVNMNIDTQEQLRNALESLKQHQETINTLKSKISEEVSRNLHMEENTGETKDEFQQKMVGIDKKQDLEAKNTQTLTADVKDNEIIEQQRKIFSLIQEKNELQQMLESVIAEKEQLKTDLKENIEMTIENQEELRLLGDELKKQQEIVAQEKNHAIKKEGELSRTCDRLAEVEEKLKEKSQQLQEKQQQLLNVQEEMSEMQKKINEIENLKNELKNKELTLEHMETERLELAQKLNENYEEVKSITKERKVLKELQKSFETERDHLRGYIREIEATGLQTKEELKIAHIHLKEHQETIDELRRSVSEKTAQIINTQDLEKSHTKLQEEIPVLHEEQELLPNVKKVSETQETMNELELLTEQSTTKDSTTLARIEMERLRLNEKFQESQEEIKSLTKERDNLKTIKEALEVKHDQLKEHIRETLAKIQESQSKQEQSLNMKEKDNETTKIVSEMEQFKPKDSALLRIEIEMLGLSKRLQESHDEMKSVAKEKDDLQRLQEVLQSESDQLKENIKEIVAKHLETEEELKVAHCCLKEQEETINELRVNLSEKETEISTIQKQLEAINDKLQNKIQEIYEKEEQLNIKQISEVQENVNELKQFKEHRKAKDSALQSIESKMLELTNRLQESQEEIQIMIKEKEEMKRVQEALQIERDQLKENTKEIVAKMKESQEKEYQFLKMTAVNETQEKMCEIEHLKEQFETQKLNLENIETENIRLTQILHENLEEMRSVTKERDDLRSVEETLKVERDQLKENLRETITRDLEKQEELKIVHMHLKEHQETIDKLRGIVSEKTNEISNMQKDLEHSNDALKAQDLKIQEELRIAHMHLKEQQETIDKLRGIVSEKTDKLSNMQKDLENSNAKLQEKIQELKANEHQLITLKKDVNETQKKVSEMEQLKKQIKDQSLTLSKLEIENLNLAQELHENLEEMKSVMKERDNLRRVEETLKLERDQLKESLQETKARDLEIQQELKTARMLSKEHKETVDKLREKISEKTIQISDIQKDLDKSKDELQKKIQELQKKELQLLRVKEDVNMSHKKINEMEQLKKQFEPNYLCKCEMDNFQLTKKLHESLEEIRIVAKERDELRRIKESLKMERDQFIATLREMIARDRQNHQVKPEKRLLSDGQQHLMESLREKCSRIKELLKRYSEMDDHYECLNRLSLDLEKEIEFHRIMKKLKYVLSYVTKIKEEQHECINKFEMDFIDEVEKQKELLIKIQHLQQDCDVPSRELRDLKLNQNMDLHIEEILKDFSESEFPSIKTEFQQVLSNRKEMTQFLEEWLNTRFDIEKLKNGIQKENDRICQVNNFFNNRIIAIMNESTEFEERSATISKEWEQDLKSLKEKNEKLFKNYQTLKTSLASGAQVNPTTQDNKNPHVTSRATQLTTEKIRELENSLHEAKESAMHKESKIIKMQKELEVTNDIIAKLQAKVHESNKCLEKTKETIQVLQDKVALGAKPYKEEIEDLKMKLVKIDLEKMKNAKEFEKEISATKATVEYQKEVIRLLRENLRRSQQAQDTSVISEHTDPQPSNKPLTCGGGSGIVQNTKALILKSEHIRLEKEISKLKQQNEQLIKQKNELLSNNQHLSNEVKTWKERTLKREAHKQVTCENSPKSPKVTGTASKKKQITPSQCKERNLQDPVPKESPKSCFFDSRSKSLPSPHPVRYFDNSSLGLCPEVQNAGAESVDSQPGPWHASSGKDVPECKTQ

SEQ ID NO: 1433 - DNA, 1051 bp, Homo sapiens
ggcacgagggagggacggtgggggtgaccccctctcctcttggcttgacaggaagcatggcactctggcgggcataccagcgggccctggccgctcacccgtggaaagtacaggtcctgacagctgggtccctgatgggcctgggtgacattatctcacagcagctggtggagaggcggggtctgcaggaacaccagagaggccggactctgaccatggtgtccctgggctgtggctttgtgggccctgtggtaggaggctggtacaaggttttggatcggttcatccctggcaccaccaaagtggatgcactgaagaagatgttgttggatcaggggggctttgccccgtgttttctaggctgctttctcccactggtaggggcacttaatggactgtcagcccaggacaactgggccaaactacagcgggattatcctgatgcccttatcaccaactactatctatggcctgctgtgcagttagccaacttctacctggtcccccttcattacaggttggccgttgtccaatgtgttgctgttatctggaactcctacctgtcctggaaggcacatcggctctaagcctgcctcactccatcgtttccaccttgcagtgatgcagcttgaccctggaacggtcagacaacctcctcaaagtgggcataccagtttccacggggttgggttgccggtcagagcttaagaggactagcaccctgcaatgcccctcttcactctaaaatgtacactgactgctttagagcccttgataatagtcttattcccaccacatactaggcactccataaatatctgttgaaccttcatgaccttatcaactttacacccatatcccagcaaatgccactcatccccactcttcatagacacatttgttactctaaccctgcctaggcttcttgtagctccagctctttagagactcccggaaccctttatatggtgcctcagtaaatatgttattaaatatgtaatccggaaaaaaaaaaaaaaaaaaaaaaaaaaaaaaaaaaaaaaaaaaaaaa

SEQ ID NO: 1434 - protein, 176 aa, Homo sapiens
MALWRAYQRALAAHPWKVQVLTAGSLMGLGDIISQQLVERRGLQEHQRGRTLTMVSLGCGFVGPVVGGWYKVLDRFIPGTTKVDALKKMLLDQGGFAPCFLGCFLPLVGALNGLSAQDNWAKLQRDYPDALITNYYLWPAVQLANFYLVPLHYRLAVVQCVAVIWNSYLSWKAHRL

SEQ ID NO: 1435 - DNA, 1284 bp, Homo sapiens
ggctccttcgggaaacccagccccgtcaccgggctccgagcggctcgcaggcgagcgacagcggcctcagccccggcagcgcccagcggcggctgcggaaagcggagggagtccgacgcgggcgcgggcggggagcgtgcgtccgttcgcacaggcagcgggaggaggggcggcgcgaaccatggccggggacagcgagcagaccctgcagaaccaccagcagcccaacggcggcgagcccttccttataggcgtcagcgggggaacagctagcggcaagtcttccgtgtgtgctaagatcgtgcagctcctggggcagaatgaggtggactatcgccagaagcaggtggtcatcctgagccaggatagcttctaccgtgtccttacctcggagcagaaggccaaagccctgaagggccagttcaactttgaccacccggatgcctttgacaatgaactcattctcaaaacactcaaagaaatcactgaagggaaaacagtccagatccccgtgtatgactttgtctcccattcccggaaggaggagacagttactgtctatcccgcagacgtggtgctctttgaagggatcctggccttctactcccaggaggtacgagacctgttccagatgaagctttttgtggatacagatgcggacacccggctctcacgcagagtattaagggacatcagcgagagaggcagggatcttgagcagattttatctcagtacattacgttcgtcaagcctgcctttgaggaattctgcttgccaacaaagaagtatgctgatgtgatcatccctagaggtgcagataatctggtggccatcaacctcatcgtgcagcacatccaggacatcctgaatggagggccctccaaacggcagaccaatggctgtctcaacggctacaccccttcacgcaagaggcaggcatcggagtccagcagcaggccgcattgacccgtctccatcggaccccagcccctatctccaagagacagaggaggggtcaggaggcactgctcatctgtacatactgtttcctatgacattactgtatttaagaaaacaccatggagatgaaatgcctttgattttttttttctttttgtactttggaacgacaaaatgaaacagaacttgaccctgagcttaaataacaaaactgtgccaactactactggtgatgcctaattatgaatccaacgtgtaaccagttataaatacatatatatataaaaaaaaaaaaaaaaaaaaaaaaaaaaaaaaaaaaaaaa

SEQ ID NO: 1436 - protein, 261 aa, Homo sapiens
MAGDSEQTLQNHQQPNGGEPFLIGVSGGTASGKSSVCAKIVQLLGQNEVDYRQKQVVILSQDSFYRVLTSEQKAKALKGQFNFDHPDAFDNELILKTLKEITEGKTVQIPVYDFVSHSRKEETVTVYPADVVLFEGILAFYSQEVRDLFQMKLFVDTDADTRLSRRVLRDISERGRDLEQILSQYITFVKPAFEEFCLPTKKYADVIIPRGADNLVAINLIVQHIQDILNGGPSKRQTNGCLNGYTPSRKRQASESSSRPH

SEQ ID NO: 1437 - DNA, 4562 bp, Homo sapiens
tcactcgctccggggacccgcaacaagtggccgccgcgccctccccggggaagccgcgggcgcgcaggggcagccgaaggaggcggtcgagccgcggagcccaggggcctgcccggctcagcgcccaccggaggggatcggggcgggcggatggggacccggcggcggcggcgcggtgagcctctgggcggccccggggcgcgggctgtgcgcggcgctgcgcccgccggcccccagcgcggattgtaagtgctgcagctgtgcccggccccgcctggagccaccgggggtgccaggaggggacgcagcaccccctcccactggagtgcggggacctctccaggccggaggtcggccccggagcttgggggggatgtgcagctaacggtcccgtcgggcgggctttcctcgggccgagcgcgcaggacgtgcgccgcagctatggagtgtcccgggagacggcgggcatgacggctacaggatgggcgcgaacaatggcaaacagtacggcagtgagggcaaaggcagctcgagcatctcatctgacgtgagttcaagtacagatcacacgcccactaaagcccagaagaatgtggctaccagcgaagactccgacctgagcatgcgcacactgagcacgcccagcccagccctgatatgtccaccgaatctcccaggatttcagaatggaaggggctcgtccacctcctcgtcctccatcaccggggagacggtggccatggtgcactccccgcccccgacccgcctcacacacccgctcatccggctcgcctccagaccccagaaggagcaggccagcatagaccggctcccggaccactccatggtgcagatcttctccttcctgcccaccaaccagctgtgccgctgcgcgcgagtgtgccgccgctggtacaacctggcctgggacccgcggctctggaggactatccgcctgacgggcgagaccatcaacgtggaccgcgccctcaaggtgctgacccgcagactctgccaggacacccccaacgtgtgtctcatgctggaaaccgtaactgtcagtggctgcaggcggctcacagaccgagggctgtacaccatcgcccagtgctgccccgaactgaggcgactggaagtctcaggctgttacaatatctccaacgaggccgtctttgatgtggtgtccctctgccctaatctggagcacctggatgtgtcaggatgctccaaagtgacctgcatcagcttgacccgggaggcctccattaaactgtcacccttgcatggcaaacagatttccatccgctacctggacatgacggactgcttcgtgctggaggacgaaggcctgcacaccatcgcggcgcactgcacgcagctcacccacctctacctgcgccgctgcgtccgcctgaccgacgaaggcctgcgctacctggtgatctactgcgcctccatcaaggagctgagcgtcagcgactgccgcttcgtcagcgacttcggcctgcgggagatcgccaagctggagtcccgcctgcggtacctgagcatcgcgcactgcggccgggtcaccgacgtgggcatccgctacgtggccaagtactgcagcaagctgcgctacctcaacgcgaggggctgcgagggcatcacggaccacggtgtggagtacctcgccaagaactgcaccaaactcaaatccctggatatcggcaaatgccctttggtatccgacacgggcctggagtgcctggccctgaactgcttcaacctcaagcggctcagcctcaagtcctgcgagagcatcaccggccagggcttgcagatcgtggccgccaactgctttgacctccagacgctgaatgtccaggactgcgaggtctccgtggaggccctgcgctttgtcaaacgccactgcaagcgctgcgtcatcgagcacaccaacccggctttcttctgaagggacagagttcatccggcgttgtattcacacaaacctgaacaaagcaaatttttttaaaagcagcgtatgtaagcaccgacacccactcaaaacagctctttcttccgggaaggttattaggaatctggcctttatttttcctcatttctcatgggcaacagaggccaaagaaacgaagcaagacaaacagcaaacaggcattttggtcaggtcatttgtaggcagtttctcttctcacaaaagatgtacttaagcaggctgatcgctgttccttgagcaaggcgcttactctcctccgctcaggcccccaaggccgccctttccctcgcacacaggccccacccccacagttccacgccccccccccaaggccacaccctccctccctagagcagcagcgaggatccatcatcagaatcacagtgctctccagacctcctctctaaactgcttcattgacctaagtcactctcttcaatcccacacccatggacattcttgtcaactcaataccatagcactttgcataggcaaaatacttttcaggcctttttaaaaaattcattacagcaaacagctggggaaggacatgcagtcctcccccagctctgtcaatgactatgaccttggccaaagcacttcactgctctgggctgcagcttccagcactgaatcagaggccacacagcccaaagattagcttcatgtccattatagcattgagggagcagagatacccatacacagaagcaccttggcatagagcacccaggcatcgacctcttccaggagaactgattctgtggatggatgtgatttcaggagattgtgcagtgccagcatcagtgcataaagggtcctgtatgtcctttggctgcaaatcacccacttccctgtgtttcagtgggagaatttcctctcccacctcctcacatcctcttttgccaggctggatgctgtcgtctctgtacacaaatactttctgcattcccccctccacaccatcctagcgaggcaccagcacacctaatcacagcaaagcccagatccccccatcagttgcttttactcagtgttttcaaataggagtaaaggcccttgcaatttttaattaacaagcaaggcccaagggaacacatgtcctcaaaagtttttctgatccctcgccttgcacacctggcatgcatcaggcacatctgtcctacagctggcagagacagatgcctcggttctttgtcattcagattgcatttgacctcttctcatctatttatttctttatacatccagacttcatcacatgaagcctattggggttaagtttgtaagtgtttaattgtgcaaattgccaccctgtgtacctcctccatgtctgtctgcgtgttttccaccaaagaatgcaaagcagacttccaggtgtttaaattctgttcactcaacaatgccagatgaatggaagagggaacacactgagatgacttagactctggtccaccaaccagacccttggaaaggaatactaaaatcattacaaggtatggattttaaatggatgaaacttcaaattatcttatttggatagaagtctatattctagcctcatttgcatgaagtcagatagccagaagaaattccattgctggttttcacgaaattcacttgtcttttgctaataaacacatggccctttcccagattattctctagccaagccccacctttgttacgttgaaatccctcatttattttcttctcaaaatgcccattatccaaatgcagaacctctgcatctccaagccagttatgctgaatttgtcaaacttagacacccttgacaactgcactcctactgtaggctcctgtgcatactgtcgtcttctgtgggggatggagaggttagtgtgatgaggtggtgtctgcccaggaggtttctttcaaacatcatggcctcccatccaatcaacatcatcaaattacatgtgtaatcaaggctctgtgccatgggggaaatgaatcatttagctaggccaggatctagtgaaagccacagagtttaaaaccatgaaagaagttgaaggcagcattcctcagctctgtgacttgtgaccctatttgaagtttcaggatttgggtgtcacaaaggattgtccctaatccttggccctggggtcttccgagtgagctggtttaatactctgagaatgagcagggagatccagagaatgaatccctgaccgcatcacctaaactgtcttccaaacatgagacaaagctgactgttcacactgattgcccagcacataccgtcttgccagtttcttcttttctcccagtctcctgttcatccattctgttctcccttggggtgggaatctatgatggaggttactggggaaacagctcagcagatttttggagaccaaaccaaaggtctcactaggaaatttatctgttttaaaacattgcttccttcctggctctgctaaattgaatgctcattgtttgttgttgttgttttttaattctaatgttcaaatcactgcgtgctgtatgaatctagaaagccttaatttactaccaagaaataaagcaatatgttcgt

SEQ ID NO: 1438 - protein, 491 aa, Homo sapiens
MGANNGKQYGSEGKGSSSISSDVSSSTDHTPTKAQKNVATSEDSDLSMRTLSTPSPALICPPNLPGFQNGRGSSTSSSSITGETVAMVHSPPPTRLTHPLIRLASRPQKEQASIDRLPDHSMVQIFSFLPTNQLCRCARVCRRWYNLAWDPRLWRTIRLTGETINVDRALKVLTRRLCQDTPNVCLMLETVTVSGCRRLTDRGLYTIAQCCPELRRLEVSGCYNISNEAVFDVVSLCPNLEHLDVSGCSKVTCISLTREASIKLSPLHGKQISIRYLDMTDCFVLEDEGLHTIAAHCTQLTHLYLRRCVRLTDEGLRYLVIYCASIKELSVSDCRFVSDFGLREIAKLESRLRYLSIAHCGRVTDVGIRYVAKYCSKLRYLNARGCEGITDHGVEYLAKNCTKLKSLDIGKCPLVSDTGLECLALNCFNLKRLSLKSCESITGQGLQIVAANCFDLQTLNVQDCEVSVEALRFVKRHCKRCVIEHTNPAFF

(The sequence listing continues in the following parts.)
